(19) United States
(12) Patent Application Publication
(10) Pub. No.: US 2007/0048301 A1
(43) Pub. Date: Mar. 1, 2007

(54) Compositions and methods for the treatment of immune related diseases

(76) Inventors: Sarah C. Bodary-Winter, Menlo Park, CA (US); Hilary Clark, San Francisco, CA (US); Brisdell Hunte, San Francisco, CA (US); Jenet K. Jackman, Half Moon Bay, CA (US); Jill R. Schoenfeld, Ashland, OR (US); P. Mickey Williams, South Fran Francisco, CA (US)

Correspondence Address: GENENTECH, INC., 1 DNA WAY, SOUTH SAN FRANCISCO, CA, 94080, US

(21) Appl. No.: 10/533,520

(22) PCT Filed: Nov. 24, 2003
(86) PCT No.: PCT/US03/35971

§ 371 Date: Mar. 9, 2006

(30) Foreign Application Priority Data
Nov. 26, 2002 (US) 60429069

(51) Int. Cl. C12Q 1/68; G01N 33/53; C07H 21/04; C12P 21/06; A61K 39/395; C07K 14/705; C12N 15/74

(52) U.S. Cl. 424/143.1; 530/350; 530/388.22; 435/69.1; 435/252.33; 435/488; 536/23.5; 435/6; 435/7.1

(57) ABSTRACT

The present invention relates to compositions containing novel proteins and methods of using those compositions for the diagnosis and treatment of immune related diseases.

### FIELD OF THE INVENTION

[0001] The present invention relates to compositions and methods useful for the diagnosis and treatment of immune related diseases.

### BACKGROUND OF THE INVENTION

[0002] Immune related and inflammatory diseases are the manifestation or consequence of fairly complex, often multiple interconnected biological pathways which in normal physiology are critical to respond to insult or injury, initiate repair from insult or injury, and mount innate and acquired defense against foreign organisms. Disease or pathology occurs when these normal physiological pathways cause additional insult or injury either as directly related to the intensity of the response, as a consequence of abnormal regulation or excessive stimulation, as a reaction to self, or as a combination of these.

[0003] Though the genesis of these diseases often involves multistep pathways and often multiple different biological systems/pathways, intervention at critical points in one or more of these pathways can have an ameliorative or therapeutic effect Therapeutic intervention can occur by either antagonism of a detrimental process/pathway or stimulation of a beneficial process/pathway.

[0004] Many immune related diseases are known and have been extensively studied. Such diseases include immune-mediated inflammatory diseases, non-immune-mediated inflammatory diseases, infectious diseases, immunodeficiency diseases, neoplasia, etc.

[0005] T lymphocytes (T cells) are an important component of a mammalian immune response. T cells recognize antigens which are associated with a self-molecule encoded by genes within the major histocompatibility complex (MHC). The antigen may be displayed together with MHC molecules on the surface of antigen presenting cells, virus infected cells, cancer cells, grafts, etc. The T cell system eliminates these altered cells which pose a health threat to the host mammal. T cells include helper T cells and cytotoxic T cells. Helper T cells proliferate extensively following recognition of an antigen-MHC complex on an antigen presenting cell. Helper T cells also secrete a variety of cytokines, i.e., lymphokines, which play a central role in the activation of B cells, cytotoxic T cells and a variety of other cells which participate in the immune response.

[0006] Immune related diseases could be treated by suppressing the immune response. Using neutralizing antibodies that inhibit molecules having immune stimulatory activity would be beneficial in the treatment of immune-mediated and inflammatory diseases. Molecules which inhibit the immune response can be utilized (proteins directly or via the use of antibody agonists) to inhibit the immune response and thus ameliorate immune related disease.

[0007] CD4+ T cells are known to be important regulators of inflammation. Herein, CD4+ T cells were activated and the profile of genes differentially expressed upon activation was analyzed. As such, the activation specific genes may be potential therapeutic targets. In vivo co-stimulation is necessary for a productive immune proliferative response. The list of costimulatory molecules is quite extensive and it is still unclear just which co-stimulatory molecules play critical roles in different types and stages of inflammation. In this application the focus is on genes which are specifically upregulated or down-regulated by stimulation with anti-CD3/ICAM, or anti-CD3/anti-CD28 and may be useful in targeting inflammatory processes which are associated with these different molecules.

[0008] Despite the above identified advances in T cell research, there is a great need for additional diagnostic and therapeutic agents capable of detecting the presence of a T cell mediated disorders in a mammal and for effectively reducing these disorders. Accordingly, it is an objective of the present invention to identify polypeptides that are overexpressed in activated T cells as compared to resting T cells, and to use those polypeptides, and their encoding nucleic acids, to produce compositions of matter useful in the therapeutic treatment and diagnostic detection of T cell mediated disorders in mammals.

### SUMMARY OF THE INVENTION

### A. Embodiments

[0009] The present invention concerns compositions and methods useful for the diagnosis and treatment of immune related disease in mammals, including humans. The present invention is based on the identification of proteins (including agonist and antagonist antibodies) which are a result of stimulation of the immune response in mammals. Immune related diseases can be treated by suppressing or enhancing the immune response. Molecules that enhance the immune response stimulate or potentiate the immune response to an antigen. Molecules which stimulate the immune response can be used therapeutically where enhancement of the immune response would be beneficial. Alternatively, molecules that suppress the immune response attenuate or reduce the immune response to an antigen (e.g., neutralizing antibodies) can be used therapeutically where attenuation of the immune response would be beneficial (e.g., inflammation). Accordingly, the PRO polypeptides, agonists and antagonists thereof are also useful to prepare medicines and medicaments for the treatment of immune-related and inflammatory diseases. In a specific aspect, such medicines and medicaments comprise a therapeutically effective amount of a PRO polypeptide, agonist or antagonist thereof with a pharmaceutically acceptable carrier. Preferably, the admixture is sterile.

[0010] In a further embodiment, the invention concerns a method of identifying agonists or antagonists to a PRO polypeptide which comprises contacting the PRO polypeptide with a candidate molecule and monitoring a biological activity mediated by said PRO polypeptide. Preferably, the PRO polypeptide is a native sequence PRO polypeptide. In a specific aspect, the PRO agonist or antagonist is an anti-PRO antibody.

[0011] In another embodiment, the invention concerns a composition of matter comprising a PRO polypeptide or an agonist or antagonist antibody which binds the polypeptide in admixture with a carrier or excipient. In one aspect, the composition comprises a therapeutically effective amount of the polypeptide or antibody. In another aspect, when the composition comprises an immune stimulating molecule, the composition is useful for: (a) increasing infiltration of inflammatory cells into a tissue of a mammal in need thereof, (b) stimulating or enhancing an immune response in a mammal in need thereof, (c) increasing the proliferation of T-lymphocytes in a mammal in need thereof in response to an antigen, (d) stimulating the activity of T-lymphocytes or (e) increasing the vascular permeability. In a further aspect, when the composition comprises an immune inhibiting molecule, the composition is useful for: (a) decreasing infiltration of inflammatory cells into a tissue of a mammal in need thereof, (b) inhibiting or reducing an immune response in a mammal in need thereof, (c) decreasing the activity of T-lymphocytes or (d) decreasing the proliferation of T-lymphocytes in a mammal in need thereof in response to an antigen. In another aspect, the composition comprises a further active ingredient, which may, for example, be a further antibody or a cytotoxic or chemotherapeutic agent. Preferably, the composition is sterile.

[0012] In another embodiment, the invention concerns a method of treating an immune related disorder in a mammal in need thereof, comprising administering to the mammal an effective amount of a PRO polypeptide, an agonist thereof, or an antagonist thereto. In a preferred aspect, the immune related disorder is selected from the group consisting of: systemic lupus erythematosis, rheumatoid arthritis, osteoarthritis, juvenile chronic arthritis, spondyloarthropathies, systemic sclerosis, idiopathic inflammatory myopathies, Sjögren's syndrome, systemic vasculitis, sarcoidosis, autoimmune hemolytic anemia, autoimmune thrombocytopenia, thyroiditis, diabetes mellitus, immune-mediated renal disease, demyelinating diseases of the central and peripheral nervous systems such as multiple sclerosis, idiopathic demyelinating polyneuropathy or Guillain-Barré syndrome, and chronic inflammatory demyelinating polyneuropathy, hepatobiliary diseases such as infectious, autoimmune chronic active hepatitis, primary biliary cirrhosis, granulomatous hepatitis, and sclerosing cholangitis, inflammatory bowel disease, gluten-sensitive enteropathy, and Whipple's disease, autoimmune or immune-mediated skin diseases including bullous skin diseases, erythema multiforme and contact dermatitis, psoriasis, allergic diseases such as asthma, allergic rhinitis, atopic dermatitis, food hypersensitivity and urticaria, immunologic diseases of the lung such as eosinophilic pneumonias, idiopathic pulmonary fibrosis and hypersensitivity pneumonitis, transplantation associated diseases including graft rejection and graft-versus-host-disease.

[0013] In another embodiment, the invention provides an antibody which specifically binds to any of the above or below described polypeptides. Optionally, the antibody is a monoclonal antibody, humanized antibody, antibody fragment or single-chain antibody. In one aspect, the present invention concerns an isolated antibody which binds a PRO polypeptide. In another aspect, the antibody mimics the activity of a PRO polypeptide (an agonist antibody) or conversely the antibody inhibits or neutralizes the activity of a PRO polypeptide (an antagonist antibody). In another aspect, the antibody is a monoclonal antibody, which preferably has nonhuman complementarity determining region (CDR) residues and human framework region (FR) residues. The antibody may be labeled and may be immobilized on a solid support In a further aspect, the antibody is an antibody fragment, a monoclonal antibody, a single-chain antibody, or an anti-idiotypic antibody.

[0014] In yet another embodiment, the present invention provides a composition comprising an anti-PRO antibody in admixture with a pharmaceutically acceptable carrier. In one aspect, the composition comprises a therapeutically effective amount of the antibody. Preferably, the composition is sterile. The composition may be administered in the form of a liquid pharmaceutical formulation, which may be preserved to achieve extended storage stability. Alternatively, the antibody is a monoclonal antibody, an antibody fragment, a humanized antibody, or a single-chain antibody.

[0015] In a further embodiment, the invention concerns an article of manufacture, comprising:

[0016] (a) a composition of matter comprising a PRO polypeptide or agonist or antagonist thereof;

[0017] (b) a container containing said composition; and

[0018] (c) a label affixed to said container, or a package insert included in said container referring to the use of said PRO polypeptide or agonist or antagonist thereof in the treatment of an immune related disease. The composition may comprise a therapeutically effective amount of the PRO polypeptide or the agonist or antagonist thereof.

[0019] In yet another embodiment, the present invention concerns a method of diagnosing an immune related disease in a mammal, comprising detecting the level of expression of a gene encoding a PRO polypeptide (a) in a test sample of tissue cells obtained from the mammal, and (b) in a control sample of known normal tissue cells of the same cell type, wherein a higher or lower expression level in the test sample as compared to the control sample indicates the presence of immune related disease in the mammal from which the test tissue cells were obtained.

[0020] In another embodiment, the present invention concerns a method of diagnosing an immune disease in a mammal, comprising (a) contacting an anti-PRO antibody with a test sample of tissue cells obtained from the mammal, and (b) detecting the formation of a complex between the antibody and a PRO polypeptide, in the test sample; wherein the formation of said complex is indicative of the presence or absence of said disease. The detection may be qualitative or quantitative, and may be performed in comparison with monitoring the complex formation in a control sample of known normal tissue cells of the same cell type. A larger quantity of complexes formed in the test sample indicates the presence or absence of an immune disease in the mammal from which the test tissue cells were obtained. The antibody preferably carries a detectable label. Complex formation can be monitored, for example, by light microscopy, flow cytometry, fluorimetry, or other techniques known in the art. The test sample is usually obtained from an individual suspected of having a deficiency or abnormality of the immune system.

[0021] In another embodiment, the invention provides a method for determining the presence of a PRO polypeptide in a sample comprising exposing a test sample of cells suspected of containing the PRO polypeptide to an anti-PRO antibody and determining the binding of said antibody to said cell sample. In a specific aspect, the sample comprises a cell suspected of containing the PRO polypeptide and the antibody binds to the cell. The antibody is preferably detectably labeled and/or bound to a solid support.

[0022] In another embodiment, the present invention concerns an immune-related disease diagnostic kit, comprising an anti-PRO antibody and a carrier in suitable packaging. The kit preferably contains instructions for using the antibody to detect the presence of the PRO polypeptide. Preferably the carrier is pharmaceutically acceptable.

[0023] In another embodiment, the present invention concerns a diagnostic kit, containing an anti-PRO antibody in suitable packaging. The kit preferably contains instructions for using the antibody to detect the PRO polypeptide.

[0024] In another embodiment, the invention provides a method of diagnosing an immune-related disease in a mammal which comprises detecting the presence or absence or a PRO polypeptide in a test sample of tissue cells obtained from said mammal, wherein the presence or absence of the PRO polypeptide in said test sample is indicative of the presence of an immune-related disease in said mammal.

[0025] In another embodiment, the present invention concerns a method for identifying an agonist of a PRO polypeptide comprising:

[0026] (a) contacting cells and a test compound to be screened under conditions suitable for the induction of a cellular response normally induced by a PRO polypeptide; and

[0027] (b) determining the induction of said cellular response to determine if the test compound is an effective agonist, wherein the induction of said cellular response is indicative of said test compound being an effective agonist.

[0028] In another embodiment, the invention concerns a method for identifying a compound capable of inhibiting the activity of a PRO polypeptide comprising contacting a candidate compound with a PRO polypeptide under conditions and for a time sufficient to allow these two components to interact and determining whether the activity of the PRO polypeptide is inhibited. In a specific aspect, either the candidate compound or the PRO polypeptide is immobilized on a solid support. In another aspect, the non-immobilized component carries a detectable label. In a preferred aspect, this method comprises the steps of:

[0029] (a) contacting cells and a test compound to be screened in the presence of a PRO polypeptide under conditions suitable for the induction of a cellular response normally induced by a PRO polypeptide; and

[0030] (b) determining the induction of said cellular response to determine if the test compound is an effective antagonist.

[0031] In another embodiment, the invention provides a method for identifying a compound that inhibits the expression of a PRO polypeptide in cells that normally express the polypeptide, wherein the method comprises contacting the cells with a test compound and determining whether the expression of the PRO polypeptide is inhibited. In a preferred aspect, this method comprises the steps of.

[0032] (a) contacting cells and a test compound to be screened under conditions suitable for allowing expression of the PRO polypeptide; and

[0033] (b) determining the inhibition of expression of said polypeptide.

[0034] In yet another embodiment, the present invention concerns a method for treating an immune-related disorder in a mammal that suffers therefrom comprising administering to the mammal a nucleic acid molecule that codes for either (a) a PRO polypeptide, (b) an agonist of a PRO polypeptide or (c) an antagonist of a PRO polypeptide, wherein said agonist or antagonist may be an anti-PRO antibody. In a preferred embodiment, the mammal is human. In another preferred embodiment, the nucleic acid is administered via ex vivo gene therapy. In a further preferred embodiment, the nucleic acid is comprised within a vector, more preferably an adenoviral, adeno-associated viral, lentiviral or retroviral vector.

[0035] In yet another aspect, the invention provides a recombinant viral particle comprising a viral vector consisting essentially of a promoter, nucleic acid encoding (a) a PRO polypeptide, (b) an agonist polypeptide of a PRO polypeptide, or (c) an antagonist polypeptide of a PRO polypeptide, and a signal sequence for cellular secretion of the polypeptide, wherein the viral vector is in association with viral structural proteins. Preferably, the signal sequence is from a mammal, such as from a native PRO polypeptide.

[0036] In a still further embodiment, the invention concerns an ex vivo producer cell comprising a nucleic acid construct that expresses retroviral structural proteins and also comprises a retroviral vector consisting essentially of a promoter, nucleic acid encoding (a) a PRO polypeptide, (b) an agonist polypeptide of a PRO polypeptide or (c) an antagonist polypeptide of a PRO polypeptide, and a signal sequence for cellular secretion of the polypeptide, wherein said producer cell packages the retroviral vector in association with the structural proteins to produce recombinant retroviral particles.

[0037] In a still further embodiment, the invention provides a method of increasing the activity of T-lymphocytes in a mammal comprising administering to said mammal (a) a PRO polypeptide, (b) an agonist of a PRO polypeptide, or (c) an antagonist of a PRO polypeptide, wherein the activity of T-lymphocytes in the mammal is increased.

[0038] In a still further embodiment, the invention provides a method of decreasing the activity of T-lymphocytes in a mammal comprising administering to said mammal (a) a PRO polypeptide, (b) an agonist of a PRO polypeptide, or (c) an antagonist of a PRO polypeptide, wherein the activity of T-lymphocytes in the mammal is decreased.

[0039] In a still further embodiment, the invention provides a method of increasing the proliferation of T-lymphocytes in a mammal comprising administering to said mammal (a) a PRO polypeptide, (b) an agonist of a PRO polypeptide, or (c) an antagonist of a PRO polypeptide, wherein the proliferation of T-lymphocytes in the mammal is increased.

[0040] In a still further embodiment, the invention provides a method of decreasing the proliferation of T-lymphocytes in a mammal comprising administering to said mammal (a) a PRO polypeptide, (b) an agonist of a PRO polypeptide, or (c) an antagonist of a PRO polypeptide, wherein the proliferation of T-lymphocytes in the mammal is decreased.

### B. Additional Embodiments

[0041] In other embodiments of the present invention, the invention provides vectors comprising DNA encoding any of the herein described polypeptides. Host cell comprising any such vector are also provided. By way of example, the host cells may be CHO cells, E. coli, or yeast A process for producing any of the herein described polypeptides is further provided and comprises culturing host cells under conditions suitable for expression of the desired polypeptide and recovering the desired polypeptide from the cell culture.

[0042] In other embodiments, the invention provides chimeric molecules comprising any of the herein described polypeptides fused to a heterologous polypeptide or amino acid sequence. Example of such chimeric molecules comprise any of the herein described polypeptides fused to an epitope tag sequence or a Fc region of an immunoglobulin.

[0043] In another embodiment, the invention provides an antibody which specifically binds to any of the above or below described polypeptides. Optionally, the antibody is a monoclonal antibody, humanized antibody, antibody fragment or single-chain antibody.

[0044] In yet other embodiments, the invention provides oligonucleotide probes useful for isolating genomic and cDNA nucleotide sequences or as antisense probes, wherein those probes may be derived from any of the above or below described nucleotide sequences.

[0045] In other embodiments, the invention provides an isolated nucleic acid molecule comprising a nucleotide sequence that encodes a PRO polypeptide.

[0046] In one aspect, the isolated nucleic acid molecule comprises a nucleotide sequence having at least about 80% nucleic acid sequence identity, alternatively at least about 81% nucleic acid sequence identity, alternatively at least about 82% nucleic acid sequence identity, alternatively at least about 83% nucleic acid sequence identity, alternatively at least about 84% nucleic acid sequence identity, alternatively at least about 85% nucleic acid sequence identity, alternatively at least about 86% nucleic acid sequence identity, alternatively at least about 87% nucleic acid sequence identity, alternatively at least about 88% nucleic acid sequence identity, alternatively at least about 89% nucleic acid sequence identity, alternatively at least about 90% nucleic acid sequence identity, alternatively at least about 91% nucleic acid sequence identity, alternatively at least about 92% nucleic acid sequence identity, alternatively at least about 93% nucleic acid sequence identity, alternatively at least about 94% nucleic acid sequence identity, alternatively at least about 95% nucleic acid sequence identity, alternatively at least about 96% nucleic acid sequence identity, alternatively at least about 97% nucleic acid sequence identity, alternatively at least about 98% nucleic acid sequence identity and alternatively at least about 99% nucleic acid sequence identity to (a) a DNA molecule encoding a PRO polypeptide having a full-length amino acid sequence as disclosed herein, an amino acid sequence lacking the signal peptide as disclosed herein, an extracellular domain of a transmembrane protein, with or without the signal peptide, as disclosed herein or any other specifically defined fragment of the full-length amino acid sequence as disclosed herein, or (b) the complement of the DNA molecule of (a).

[0047] In other aspects, the isolated nucleic acid molecule comprises a nucleotide sequence having at least about 80% nucleic acid sequence identity, alternatively at least about 81% nucleic acid sequence identity, alternatively at least about 82% nucleic acid sequence identity, alternatively at least about 83% nucleic acid sequence identity, alternatively at least about 84% nucleic acid sequence identity, alternatively at least about 85% nucleic acid sequence identity, alternatively at least about 86% nucleic acid sequence identity, alternatively at least about 87% nucleic acid sequence identity, alternatively at least about 88% nucleic acid sequence identity, alternatively at least about 89% nucleic acid sequence identity, alternatively at least about 90% nucleic acid sequence identity, alternatively at least about 91% nucleic acid sequence identity, alternatively at least about 92% nucleic acid sequence identity, alternatively at least about 93% nucleic acid sequence identity, alternatively at least about 94% nucleic acid sequence identity, alternatively at least about 95% nucleic acid sequence identity, alternatively at least about 96% nucleic acid sequence identity, alternatively at least about 97% nucleic acid sequence identity, alternatively at least about 98% nucleic acid sequence identity and alternatively at least about 99% nucleic acid sequence identity to (a) a DNA molecule comprising the coding sequence of a full-length PRO polypeptide cDNA as disclosed herein, the coding sequence of a PRO polypeptide lacking the signal peptide as disclosed herein, the coding sequence of an extracellular domain of a transmembrane PRO polypeptide, with or without the signal peptide, as disclosed herein or the coding sequence of any other specifically defined fragment of the full-length amino acid sequence as disclosed herein, or (b) the complement of the DNA molecule of (a).

[0048] In a further aspect, the invention concerns an isolated nucleic acid molecule comprising a nucleotide sequence having at least about 80% nucleic acid sequence identity, alternatively at least about 81% nucleic acid sequence identity, alternatively at least about 82% nucleic acid sequence identity, alternatively at least about 83% nucleic acid sequence identity, alternatively at least about 84% nucleic acid sequence identity, alternatively at least about 85% nucleic acid sequence identity, alternatively at least about 86% nucleic acid sequence identity, alternatively at least about 87% nucleic acid sequence identity, alternatively at least about 88% nucleic acid sequence identity, alternatively at least about 89% nucleic acid sequence identity, alternatively at least about 90% nucleic acid sequence identity, alternatively at least about 91% nucleic acid sequence identity, alternatively at least about 92% nucleic acid sequence identity, alternatively at least about 93% nucleic acid sequence identity, alternatively at least about 94% nucleic acid sequence identity, alternatively at least about 95% nucleic acid sequence identity, alternatively at least about 96% nucleic acid sequence identity, alternatively at least about 97% nucleic acid sequence identity, alternatively at least about 98% nucleic acid sequence identity and alternatively at least about 99% nucleic acid sequence identity to (a) a DNA molecule that encodes the same mature polypeptide encoded by any of the human protein cDNAs as disclosed herein, or (b) the complement of the DNA molecule of (a).

[0049] Another aspect the invention provides an isolated nucleic acid molecule comprising a nucleotide sequence encoding a PRO polypeptide which is either transmembrane domain-deleted or transmembrane domain-inactivated, or is complementary to such encoding nucleotide sequence, wherein the transmembrane domain(s) of such polypeptide are disclosed herein. Therefore, soluble extracellular domains of the herein described PRO polypeptides are contemplated.

[0050] Another embodiment is directed to fragments of a PRO polypeptide coding sequence, or the complement thereof, that may find use as, for example, hybridization probes, for encoding fragments of a PRO polypeptide that may optionally encode a polypeptide comprising a binding site for an anti-PRO antibody or as antisense oligonucleotide probes. Such nucleic acid fragments are usually at least about 20 nucleotides in length, alternatively at least about 30 nucleotides in length, alternatively at least about 40 nucleotides in length, alternatively at least about 50 nucleotides in length, alternatively at least about 60 nucleotides in length, alternatively at least about 70 nucleotides in length, alternatively at least about 80 nucleotides in length, alternatively at least about 90 nucleotides in length, alternatively at least about 100 nucleotides in length, alternatively at least about 110 nucleotides in length, alternatively at least about 120 nucleotides in length, alternatively at least about 130 nucleotides in length, alternatively at least about 140 nucleotides in length, alternatively at least about 150 nucleotides in length, alternatively at least about 160 nucleotides in length, alternatively at least about 170 nucleotides in length, alternatively at least about 180 nucleotides in length, alternatively at least about 190 nucleotides in length, alternatively at least about 200 nucleotides in length, alternatively at least about 250 nucleotides in length, alternatively at least about 300 nucleotides in length, alternatively at least about 350 nucleotides in length, alternatively at least about 400 nucleotides in length, alternatively at least about 450 nucleotides in length, alternatively at least about 500 nucleotides in length, alternatively at least about 600 nucleotides in length, alternatively at least about 700 nucleotides in length, alternatively at least about 800 nucleotides in length, alternatively at least about 900 nucleotides in length and alternatively at least about 1000 nucleotides in length, wherein in this context the term “about” means the referenced nucleotide sequence length plus or minus 10% of that referenced length. It is noted that novel fragments of a PRO polypeptide-encoding nucleotide sequence may be determined in a routine manner by aligning the PRO polypeptide-encoding nucleotide sequence with other known nucleotide sequences using any of a number of well known sequence alignment programs and determining which PRO polypeptide-encoding nucleotide sequence fragment(s) are novel. All of such PRO polypeptide-encoding nucleotide sequences are contemplated herein. Also contemplated are the PRO polypeptide fragments encoded by these nucleotide molecule fragments, preferably those PRO polypeptide fragments that comprise a binding site for an anti-PRO antibody.

[0051] In another embodiment, the invention provides isolated PRO polypeptide encoded by any of the isolated nucleic acid sequences herein above identified.

[0052] In a certain aspect, the invention concerns an isolated PRO polypeptide, comprising an amino acid sequence having at least about 80% amino acid sequence identity, alternatively at least about 81% amino acid sequence identity, alternatively at least about 82% amino acid sequence identity, alternatively at least about 83% amino acid sequence identity, alternatively at least about 84% amino acid sequence identity, alternatively at least about 85% amino acid sequence identity, alternatively at least about 86% amino acid sequence identity, alternatively at least about 87% amino acid sequence identity, alternatively at least about 88% amino acid sequence identity, alternatively at least about 89% amino acid sequence identity, alternatively at least about 90% amino acid sequence identity, alternatively at least about 91% amino acid sequence identity, alternatively at least about 92% amino acid sequence identity, alternatively at least about 93% amino acid sequence identity, alternatively at least about 94% amino acid sequence identity, alternatively at least about 95% amino acid sequence identity, alternatively at least about 96% amino acid sequence identity, alternatively at least about 97% amino acid sequence identity, alternatively at least about 98% amino acid sequence identity and alternatively at least about 99% amino acid sequence identity to a PRO polypeptide having a full-length amino acid sequence as disclosed herein, an amino acid sequence lacking the signal peptide as disclosed herein, an extracellular domain of a transmembrane protein, with or without the signal peptide, as disclosed herein or any other specifically defined fragment of the full-length amino acid sequence as disclosed herein.

[0053] In a further aspect, the invention concerns an isolated PRO polypeptide comprising an amino acid sequence having at least about 80% amino acid sequence identity, alternatively at least about 81% amino acid sequence identity, alternatively at least about 82% amino acid sequence identity, alternatively at least about 83% amino acid sequence identity, alternatively at least about 84% amino acid sequence identity, alternatively at least about 85% amino acid sequence identity, alternatively at least about 86% amino acid sequence identity, alternatively at least about 87% amino acid sequence identity, alternatively at least about 88% amino acid sequence identity, alternatively at least about 89% amino acid sequence identity, alternatively at least about 90% amino acid sequence identity, alternatively at least about 91% amino acid sequence identity, alternatively at least about 92% amino acid sequence identity, alternatively at least about 93% amino acid sequence identity, alternatively at least about 94% amino acid sequence identity, alternatively at least about 95% amino acid sequence identity, alternatively at least about 96% amino acid sequence identity, alternatively at least about 97% amino acid sequence identity, alternatively at least about 98% amino acid sequence identity and alternatively at least about 99% amino acid sequence identity to an amino acid sequence encoded by any of the human protein cDNAs as disclosed herein.

[0054] In a specific aspect, the invention provides an isolated PRO polypeptide without the N-terminal signal sequence and/or the initiating methionine and is encoded by a nucleotide sequence that encodes such an amino acid sequence as herein before described. Processes for producing the same are also herein described, wherein those processes comprise culturing a host cell comprising a vector which comprises the appropriate encoding nucleic acid molecule under conditions suitable for expression of the PRO polypeptide and recovering the PRO polypeptide from the cell culture.

[0055] Another aspect the invention provides an isolated PRO polypeptide which is either transmembrane domain-deleted or transmembrane domain-inactivated. Processes for producing the same are also herein described, wherein those processes comprise culturing a host cell comprising a vector which comprises the appropriate encoding nucleic acid molecule under conditions suitable for expression of the PRO polypeptide and recovering the PRO polypeptide from the cell culture.

[0056] In yet another embodiment, the invention concerns agonists and antagonists of a native PRO polypeptide as defined herein. In a particular embodiment, the agonist or antagonist is an anti-PRO antibody or a small molecule.

[0057] In a further embodiment, the invention concerns a method of identifying agonists or antagonists to a PRO polypeptide which comprise contacting the PRO polypeptide with a candidate molecule and monitoring a biological activity mediated by said PRO polypeptide. Preferably, the PRO polypeptide is a native PRO polypeptide.

[0058] In a still further embodiment, the invention concerns a composition of matter comprising a PRO polypeptide, or an agonist or antagonist of a PRO polypeptide as herein described, or an anti-PRO antibody, in combination with a carrier. Optionally, the carrier is a pharmaceutically acceptable carrier.

[0059] Another embodiment of the present invention is directed to the use of a PRO polypeptide, or an agonist or antagonist thereof as herein before described, or an anti-PRO antibody, for the preparation of a medicament useful in the treatment of a condition which is responsive to the PRO polypeptide, an agonist or antagonist thereof or an anti-PRO antibody.

### LIST OF FIGURES

[0060] List of Figures

FIG. 1: DNA325395, NP_000973.2, 200012_x_at
FIG. 2: PRO81927
FIG. 3: DNA329897, NP_031401.1, 200020_at
FIG. 4: PRO69676
FIG. 5: DNA326769, NP_001000.2, 200024_at
FIG. 6: PRO83105
FIG. 7: DNA329898, NP_000979.1, 200025_s_at
FIG. 8: PRO10643
FIG. 9: DNA293451, NP_296374.1, 200026_at
FIG. 10: PRO70720
FIG. 11: DNA326466, NP_004530.1, 200027_at
FIG. 12: PRO60800
FIG. 13: DNA329899, NP_002785.1, 200039_s_at
FIG. 14: PRO69614
FIG. 15: DNA326953, HSPC117, 200042_at
FIG. 16: PRO83270
FIG. 17: DNA255084, NP_001081.1, 200045_at
FIG. 18: PRO50170
FIG. 19: DNA272614, NP_004506.1, 200052_s_at
FIG. 20: PRO60747
FIG. 21: DNA304680, HSPCB, 200064_at
FIG. 22: PRO71106
FIG. 23: DNA189703, NP_005539.1, 200079_s_at
FIG. 24: PRO22637
FIG. 25: DNA329900, NP_002905.1, 1053_at
FIG. 26: PRO81549
FIG. 27: DNA88189, NP_037362.1, 266_s_at
FIG. 28: PRO2690
FIG. 29: DNA272992, NP_055479.1, 32069_at
FIG. 30: PRO61064
FIG. 31A-B: DNA329901, BAA32291.2, 32091_at
FIG. 32: PRO85218
FIG. 33: DNA329902, NP_110419.2, 32502_at
FIG. 34: PRO85219
FIG. 35: DNA329903, NP_005596.2, 32541_at
FIG. 36: PRO85220
FIG. 37: DNA327521, NR_002192.2, 33304_at
FIG. 38: PRO58320
FIG. 39: DNA272223, NP_004444.1, 33494_at
FIG. 40: PRO60485
FIG. 41A-B: DNA329904, NP_066554.1, 33767_at
FIG. 42: PRO85221
FIG. 43: DNA210121, NP_001794.1, 34210_at
FIG. 44: PRO33667
FIG. 45: DNA269828, NP_006691.1, 35254_at
FIG. 46: PRO58230
FIG. 47: DNA88643, NP_000190.1, 35626_at
FIG. 48: PRO2455
FIG. 49: DNA331435, NP_006143.1, 35974_at
FIG. 50: PRO86495
FIG. 51A-B: DNA272022, NP_002607.1, 36829_at
FIG. 52: PRO60296
FIG. 53: DNA226967, NP_055145.2, 37028_at
FIG. 54: PRO37430
FIG. 55: DNA226043, NP_006424.2, 37145_at
FIG. 56: PRO36506
FIG. 57: DNA329906, MGC14258, 37577_at
FIG. 58: PRO85223
FIG. 59: DNA256295, NP_002310.1, 37796_at
FIG. 60: PRO51339
FIG. 61: DNA328354, AF237769, 37966_at
FIG. 62: PRO84215
FIG. 63A-B: DNA329907, NP_036423.1, 38158_at
FIG. 64: PRO85224
FIG. 65A-B: DNA329908, BAA13246.1, 38892_at
FIG. 66: PRO85225
FIG. 67: DNA328356, BC013566, 39248_at
FIG. 68: PRO38028
FIG. 69: DNA327523, NP_004916.1, 39249_at
FIG. 70: PRO38028
FIG. 71A-B: DNA328358, STK10, 40420_at
FIG. 72: PRO84218
FIG. 73: DNA329909, NP_077084.1, 40446_at
FIG. 74: PRO62251
FIG. 75: DNA329910, NP_003251.2, 40837_at
FIG. 76: PRO82891
FIG. 77A-B: DNA329093, NP_006631.1, 41220_at
FIG. 78: PRO84745
FIG. 79A-C: DNA331436, 7689629.6, 43427_at
FIG. 80: PRO86496
FIG. 81: DNA154653, DNA154653, 43511_s_at
FIG. 82: DNA262129, NP_079389.1, 44790_s_at
FIG. 83: PRO54740
FIG. 84: DNA326185, NP_073607.2, 45633_at
FIG. 85: PRO82602
FIG. 86: DNA329912, NP_004614.1, 46167_at
FIG. 87: PRO85227
FIG. 88: DNA329913, SSB-3, 46256_at
FIG. 89: PRO85228
FIG. 90: DNA324145, NP_060259.1, 46665_at
FIG. 91: PRO80846
FIG. 92: DNA329094, NP_077285.1, 48531_at
FIG. 93: PRO84746
FIG. 94: DNA329914, NP_079175.2, 52285_f_at
FIG. 95: PRO85229
FIG. 96: DNA328364, NP_068577.1, 52940_at
FIG. 97: PRO84223
FIG. 98: DNA329915, NP_065093.1, 56197_at
FIG. 99: PRO85230
FIG. 100A-B: DNA328966, AK024397, 57082_at
FIG. 101: PRO84670
FIG. 102A-B: DNA226870, NP_000782.1, 48808_at
FIG. 103: PRO37333
FIG. 104: DNA328366, NP_079233.1, 59375_at
FIG. 105: PRO84225
FIG. 106: DNA331437, 338326.15, 60084_at
FIG. 107: PRO86497
FIG. 108: DNA328367, NP_079108.2, 60471_at
FIG. 109: PRO84226
FIG. 110: DNA327876, NP_005081.1, 60528_at
FIG. 111: PRO83815
FIG. 112: DNA329917, NP_065174.1, 64486_at
FIG. 113: PRO85232
FIG. 114: DNA329918, BC008671, 65630_at
FIG. 115: PRO85233
FIG. 116A-B: DNA196428, BAA31649.1,
76897_s_at
FIG. 117: PRO71274
FIG. 118: DNA329919, C20orf67, 89948_at
FIG. 119: PRO85234
FIG. 120: DNA328369, BC007634, 90610_at
FIG. 121: DNA269410, NP_002725.1, 200605_s_at
FIG. 122: PRO57836
FIG. 123A-B: DNA326380, NP_004850.1, 200614_at
FIG. 124: PRO82774
FIG. 125A-B: DNA194778, NP_055545.1,
200616_s_at
FIG. 126: PRO24056
FIG. 127: DNA287245, NP_004175.1, 200628_s_at
FIG. 128: PRO69520
FIG. 129: DNA287245, WARS, 200629_at
FIG. 130: PRO69520
FIG. 131: DNA327532, GLUL, 200648_s_at
FIG. 132: PRO71134
FIG. 133: DNA97285, NP_005557.1, 200650_s_at
FIG. 134: PRO3632
FIG. 135: DNA226125, NP_003136.1, 200652_at
FIG. 136: PRO36588
FIG. 137: DNA325923, NP_008819.1, 200655_s_at
FIG. 138: PRO4904
FIG. 139: DNA227055, NP_002625.1, 200658_s_at
FIG. 140: PRO37518
FIG. 141: DNA275062, NP_006136.1, 200664_s_at
FIG. 142: PRO62782
FIG. 143: DNA275062, DNAJB1, 200666_s_at
FIG. 144: PRO62782
FIG. 145A-B: DNA328372, 105551.7, 200685_at
FIG. 146: PRO84229
FIG. 147A-B: DNA329920, NP_036558.1,
200687_s_at
FIG. 148: PRO85235
FIG. 149: DNA324633, BC000478, 200691_s_at
FIG. 150: PRO81277
FIG. 151: DNA324897, NP_006845.1, 200700_s_at
FIG. 152: PRO12468
FIG. 153: DNA275267, NP_003737.1, 200703_at
FIG. 154: PRO62952
FIG. 155: DNA328373, AB034747, 200704_at
FIG. 156: PRO84230
FIG. 157: DNA328374, NP_004853.1, 200706_s_at
FIG. 158: PRO84231
FIG. 159: DNA290260, NP_036555.1, 200715_x_at
FIG. 160: PRO70385
FIG. 161: DNA329921, 1315403.9, 200719_at
FIG. 162: PRO85236
FIG. 163: DNA329538, M11S1, 200722_s_at
FIG. 164: PRO85088
FIG. 165: DNA227618, HSGPIP137, 200723_s_at
FIG. 166: PRO38081
FIG. 167: DNA327114, NP_006004.1, 200725_x_at
FIG. 168: PRO62466
FIG. 169A-B: DNA327534, NP_003454.1,
200730_s_at
FIG. 170: PRO41180
FIG. 171A-B: DNA327534, PTP4A1, 200731_s_at
FIG. 172: PRO41180
FIG. 173: DNA331438, 402431.7, 200732_s_at
FIG. 174: PRO86498
FIG. 175: DNA327845, NP_000282.1, 200737_at
FIG. 176: PRO61271
FIG. 177: DNA327845, PGK1, 200738_s_at
FIG. 178: PRO61271
FIG. 179: DNA287207, NP_006316.1, 200750_s_at
FIG. 180: PRO39268
FIG. 181A-B: DNA274977, HSU97105, 200762_at
FIG. 182: PRO62709
FIG. 183: DNA324135, BC001854, 200768_s_at
FIG. 184: PRO80837
FIG. 185: DNA324135, NP_005902.1, 200769_s_at
FIG. 186: PRO80837
FIG. 187: DNA271608, NP_055485.1, 200777_s_at
FIG. 188: PRO59895
FIG. 189: DNA226262, NP_005554.1, 200783_s_at
FIG. 190: PRO36725
FIG. 191: DNA324060, NP_002530.1, 200790_at
FIG. 192: PRO80773
FIG. 193: DNA272928, NP_055579.1, 200794_x_at
FIG. 194: PRO61012
FIG. 195: DNA304668, NP_005336.2, 200799_at
FIG. 196: PRO71095
FIG. 197: DNA227607, NP_005337.1, 200800_s_at
FIG. 198: PRO38070
FIG. 199: DNA287211, NP_002147.1, 200806_s_at
FIG. 200: PRO69492
FIG. 201: DNA287211, HSPD1, 200807_s_at
FIG. 202: PRO69492
FIG. 203: DNA269874, NP_001271.1, 200810_s_at
FIG. 204: PRO58272
FIG. 205: DNA269874, CIRBP, 200811_at
FIG. 206: PRO58272
FIG. 207: DNA227795, NP_006420.1, 200812_at
FIG. 208: PRO38258
FIG. 209: DNA325596, NP_000356.1, 200822_x_at
FIG. 210: PRO69549
FIG. 211A-B: DNA328700, AF097514, 200831_s_at
FIG. 212: PRO84464
FIG. 213A-B: DNA328378, AB032261, 200832_s_at
FIG. 214: PRO84233
FIG. 215: DNA329922, CTSB, 200838_at
FIG. 216: PRO3344
FIG. 217: DNA88165, HUMCTSB, 200839_s_at
FIG. 218: PRO2678
FIG. 219: DNA329923, NP_057211.3, 200847_s_at
FIG. 220: PRO85237
FIG. 221: DNA324509, NP_002097.1, 200853_at
FIG. 222: PRO10297
FIG. 223A-C: DNA331439, NP_001447.1,
200859_x_at
FIG. 224: PRO86499
FIG. 225A-B: DNA228029, NP_055577.1, 200862_at
FIG. 226: PRO38492
FIG. 227: DNA226112, NP_002769.1, 200866_s_at
FIG. 228: PRO36575
FIG. 229: DNA226112, PSAP, 200871_s_at
FIG. 230: PRO36575
FIG. 231: DNA254537, NP_002957.1, 200872_at
FIG. 232: PRO49642
FIG. 233: DNA271030, NP_006383.1, 200875_s_at
FIG. 234: PRO59358
FIG. 235: DNA324107, NP_006421_1, 200877_at
FIG. 236: PRO80814
FIG. 237: DNA328379, BC015869, 200878_at
FIG. 238: PRO84234
FIG. 239: DNA329099, 1164406.9, 200880_at
FIG. 240: PRO60127
FIG. 241: DNA271847, NP_001530.1, 200881_s_at
FIG. 242: PRO60127
FIG. 243: DNA287187, NP_002620.1, 200886_s_at
FIG. 244: PRO69473
FIG. 245A-B: DNA327539, NP_009330.1,
200887_s_at
FIG. 246: PRO12211
FIG. 247: DNA326326, NP_000969.1, 200888_s_at
FIG. 248: PRO82724
FIG. 249: DNA325584, NP_002005.1, 200894_s_at
FIG. 250: PRO59262
FIG. 251: DNA325584, FKBP4, 200895_s_at
FIG. 252: PRO59262
FIG. 253: DNA328380, HSHLAEHCM, 200904_at
FIG. 254: DNA304665, NP_000995.1, 200909_s_at
FIG. 255: PRO71092
FIG. 256: DNA272695, NP_001722.1, 200920_s_at
FIG. 257: PRO60817
FIG. 258: DNA272695, BTG1, 200921_s_at
FIG. 259: PRO60817
FIG. 260: DNA227077, NP_005558.1, 200923_at
FIG. 261: PRO37540
FIG. 262: DNA327255, NP_002385.2, 200924_s_at
FIG. 263: PRO57298
FIG. 264: DNA225878, NP_004334.1, 200935_at
FIG. 265: PRO36341
FIG. 266: DNA329925, NP_001528.1, 200942_s_at
FIG. 267: PRO85239
FIG. 268A-B: DNA287217, NP_001750.1,
200951_s_at
FIG. 269: PRO36766
FIG. 270A-B: DNA287217, CCND2, 200952_s_at
FIG. 271: PRO36766
FIG. 272: DNA227491, NP_009027.1, 200960_x_at
FIG. 273: PRO37954
FIG. 274: DNA331440, NP_036380.2, 200961_at
FIG. 275: PRO86500
FIG. 276A-B: DNA331289, ABLIM1, 200965_s_at
FIG. 277: PRO86390
FIG. 278: DNA287355, NP_000025.1, 200966_x_at
FIG. 279: PRO69617
FIG. 280: DNA324110, NP_005908.1, 200978_at
FIG. 281: PRO4918
FIG. 282: DNA329928, ANXA6, 200982_s_at
FIG. 283: PRO85241
FIG. 284A-B: DNA325896, NP_001521.1, 200989_at
FIG. 285: PRO82352
FIG. 286: DNA329929, 400903.6, 200994_at
FIG. 287: PRO85242
FIG. 288: DNA325778, CKAP4, 200998_s_at
FIG. 289: PRO82248
FIG. 290: DNA331441, BC015436, 200999_s_at
FIG. 291: DNA275408, NP_001596.1, 201000_at
FIG. 292: PRO63068
FIG. 293: DNA304713, NP_006463.2, 201008_s_at
FIG. 294: PRO71139
FIG. 295: DNA304713, TXNIP, 201009_s_at
FIG. 296: PRO71139
FIG. 297: DNA304713, S73591, 201010_s_at
FIG. 298: PRO71139
FIG. 299: DNA89242, NP_000691.1, 201012_at
FIG. 300: PRO2907
FIG. 301: DNA328388, BC010273, 201013_s_at
FIG. 302: PRO84240
FIG. 303: DNA328388, NP_006443.1, 201014_s_at
FIG. 304: PRO84240
FIG. 305: DNA151697, DNA151697, 201016_at
FIG. 306: PRO11993
FIG. 307A-B: DNA329101, NP_056988.2,
201024_x_at
FIG. 308: PRO84751
FIG. 309A-B: DNA329101, IF2, 201027_s_at
FIG. 310: PRO84751
FIG. 311: DNA287372, NP_002618.1, 201037_at
FIG. 312: PRO69632
FIG. 313: DNA328391, NP_004408.1, 201041_s_at
FIG. 314: PRO84242
FIG. 315: DNA328391, DUSP1, 201044_x_at
FIG. 316: PRO84242
FIG. 317: DNA274743, NP_002850.1, 201087_at
FIG. 318: PRO62517
FIG. 319: DNA254725, NP_002257.1, 201088_at
FIG. 320: PRO49824
FIG. 321: DNA329930, ATP6V1B2, 201089_at
FIG. 322: PRO85243
FIG. 323: DNA287198, NP_006073.1, 201090_x_at
FIG. 324: PRO69484
FIG. 325A-B: DNA328395, NP_056198.1,
201104_x_at
FIG. 326: PRO84245
FIG. 327: DNA304719, NP_002296.1, 201105_at
FIG. 328: PRO71145
FIG. 329: DNA329931, AF053642, 201111_at
FIG. 330: DNA331442, NP_002783.1, 201114_x_at
FIG. 331: PRO83189
FIG. 332: DNA273865, NP_006221.1, 201115_at
FIG. 333: PRO61824
FIG. 334: DNA326273, NP_001961.1, 201123_s_at
FIG. 335: PRO82678
FIG. 336: DNA329255, NP_006267.1, 201129_at
FIG. 337: PRO84855
FIG. 338: DNA329103, NP_002112.2, 201137_s_at
FIG. 339: PRO84752
FIG. 340: DNA329104, NP_004085.1, 201144_s_at
FIG. 341: PRO69550
FIG. 342: DNA329105, NP_006109.2, 201145_at
FIG. 343: PRO84753
FIG. 344: DNA329015, NFE2L2, 201146_at
FIG. 345: PRO84691
FIG. 346: DNA329932, BC008801, 201160_s_at
FIG. 347: PRO85244
FIG. 348: DNA151802, NP_003661.1, 201169_s_at
FIG. 349: PRO12890
FIG. 350: DNA151802, BHLHB2, 201170_s_at
FIG. 351: PRO12890
FIG. 352: DNA273342, NP_005887.1, 201193_at
FIG. 353: PRO61345
FIG. 354: DNA331443, NP_003000.1, 201194_at
FIG. 355: PRO86501
FIG. 356A-B: DNA103453, HUME16GEN,
201195_s_at
FIG. 357: PRO4780
FIG. 358: DNA272251, NP_002798.1, 201198_s_at
FIG. 359: PRO60513
FIG. 360: DNA103488, NP_002583.1, 201202_at
FIG. 361: PRO4815
FIG. 362: DNA327544, NP_002865.1, 201222_s_at
FIG. 363: PRO70357
FIG. 364: DNA287173, ENO1, 201231_s_at
FIG. 365: PRO69463
FIG. 366: DNA287331, NP_002645.1, 201251_at
FIG. 367: PRO69595
FIG. 368: DNA274139, NP_006494.1, 201252_at
FIG. 369: PRO62075
FIG. 370: DNA270950, NP_003182.1, 201263_at
FIG. 371: PRO59281
FIG. 372A-B: DNA328404, NP_003321.1, 201266_at
FIG. 373: PRO84251
FIG. 374: DNA331444, NP_002781.1, 201274_at
FIG. 375: PRO60981
FIG. 376: DNA323936, NP_001995.1, 201275_at
FIG. 377: PRO80669
FIG. 378: DNA328405, NP_112556.1, 201277_s_at
FIG. 379: PRO84252
FIG. 380: DNA270526, NP_001166.1, 201288_at
FIG. 381: PRO58903
FIG. 382A-B: DNA327545, TOP2A, 201291_s_at
FIG. 383: PRO82731
FIG. 384: DNA327546, HSTOP2A10, 201292_at
FIG. 385: DNA328407, WSB1, 201294_s_at
FIG. 386: PRO84254
FIG. 387A-B: DNA226778, HSM800772,
201295_s_at
FIG. 388: PRO37241
FIG. 389: DNA327547, NP_060691.1, 201298_s_at
FIG. 390: PRO83583
FIG. 391: DNA287222, NP_055555.1, 201303_at
FIG. 392: PRO69501
FIG. 393: DNA324612, P311, 201310_s_at
FIG. 394: PRO81261
FIG. 395: DNA325595, NP_001966.1, 201313_at
FIG. 396: PRO38010
FIG. 397: DNA331445, NP_002778.1, 201317_s_at
FIG. 398: PRO71133
FIG. 399: DNA274745, NP_006815.1, 201323_at
FIG. 400: PRO62518
FIG. 401: DNA150781, NP_001414.1, 201324_at
FIG. 402: PRO12467
FIG. 403: DNA329002, AF385084, 201326_at
FIG. 404: PRO4912
FIG. 405: DNA329002, NP_001753.1, 201327_s_at
FIG. 406: PRO4912
FIG. 407: DNA269536, S80343, 201330_at
FIG. 408: PRO57952
FIG. 409: DNA273323, NP_004243.1, 201349_at
FIG. 410: PRO61330
FIG. 411: DNA103227, NP_004466.1, 201350_at
FIG. 412: PRO4557
FIG. 413: DNA329934, NP_000090.1, 201360_at
FIG. 414: PRO2721
FIG. 415: DNA329107, NP_008818.3, 201367_s_at
FIG. 416: PRO84754
FIG. 417A-B: DNA329108, 1383643.16, 201368_at
FIG. 418: PRO84755
FIG. 419: DNA329107, ZFP36L2, 201369_s_at
FIG. 420: PRO84754
FIG. 421A-E: DNA331446, NP_000436.1, 201373_at
FIG. 422: PRO86502
FIG. 423: DNA329109, NP_004957.1, 201376_s_at
FIG. 424: PRO81854
FIG. 425: DNA329111, NP_001349.1, 201385_at
FIG. 426: PRO84756
FIG. 427: DNA270979, NP_002800.1, 201388_at
FIG. 428: PRO59309
FIG. 429: DNA331447, NP_006614.1, 201397_at
FIG. 430: PRO85247
FIG. 431: DNA329937, NP_002786.2, 201400_at
FIG. 432: PRO61014
FIG. 433: DNA328412, NP_060428.1, 201411_s_at
FIG. 434: PRO84257
FIG. 435: DNA329938, 1394805.1, 201416_at
FIG. 436: PRO70544
FIG. 437: DNA329939, 1393503.1, 201417_at
FIG. 438: PRO85248
FIG. 439: DNA83109, NP_006323.1, 201422_at
FIG. 440: PRO2592
FIG. 441: DNA226600, NP_003371.1, 201426_s_at
FIG. 442: PRO37063
FIG. 443: DNA272286, NP_001743.1, 201432_at
FIG. 444: PRO60544
FIG. 445: DNA327550, NP_001959.1, 201437_s_at
FIG. 446: PRO81164
FIG. 447A-C: DNA88140, COL6A3, 201438_at
FIG. 448: PRO2670
FIG. 449: DNA150535, NP_004809.1, 201440_at
FIG. 450: PRO12078
FIG. 451: DNA325049, NP_005605.1, 201453_x_at
FIG. 452: PRO37938
FIG. 453: DNA326736, NP_006657.1, 201459_at
FIG. 454: PRO83076
FIG. 455: DNA226359, NP_002219.1, 201464_x_at
FIG. 456: PRO36822
FIG. 457: DNA226359, JUN, 201465_s_at
FIG. 458: PRO36822
FIG. 459: DNA226359, DNA226359, 201466_s_at
FIG. 460: PRO36822
FIG. 461: DNA328413, NP_004823.1, 201470_at
FIG. 462: PRO84258
FIG. 463: DNA103320, NP_002220.1, 201473_at
FIG. 464: PRO4650
FIG. 465: DNA325704, NP_004981.2, 201475_x_at
FIG. 466: PRO82188
FIG. 467: DNA327551, NP_001024.1, 201476_s_at
FIG. 468: PRO59289
FIG. 469: DNA327551, RRM1, 201477_s_at
FIG. 470: PRO59289
FIG. 471: DNA254783, NP_001354.1, 201478_s_at
FIG. 472: PRO49881
FIG. 473: DNA329940, NP_001805.1, 201487_at
FIG. 474: PRO2679
FIG. 475: DNA304459, BC005020, 201489_at
FIG. 476: PRO37073
FIG. 477: DNA304459, NP_005720.1, 201490_s_at
FIG. 478: PRO37073
FIG. 479: DNA325920, NP_036243.1, 201491_at
FIG. 480: PRO82373
FIG. 481: DNA328415, BC006997, 201503_at
FIG. 482: PRO60207
FIG. 483: DNA329941, NP_001543.1, 201508_at
FIG. 484: PRO85249
FIG. 485: DNA323741, NP_003123.1, 201516_at
FIG. 486: PRO80498
FIG. 487: DNA329942, NCBP2, 201521_s_at
FIG. 488: PRO85250
FIG. 489: DNA328418, NP_003398.1, 201531_at
FIG. 490: PRO84261
FIG. 491: DNA331292, NP_002779.1, 201532_at
FIG. 492: PRO84262
FIG. 493: DNA329943, NP_009037.1, 201534_s_at
FIG. 494: PRO85251
FIG. 495: DNA331448, UBL3, 201535_at
FIG. 496: PRO86503
FIG. 497: DNA272171, NP_002379.2, 201555_at
FIG. 498: PRO60438
FIG. 499: DNA226291, NP_055047.1, 201556_s_at
FIG. 500: PRO36754
FIG. 501: DNA226291, VAMP2, 201557_at
FIG. 502: PRO36754
FIG. 503A-B: DNA270995, NP_004721.1, 201574_at
FIG. 504: PRO59324
FIG. 505: DNA227071, NP_000260.1, 201577_at
FIG. 506: PRO37534
FIG. 507: DNA327199, NP_066979.1, 201580_s_at
FIG. 508: PRO83475
FIG. 509A-B: DNA329944, AB032988, 201581_at
FIG. 510: DNA329945, NP_006354.2, 201583_s_at
FIG. 511: PRO85252
FIG. 512A-B: DNA329946, D80000, 201589_at
FIG. 513: DNA290280, NP_004359.1, 201605_x_at
FIG. 514: PRO70425
FIG. 515: DNA329947, NP_536806.1, 201613_s_at
FIG. 516: PRO37674
FIG. 517: DNA272904, NP_006784.1, 201619_at
FIG. 518: PRO60991
FIG. 519: DNA255406, NP_005533.1, 201625_s_at
FIG. 520: PRO50473
FIG. 521: DNA255406, INSIG1, 201627_s_at
FIG. 522: PRO50473
FIG. 523: DNA329115, NP_434702.1, 201631_s_at
FIG. 524: PRO84760
FIG. 525: DNA287240, NP_004326.1, 201641_at
FIG. 526: PRO29371
FIG. 527: DNA327557, NP_004214.1, 201649_at
FIG. 528: PRO83588
FIG. 529A-B: DNA220748, NP_000201.1, 201656_at
FIG. 530: PRO34726
FIG. 531A-B: DNA328422, NP_004448.1,
201662_s_at
FIG. 532: PRO84263
FIG. 533A-B: DNA273732, NP_005487.2,
201663_s_at
FIG. 534: PRO61695
FIG. 535A-B: DNA273732, HSM801845, 201664_at
FIG. 536: PRO61695
FIG. 537: DNA273090, NP_002347.4, 201669_s_at
FIG. 538: PRO61148
FIG. 539: DNA273090, MARCKS, 201670_s_at
FIG. 540: PRO61148
FIG. 541: DNA290244, NP_000261.1, 201695_s_at
FIG. 542: PRO70353
FIG. 543: DNA329948, NP_002797.1, 201699_at
FIG. 544: PRO85253
FIG. 545: DNA324742, NP_001751.1, 201700_at
FIG. 546: PRO81367
FIG. 547: DNA270883, NP_001061.1, 201714_at
FIG. 548: PRO59218
FIG. 549A-B: DNA151806, NP_001422.1,
201719_s_at
FIG. 550: PRO12768
FIG. 551: DNA227461, NP_006753.1, 201720_s_at
FIG. 552: PRO37924
FIG. 553: DNA227461, LAPTM5, 201721_s_at
FIG. 554: PRO37924
FIG. 555: DNA329949, BC003376, 201726_at
FIG. 556: PRO85254
FIG. 557: DNA227576, NP_005618.1, 201739_at
FIG. 558: PRO38039
FIG. 559: DNA326373, NP_008855.1, 201742_x_at
FIG. 560: PRO82769
FIG. 561: DNA327559, NP_058432.1, 201752_s_at
FIG. 562: PRO83589
FIG. 563: DNA331294, ADD3, 201753_s_at
FIG. 564: PRO86393
FIG. 565: DNA227035, NP_006730.1, 201755_at
FIG. 566: PRO37498
FIG. 567: DNA329016, NP_006283.1, 201758_at
FIG. 568: PRO4887
FIG. 569: DNA328427, NP_061109.1, 201760_s_at
FIG. 570: PRO84265
FIG. 571: DNA287167, NP_006627.1, 201761_at
FIG. 572: PRO59136
FIG. 573: DNA287625, NP_002809.1, 201762_s_at
FIG. 574: PRO69491
FIG. 575: DNA329950, NP_076961.1, 201764_at
FIG. 576: PRO11558
FIG. 577A-B: DNA329951, NP_055680.1,
201774_s_at
FIG. 578: PRO85255
FIG. 579: DNA151017, NP_004835.1, 201810_s_at
FIG. 580: PRO12841
FIG. 581: DNA151017, SH3BP5, 201811_x_at
FIG. 582: PRO12841
FIG. 583: DNA227929, NP_061932.1, 201812_s_at
FIG. 584: PRO38392
FIG. 585: DNA324015, NP_006326.1, 201821_s_at
FIG. 586: PRO80735
FIG. 587: DNA329952, BC010285, 201829_at
FIG. 588: PRO85256
FIG. 589: DNA329952, NET1, 201830_s_at
FIG. 590: PRO85256
FIG. 591: DNA329954, NP_001518.1, 201833_at
FIG. 592: PRO85258
FIG. 593A-B: DNA329955, AB029551, 201845_s_at
FIG. 594: PRO85259
FIG. 595: DNA254350, NP_004043.2, 201848_s_at
FIG. 596: PRO49461
FIG. 597: DNA254350, BNIP3, 201849_at
FIG. 598: PRO49461
FIG. 599: DNA329118, NP_068660.1, 201853_s_at
FIG. 600: PRO83123
FIG. 601: DNA272066, NP_002931.1, 201872_s_at
FIG. 602: PRO60337
FIG. 603: DNA150805, NP_055703.1, 201889_at
FIG. 604: PRO11583
FIG. 605: DNA253582, DNA253582, 201890_at
FIG. 606: PRO49181
FIG. 607: DNA329956, NP_000875.1, 201892_s_at
FIG. 608: PRO85260
FIG. 609: DNA328431, NP_001817.1, 201897_s_at
FIG. 610: PRO45093
FIG. 611: DNA254978, NP_060625.1, 201917_s_at
FIG. 612: PRO50067
FIG. 613: DNA329057, NP_004116.2, 201921_at
FIG. 614: PRO84719
FIG. 615: DNA227112, NP_006397.1, 201923_at
FIG. 616: PRO37575
FIG. 617: DNA275240, NP_005906.2, 201930_at
FIG. 618: PRO62927
FIG. 619: DNA273014, NP_00117.1, 201931_at
FIG. 620: PRO61085
FIG. 621A-B: DNA329120, NP_002560.1, 201945_at
FIG. 622: PRO2752
FIG. 623: DNA274167, NP_006422.1, 201946_s_at
FIG. 624: PRO62097
FIG. 625: DNA274167, CCT2, 201947_s_at
FIG. 626: PRO62097
FIG. 627: DNA103481, NP_037417.1, 201948_at
FIG. 628: PRO4808
FIG. 629A-B: DNA327563, NP_066945.1, 201963_at
FIG. 630: PRO83592
FIG. 631: DNA275214, NP_002473.1, 201970_s_at
FIG. 632: PRO62908
FIG. 633A-B: DNA328433, ATP6V1A1,
201971_s_at
FIG. 634: PRO84268
FIG. 635A-B: DNA272191, NP_002947.1, 201975_at
FIG. 636: PRO60456
FIG. 637: DNA328809, PTPN12, 202006_at
FIG. 638: PRO4803
FIG. 639: DNA328437, AF083441, 202021_x_at
FIG. 640: PRO84271
FIG. 641: DNA329957, NP_005156.1, 202022_at
FIG. 642: PRO85261
FIG. 643A-B: DNA329958, NP_510880.1, 202039_at
FIG. 644: PRO85262
FIG. 645: DNA327017, NP_004586.2, 202043_s_at
FIG. 646: PRO61744
FIG. 647A-B: DNA227985, NP_055107.1,
202047_s_at
FIG. 648: PRO38448
FIG. 649A-B: DNA225991, NP_000518.1,
202067_s_at
FIG. 650: PRO36454
FIG. 651A-B: DNA225991, LDLR, 202068_s_at
FIG. 652: PRO36454
FIG. 653: DNA327567, NP_005521.1, 202069_s_at
FIG. 654: PRO83596
FIG. 655: DNA226116, NP_002990.1, 202071_at
FIG. 656: PRO36579
FIG. 657: DNA289522, NP_004994.1, 202077_at
FIG. 658: PRO70276
FIG. 659: DNA327568, NP_002453.1, 202086_at
FIG. 660: PRO57922
FIG. 661: DNA327569, CTSL, 202087_s_at
FIG. 662: PRO2683
FIG. 663: DNA329959, 251651.5, 202094_at
FIG. 664: PRO85263
FIG. 665: DNA129504, NP_001159.1, 202095_s_at
FIG. 666: PRO7143
FIG. 667: DNA328440, NP_004517.1, 202107_s_at
FIG. 668: PRO84274
FIG. 669: DNA329960, 1381890.1, 202136_at
FIG. 670: PRO85264
FIG. 671: DNA324895, NP_006294.2, 202138_x_at
FIG. 672: PRO81501
FIG. 673: DNA227150, NP_002337.1, 202145_at
FIG. 674: PRO37613
FIG. 675: DNA329020, NP_057637.1, 202153_s_at
FIG. 676: PRO84695
FIG. 677: DNA328442, NP_006078.2, 202154_x_at
FIG. 678: PRO84275
FIG. 679A-C: DNA331449, NP_004371.1, 202160_at
FIG. 680: PRO86504
FIG. 681: DNA327573, BC007655, 202165_at
FIG. 682: PRO59301
FIG. 683: DNA329962, AASDHPPT, 202170_s_at
FIG. 684: PRO85266
FIG. 685A-B: DNA329963, NP_060700.1,
202184_s_at
FIG. 686: PRO85267
FIG. 687: DNA254570, NP_055484.1, 202188_at
FIG. 688: PRO49673
FIG. 689A-B: DNA304479, BC016556, 202194_at
FIG. 690: PRO733
FIG. 691A-B: DNA329599, NP_003128.2,
202200_s_at
FIG. 692: PRO85131
FIG. 693A-B: DNA329964, 215949.9, 202206_at
FIG. 694: PRO85268
FIG. 695: DNA329965, BC001051, 202208_s_at
FIG. 696: PRO85269
FIG. 697: DNA325477, NP_004256.1, 202218_s_at
FIG. 698: PRO12878
FIG. 699: DNA328258, SLC16A1, 202236_s_at
FIG. 700: PRO84151
FIG. 701: DNA326133, NP_005021.2, 202240_at
FIG. 702: PRO82557
FIG. 703: DNA328444, MGC14458, 202246_s_at
FIG. 704: PRO84277
FIG. 705A-B: DNA227176, NP_056371.1,
202255_s_at
FIG. 706: PRO37639
FIG. 707: DNA326120, NP_006101.1, 202257_s_at
FIG. 708: PRO82546
FIG. 709: DNA150808, NP_002044.1, 202269_x_at
FIG. 710: PRO12478
FIG. 711: DNA150808, GBP1, 202270_at
FIG. 712: PRO12478
FIG. 713: DNA329966, NP_006295.1, 202276_at
FIG. 714: PRO22705
FIG. 715: DNA304716, NP_510867.1, 202284_s_at
FIG. 716: PRO71142
FIG. 717: DNA331450, NP_004381.1, 202295_s_at
FIG. 718: PRO2682
FIG. 719A-B: DNA329967, NP_003592.2,
202303_x_at
FIG. 720: PRO85270
FIG. 721: DNA329524, NP_000584.2, 202307_s_at
FIG. 722: PRO36996
FIG. 723A-B: DNA151108, NP_004167.3, 202308_at
FIG. 724: PRO12105
FIG. 725: DNA270142, NP_005947.2, 202309_at
FIG. 726: PRO58531
FIG. 727: DNA269842, NP_002708.1, 202313_at
FIG. 728: PRO58243
FIG. 729: DNA328448, NP_000777.1, 202314_at
FIG. 730: PRO62362
FIG. 731: DNA331451, UNG, 202330_s_at
FIG. 732: PRO86505
FIG. 733A-B: DNA329970, NP_000910.2,
202336_s_at
FIG. 734: PRO85272
FIG. 735: DNA255088, NP_003249.1, 202338_at
FIG. 736: PRO50174
FIG. 737: DNA325115, NP_001435.1, 202345_s_at
FIG. 738: PRO81689
FIG. 739: DNA270502, NP_002807.1, 202352_s_at
FIG. 740: PRO58880
FIG. 741A-B: DNA227353, NP_055637.1, 202375_at
FIG. 742: PRO37816
FIG. 743: DNA328449, NP_005462.1, 202382_s_at
FIG. 744: PRO60304
FIG. 745: DNA290234, NP_002914.1, 202388_at
FIG. 746: PRO70333
FIG. 747: DNA325417, NP_001742.1, 202402_s_at
FIG. 748: PRO69635
FIG. 749: DNA150989, NP_005523.1, 202411_at
FIG. 750: PRO12569
FIG. 751: DNA326563, NP_036421.2, 202417_at
FIG. 752: PRO82927
FIG. 753: DNA150514, NP_065203.1, 202418_at
FIG. 754: PRO12304
FIG. 755: DNA88332, NP_002026.1, 202419_at
FIG. 756: PRO2753
FIG. 757A-B: DNA329971, NP_075266.1,
202422_s_at
FIG. 758: PRO85273
FIG. 759: DNA227121, NP_066928.1, 202430_s_at
FIG. 760: PRO37584
FIG. 761: DNA66487, NP_002458.1, 202431_s_at
FIG. 762: PRO1213
FIG. 763: DNA103322, NP_005818.1, 202433_at
FIG. 764: PRO4652
FIG. 765: DNA68868, DNA68868, 202441_at
FIG. 766: PRO1460
FIG. 767: DNA227121, PLSCR1, 202446_s_at
FIG. 768: PRO37584
FIG. 769: DNA329972, BC004452, 202451_at
FIG. 770: PRO85274
FIG. 771A-B: DNA329973, NP_055461.1,
202459_s_at
FIG. 772: PRO82824
FIG. 773A-B: DNA269642, NP_004557.1,
202464_s_at
FIG. 774: PRO58054
FIG. 775: DNA227921, NP_003789.1, 202468_s_at
FIG. 776: PRO38384
FIG. 777A-B: DNA329122, NP_067675.1, 202478_at
FIG. 778: PRO84764
FIG. 779: DNA329123, NP_002873.1, 202483_s_at
FIG. 780: PRO84765
FIG. 781A-B: DNA103449, NP_008862.1,
202498_s_at
FIG. 782: PRO4776
FIG. 783: DNA329974, NP_055083.1, 202501_at
FIG. 784: PRO85275
FIG. 785: DNA234442, NP_055551.1, 202503_s_at
FIG. 786: PRO38852
FIG. 787A-B: DNA273879, NP_055753.1, 202519_at
FIG. 788: PRO61835
FIG. 789A-B: DNA277809, NP_055582.1,
202524_s_at
FIG. 790: PRO64556
FIG. 791: DNA328452, NP_000394.1, 202528_at
FIG. 792: PRO63289
FIG. 793A-B: DNA226870, DHFR, 202532_s_at
FIG. 794: PRO37333
FIG. 795: DNA331452, BC003584, 202533_s_at
FIG. 796: PRO86506
FIG. 797: DNA331453, NP_060993.1, 202534_x_at
FIG. 798: PRO69586
FIG. 799: DNA329976, NP_003815.1, 202535_at
FIG. 800: PRO4801
FIG. 801: DNA329977, BC001553, 202536_at
FIG. 802: PRO85276
FIG. 803A-B: DNA255105, NP_000850.1,
202539_s_at
FIG. 804: PRO50187
FIG. 805A-B: DNA255105, HMGCR, 202540_s_at
FIG. 806: PRO50187
FIG. 807A-B: DNA274852, NP_004115.1,
202543_s_at
FIG. 808: PRO62605
FIG. 809: DNA275244, DNA275244, 202557_at
FIG. 810A-C: DNA331454, NP_068506.1,
202565_s_at
FIG. 811: PRO86507
FIG. 812A-C: DNA329978, SVIL, 202566_s_at
FIG. 813: PRO85277
FIG. 814: DNA326939, NP_004166.1, 202567_at
FIG. 815: PRO83257
FIG. 816: DNA325587, NP_068772.1, 202580_x_at
FIG. 817: PRO82083
FIG. 818: DNA227607, HSPA1B, 202581_at
FIG. 819: PRO38070
FIG. 820: DNA328456, NP_000467.1, 202587_s_at
FIG. 821: PRO84283
FIG. 822: DNA329979, NP_001062.1, 202589_at
FIG. 823: PRO82821
FIG. 824: DNA329125, NP_056159.1, 202595_s_at
FIG. 825: PRO84767
FIG. 826A-C: DNA270287, NP_003480.1,
202599_s_at
FIG. 827: PRO58675
FIG. 828A-C: DNA270287, NRIP1, 202600_s_at
FIG. 829: PRO58675
FIG. 830A-C: DNA329268, NP_004220.1,
202610_s_at
FIG. 831: PRO84864
FIG. 832: DNA274881, NP_001896.1, 202613_at
FIG. 833: PRO62626
FIG. 834A-B: DNA329980, 1134366.16, 202615_at
FIG. 835: PRO85278
FIG. 836: DNA329126, NP_005025.1, 202635_s_at
FIG. 837: PRO84768
FIG. 838: DNA59763, NP_000192.1, 202637_s_at
FIG. 839: PRO160
FIG. 840: DNA59763, ICAM1, 202638_s_at
FIG. 841: PRO160
FIG. 842: DNA289528, NP_004302.1, 202641_at
FIG. 843: PRO70286
FIG. 844A-B: DNA151841, NP_006281.1,
202643_s_at
FIG. 845: PRO12904
FIG. 846A-B: DNA151841, TNFAIP3, 202644_s_at
FIG. 847: PRO12904
FIG. 848: DNA329981, NP_001155.1, 202652_at
FIG. 849: PRO49894
FIG. 850: DNA254129, NP_006001.1, 202655_at
FIG. 851: PRO49244
FIG. 852: DNA331455, NP_002792.1, 202659_at
FIG. 853: PRO58763
FIG. 854: DNA287424, NP_004292.1, 202666_s_at
FIG. 855: PRO69681
FIG. 856: DNA326896, NP_003672.1, 202671_s_at
FIG. 857: PRO69486
FIG. 858: DNA289526, ATF3, 202672_s_at
FIG. 859: PRO70282
FIG. 860: DNA84130, NP_003801.1, 202687_s_at
FIG. 861: PRO1096
FIG. 862: DNA84130, TNFSF10, 202688_at
FIG. 863: PRO1096
FIG. 864: DNA329982, NP_008937.1, 202697_at
FIG. 865: PRO85279
FIG. 866A-B: DNA150467, NP_055513.1,
202699_s_at
FIG. 867: PRO12272
FIG. 868A-B: DNA150467, KIAA0792, 202700_s_at
FIG. 869: PRO12272
FIG. 870: DNA326000, NP_004692.1, 202705_at
FIG. 871: PRO82442
FIG. 872: DNA273371, NP_000364.1, 202706_s_at
FIG. 873: PRO61373
FIG. 874: DNA329983, BC012595, 202710_at
FIG. 875: PRO85280
FIG. 876: DNA43010, NP_000588.1, 202718_at
FIG. 877: PRO36145
FIG. 878A-B: DNA270254, NP_002006.2,
202723_s_at
FIG. 879: PRO58642
FIG. 880: DNA150713, NP_006570.1, 202735_at
FIG. 881: PRO12082
FIG. 882: DNA58828, DNA58828, 202746_at
FIG. 883: PRO1189
FIG. 884: DNA327192, NP_004858.1, 202747_s_at
FIG. 885: PRO1189
FIG. 886: DNA227133, NP_004111.1, 202748_at
FIG. 887: PRO37596
FIG. 888: DNA329984, NP_004618.2, 202749_at
FIG. 889: PRO11656
FIG. 890A-C: DNA329129, NP_009134.1,
202760_s_at
FIG. 891: PRO84288
FIG. 892: DNA329008, NP_004337.2, 202763_at
FIG. 893: PRO12832
FIG. 894A-B: DNA328464, 977954.20, 202769_at
FIG. 895: PRO84290
FIG. 896: DNA226578, NP_004345.1, 202770_s_at
FIG. 897: PRO37041
FIG. 898: DNA273346, NP_055316.1, 202779_s_at
FIG. 899: PRO61349
FIG. 900: DNA329985, NP_002185.1, 202794_at
FIG. 901: PRO60589
FIG. 902: DNA88428, NP_000202.1, 202803_s_at
FIG. 903: PRO2787
FIG. 904: DNA329986, NP_006454.1, 202811_at
FIG. 905: PRO61895
FIG. 906A-B: DNA226364, NP_001612.1, 202820_at
FIG. 907: PRO36827
FIG. 908: DNA328465, NP_005639.1, 202823_at
FIG. 909: PRO84291
FIG. 910: DNA329987, NP_000286.2, 202833_s_at
FIG. 911: PRO85281
FIG. 912: DNA269828, FLN29, 202837_at
FIG. 913: PRO58230
FIG. 914: DNA329988, NP_036460.1, 202842_s_at
FIG. 915: PRO1471
FIG. 916: DNA329988, DNAJB9, 202843_at
FIG. 917: PRO1471
FIG. 918: DNA103394, NP_004198.1, 202855_s_at
FIG. 919: PRO4722
FIG. 920: DNA103394, SLC16A3, 202856_s_at
FIG. 921: PRO4722
FIG. 922A-B: DNA272022, PER1, 202861_at
FIG. 923: PRO60296
FIG. 924: DNA275144, NP_000128.1, 202862_at
FIG. 925: PRO62852
FIG. 926: DNA328467, SP100, 202864_s_at
FIG. 927: PRO84293
FIG. 928: DNA287289, NP_058132.1, 202869_at
FIG. 929: PRO69559
FIG. 930: DNA273060, NP_001246.1, 202870_s_at
FIG. 931: PRO61125
FIG. 932: DNA329130, NP_004286.2, 202871_at
FIG. 933: PRO20124
FIG. 934: DNA328469, NP_001686.1, 202874_s_at
FIG. 935: PRO84295
FIG. 936: DNA271881, PSCD1, 202880_s_at
FIG. 937: PRO60160
FIG. 938: DNA329989, HSPPP2R15, 202886_s_at
FIG. 939A-B: DNA225538, NP_002476.1,
202906_s_at
FIG. 940: PRO36001
FIG. 941A-B: DNA225538, NBS1, 202907_s_at
FIG. 942: PRO36001
FIG. 943: DNA328483, NP_061163.1, 202911_at
FIG. 944: PRO84309
FIG. 945: DNA327584, NP_002955.2, 202917_s_at
FIG. 946: PRO80649
FIG. 947A-B: DNA329132, NP_002648.1,
202925_s_at
FIG. 948: PRO83145
FIG. 949: DNA272979, NP_003841.1, 202930_s_at
FIG. 950: PRO61058
FIG. 951: DNA331456, BIN1, 202931_x_at
FIG. 952: PRO86508
FIG. 953: DNA327585, NP_056518.1, 202937_x_at
FIG. 954: PRO83605
FIG. 955: DNA328471, ZMPSTE24, 202939_at
FIG. 956: PRO84297
FIG. 957: DNA304681, NP_066552.1, 202941_at
FIG. 958: PRO71107
FIG. 959: DNA269481, NP_001976.1, 202942_at
FIG. 960: PRO57901
FIG. 961: DNA273320, NP_008950.1, 202954_at
FIG. 962: PRO61327
FIG. 963: DNA273334, NP_000246.1, 202960_s_at
FIG. 964: PRO61341
FIG. 965A-B: DNA328473, NP_006473.1,
202968_s_at
FIG. 966: PRO84299
FIG. 967A-B: DNA227293, NP_055698.1,
202972_s_at
FIG. 968: PRO37756
FIG. 969A-B: DNA227293, KIAA0914, 202973_x_at
FIG. 970: PRO37756
FIG. 971: DNA329135, NP_002913.2, 202988_s_at
FIG. 972: PRO58102
FIG. 973: DNA274034, NP_006388.1, 203022_at
FIG. 974: PRO61977
FIG. 975: DNA329136, NP_057475.1, 203023_at
FIG. 976: PRO84772
FIG. 977A-B: DNA271865, NP_055566.1,
203037_s_at
FIG. 978: PRO60145
FIG. 979A-B: DNA304464, NP_055733.1, 203044_at
FIG. 980: PRO71042
FIG. 981A-B: DNA329991, NP_003911.1,
203046_s_at
FIG. 982: PRO85284
FIG. 983: DNA331457, AF119894, 203047_at
FIG. 984: PRO86509
FIG. 985: DNA150976, NP_071503.1, 203054_s_at
FIG. 986: PRO12565
FIG. 987: DNA326693, NP_004697.2, 203055_s_at
FIG. 988: PRO83039
FIG. 989: DNA188357, NP_000651.1, 203085_s_at
FIG. 990: PRO21897
FIG. 991: DNA324133, NP_037379.1, 203089_s_at
FIG. 992: PRO80835
FIG. 993: DNA269984, NP_055443.1, 203094_at
FIG. 994: PRO58380
FIG. 995: DNA329992, NP_002399.1, 203102_s_at
FIG. 996: PRO59267
FIG. 997: DNA329993, NP_115754.1, 203113_s_at
FIG. 998: PRO85285
FIG. 999: DNA329994, PCSK7, 203118_at
FIG. 1000: PRO85286
FIG. 1001A-B: DNA150447, NP_004854.1,
203128_at
FIG. 1002: PRO12256
FIG. 1003: DNA254543, NP_006799.1, 203133_at
FIG. 1004: PRO49648
FIG. 1005: DNA269918, NP_003633.1, 203138_at
FIG. 1006: PRO58316
FIG. 1007: DNA329001, BCL6, 203140_at
FIG. 1008: PRO26296
FIG. 1009A-B: DNA329995, NP_006452.1,
203145_at
FIG. 1010: PRO85287
FIG. 1011A-B: DNA226330, NP_001461.1,
203146_s_at
FIG. 1012: PRO36793
FIG. 1013: DNA271624, NP_001539.1, 203153_at
FIG. 1014: PRO59911
FIG. 1015: DNA269660, NP_003192.1, 203177_x_at
FIG. 1016: PRO58071
FIG. 1017: DNA304720, NP_062427.1, 203186_s_at
FIG. 1018: PRO71146
FIG. 1019A-B: DNA271744, NP_055476.1,
203206_at
FIG. 1020: PRO60028
FIG. 1021: DNA329997, BC001866, 203209_at
FIG. 1022: PRO61115
FIG. 1023: DNA329997, NP_031396.1, 203210_s_at
FIG. 1024: PRO61115
FIG. 1025A-B: DNA328481, MTMR2, 203211_s_at
FIG. 1026: PRO84307
FIG. 1027: DNA331458, 995529.4, 203213_at
FIG. 1028: PRO86510
FIG. 1029: DNA331459, CDC2, 203214_x_at
FIG. 1030: PRO70806
FIG. 1031: DNA76514, NP_000409.1, 203233_at
FIG. 1032: PRO2540
FIG. 1033: DNA325507, NP_005842.1, 203252_at
FIG. 1034: PRO69461
FIG. 1035: DNA330000, NP_036277.1, 203270_at
FIG. 1036: PRO85289
FIG. 1037: DNA302020, NP_005564.1, 203276_at
FIG. 1038: PRO70993
FIG. 1039: DNA328486, NP_000149.1, 203282_at
FIG. 1040: PRO60119
FIG. 1041A-B: DNA330001, NP_036394.1,
203285_s_at
FIG. 1042: PRO85290
FIG. 1043: DNA225675, NP_005561.1, 203293_s_at
FIG. 1044: PRO36138
FIG. 1045: DNA330002, BC007195, 203315_at
FIG. 1046: PRO80853
FIG. 1047A-B: DNA330003, NP_005532.1,
203331_s_at
FIG. 1048: PRO85291
FIG. 1049: DNA330004, NP_055785.2, 203333_at
FIG. 1050: PRO85292
FIG. 1051: DNA330005, NP_003696.2, 203340_s_at
FIG. 1052: PRO85293
FIG. 1053: DNA271959, NP_002885.1, 203344_s_at
FIG. 1054: PRO60234
FIG. 1055: DNA330006, NP_031384.1, 203347_s_at
FIG. 1056: PRO85294
FIG. 1057: DNA330007, NP_055111.1, 203357_s_at
FIG. 1058: PRO85295
FIG. 1059: DNA330008, NP_004447.2, 203358_s_at
FIG. 1060: PRO85296
FIG. 1061: DNA272449, NP_036465.1, 203360_s_at
FIG. 1062: PRO60698
FIG. 1063: DNA324514, NP_002349.1, 203362_s_at
FIG. 1064: PRO81169
FIG. 1065: DNA325749, NP_003868.1, 203372_s_at
FIG. 1066: PRO12839
FIG. 1067: DNA325749, STATI2, 203373_at
FIG. 1068: PRO12839
FIG. 1069: DNA274960, NP_008856.1, 203380_x_at
FIG. 1070: PRO62694
FIG. 1071: DNA151022, NP_001336.1, 203385_at
FIG. 1072: PRO12096
FIG. 1073: DNA331460, NP_002780.1, 203396_at
FIG. 1074: PRO60499
FIG. 1075: DNA326892, NP_003711.1, 203405_at
FIG. 1076: PRO83213
FIG. 1077: DNA274778, NP_005917.1, 203406_at
FIG. 1078: PRO62545
FIG. 1079: DNA270134, NP_000098.1, 203409_at
FIG. 1080: PRO58523
FIG. 1081: DNA28759, NP_006150.1, 203413_at
FIG. 1082: PRO2520
FIG. 1083: DNA287267, NP_001228.1, 203418_at
FIG. 1084: PRO37015
FIG. 1085A-B: DNA256807, NP_057339.1,
203420_at
FIG. 1086: PRO51738
FIG. 1087: DNA326745, NP_002682.1, 203422_at
FIG. 1088: PRO83083
FIG. 1089: DNA330009, NP_054753.1, 203428_s_at
FIG. 1090: PRO85297
FIG. 1091A-B: DNA275186, DNA275186,
203432_at
FIG. 1092A-B: DNA330010, NP_005721.2,
203445_s_at
FIG. 1093: PRO85298
FIG. 1094: DNA273410, NP_004036.1, 203454_s_at
FIG. 1095: PRO61409
FIG. 1096: DNA328495, NP_055578.1, 203465_at
FIG. 1097: PRO58967
FIG. 1098A-C: DNA331461, NP_005493.2,
203504_s_at
FIG. 1099: PRO86511
FIG. 1100A-B: DNA331462, NP_003096.1,
203509_at
FIG. 1101: PRO86512
FIG. 1102: DNA272911, NP_006545.1, 203517_at
FIG. 1103: PRO60997
FIG. 1104A-D: DNA331463, NP_000072.1,
203518_at
FIG. 1105: PRO86513
FIG. 1106A-C: DNA331464, NP_055160.1,
203520_s_at
FIG. 1107: PRO86514
FIG. 1108A-C: DNA330014, HRIHFB2436,
203521_s_at
FIG. 1109: PRO85302
FIG. 1110: DNA325404, NP_002330.1, 203523_at
FIG. 1111: PRO81936
FIG. 1112: DNA323910, NP_002956.1, 203535_at
FIG. 1113: PRO80648
FIG. 1114A-B: DNA272399, NP_001197.1,
203542_s_at
FIG. 1115: PRO60653
FIG. 1116A-B: DNA272399, BTEB1, 203543_s_at
FIG. 1117: PRO60653
FIG. 1118: DNA324684, NP_004210.1, 203554_x_at
FIG. 1119: PRO81319
FIG. 1120: DNA330015, NP_004620.1, 203564_at
FIG. 1121: PRO58704
FIG. 1122: DNA330016, NP_006346.1, 203567_s_at
FIG. 1123: PRO85303
FIG. 1124A-B: DNA150765, NP_003974.1,
203579_s_at
FIG. 1125: PRO12458
FIG. 1126: DNA273676, NP_055488.1, 203584_at
FIG. 1127: PRO61644
FIG. 1128: DNA271003, NP_003720.1, 203594_at
FIG. 1129: PRO59332
FIG. 1130A-B: DNA270323, NP_036552.1,
203595_s_at
FIG. 1131: PRO58710
FIG. 1132A-B: DNA270323, RI58, 203596_s_at
FIG. 1133: PRO58710
FIG. 1134: DNA330017, NP_009118.1, 203597_s_at
FIG. 1135: PRO60916
FIG. 1136: DNA329604, NP_003127.1, 203605_at
FIG. 1137: PRO85134
FIG. 1138: DNA287246, NP_004044.2, 203612_at
FIG. 1139: PRO69521
FIG. 1140: DNA330018, NP_064528.1, 203622_s_at
FIG. 1141: PRO85304
FIG. 1142: DNA331465, SKP2, 203625_x_at
FIG. 1143: PRO81225
FIG. 1144A-B: DNA327596, 345314.2, 203628_at
FIG. 1145: PRO1920
FIG. 1146A-B: DNA331466, BCL2, 203685_at
FIG. 1147: PRO86515
FIG. 1148A-B: DNA330021, NP_001940.1,
203693_s_at
FIG. 1149: PRO85306
FIG. 1150: DNA329900, RFC2, 203696_s_at
FIG. 1151: PRO81549
FIG. 1152A-C: DNA331467, NP_002213.1,
203710_at
FIG. 1153: PRO86516
FIG. 1154: DNA329144, KIAA0020, 203712_at
FIG. 1155: PRO84779
FIG. 1156: DNA326402, NP_004515.1, 203713_s_at
FIG. 1157: PRO82793
FIG. 1158: DNA324183, DPP4, 203716_s_at
FIG. 1159: PRO80881
FIG. 1160: DNA150784, NP_001974.1, 203720_s_at
FIG. 1161: PRO12800
FIG. 1162A-B: DNA269573, NP_002212.1,
203723_at
FIG. 1163: PRO57986
FIG. 1164: DNA330023, NP_001915.1, 203725_at
FIG. 1165: PRO85308
FIG. 1166: DNA227020, NP_001416.1, 203729_at
FIG. 1167: PRO37483
FIG. 1168A-B: DNA325369, NP_055877.2,
203737_s_at
FIG. 1169: PRO81905
FIG. 1170A-B: DNA150748, NP_001105.1,
203741_s_at
FIG. 1171: PRO12446
FIG. 1172: DNA327523, AQP3, 203747_at
FIG. 1173: PRO38028
FIG. 1174: DNA330024, NP_058521.1, 203748_x_at
FIG. 1175: PRO85309
FIG. 1176: DNA97279, NP_005345.2, 203751_x_at
FIG. 1177: PRO3628
FIG. 1178A-B: DNA325972, BUB1B, 203755_at
FIG. 1179: PRO82417
FIG. 1180: DNA330025, NP_055565.2, 203764_at
FIG. 1181: PRO85310
FIG. 1182: DNA330026, NP_005899.1, 203778_at
FIG. 1183: PRO85311
FIG. 1184: DNA330027, NP_036578.1, 203787_at
FIG. 1185: PRO85312
FIG. 1186A-B: DNA150954, NP_055695.1,
203799_at
FIG. 1187: PRO12558
FIG. 1188: DNA331468, DGUOK, 203816_at
FIG. 1189: PRO86517
FIG. 1190: DNA274125, NP_071739.1, 203830_at
FIG. 1191: PRO62061
FIG. 1192A-B: DNA331469, 094680.4, 203845_at
FIG. 1193: PRO86518
FIG. 1194A-B: DNA325529, GAB2, 203853_s_at
FIG. 1195: PRO82037
FIG. 1196A-B: DNA275079, NP_056648.1,
203865_s_at
FIG. 1197: PRO62797
FIG. 1198: DNA275339, NP_005685.1, 203880_at
FIG. 1199: PRO63012
FIG. 1200: DNA329034, NP_006075.2, 203882_at
FIG. 1201: PRO84701
FIG. 1202A-B: DNA288692, NP_055719.1,
203884_s_at
FIG. 1203: PRO70078
FIG. 1204: DNA328513, TAF9, 203893_at
FIG. 1205: PRO37815
FIG. 1206A-B: DNA330030, NP_055684.1,
203907_s_at
FIG. 1207: PRO85315
FIG. 1208: DNA82376, NP_002407.1, 203915_at
FIG. 1209: PRO1723
FIG. 1210: DNA271676, NP_002052.1, 203925_at
FIG. 1211: PRO59961
FIG. 1212: DNA288249, NP_002940.1, 203931_s_at
FIG. 1213: PRO69507
FIG. 1214: DNA330031, NP_057210.1, 203960_s_at
FIG. 1215: PRO85316
FIG. 1216: DNA275012, NP_004679.1, 203964_at
FIG. 1217: PRO62740
FIG. 1218: DNA272338, NP_001245.1, 203967_at
FIG. 1219: PRO60595
FIG. 1220: DNA272338, CDC6, 203968_s_at
FIG. 1221: PRO60595
FIG. 1222: DNA227232, NP_001850.1, 203971_at
FIG. 1223: PRO37695
FIG. 1224: DNA271374, NP_005474.1, 203976_s_at
FIG. 1225: PRO59673
FIG. 1226: DNA226133, NP_001983.1, 203989_x_at
FIG. 1227: PRO36596
FIG. 1228: DNA225915, NP_000561.1, 204006_s_at
FIG. 1229: PRO36378
FIG. 1230: DNA330032, HUMGCRFC, 204007_at
FIG. 1231: PRO85317
FIG. 1232: DNA329145, DUSP4, 204014_at
FIG. 1233: PRO84780
FIG. 1234: DNA331470, HSU48807, 204015_s_at
FIG. 1235: PRO86519
FIG. 1236: DNA326089, NP_000508.1, 204018_x_at
FIG. 1237: PRO3629
FIG. 1238: DNA330033, NP_056492.1, 204019_s_at
FIG. 1239: PRO85318
FIG. 1240: DNA330034, NP_002907.1, 204023_at
FIG. 1241: PRO85319
FIG. 1242: DNA328271, NP_008988.2, 204026_s_at
FIG. 1243: PRO81868
FIG. 1244: DNA330035, NP_004228.1, 204033_at
FIG. 1245: PRO85320
FIG. 1246: DNA325181, CLTA, 204050_s_at
FIG. 1247: PRO81742
FIG. 1248: DNA226342, NP_000305.1, 204054_at
FIG. 1249: PRO36805
FIG. 1250A-B: DNA331471, NP_055498.1,
204063_s_at
FIG. 1251: PRO61468
FIG. 1252: DNA274783, NP_006272.1, 204068_at
FIG. 1253: PRO62549
FIG. 1254A-C: DNA331472, NP_075463.1,
204072_s_at
FIG. 1255: PRO86520
FIG. 1256: DNA270476, NP_003591.1, 204092_s_at
FIG. 1257: PRO58855
FIG. 1258: DNA216689, NP_002975.1, 204103_at
FIG. 1259: PRO34276
FIG. 1260: DNA328522, NP_001769.2, 204118_at
FIG. 1261: PRO2696
FIG. 1262: DNA150529, NP_003323.1, 204122_at
FIG. 1263: PRO12313
FIG. 1264: DNA328524, NP_057097.1, 204125_at
FIG. 1265: PRO84336
FIG. 1266: DNA304489, NP_003495.1, 204126_s_at
FIG. 1267: PRO71058
FIG. 1268: DNA330037, BC000149, 204127_at
FIG. 1269: PRO82290
FIG. 1270: DNA325824, NP_002906.1, 204128_s_at
FIG. 1271: PRO82290
FIG. 1272: DNA328525, BC021224, 204131_s_at
FIG. 1273: PRO84337
FIG. 1274: DNA103532, NP_003263.1, 204137_at
FIG. 1275: PRO4859
FIG. 1276: DNA330038, BC016330, 204146_at
FIG. 1277: PRO85322
FIG. 1278: DNA330039, NP_002396.2, 204152_s_at
FIG. 1279: PRO85323
FIG. 1280: DNA330039, MFNG, 204153_s_at
FIG. 1281: PRO85323
FIG. 1282: DNA330040, NP_523240.1, 204159_at
FIG. 1283: PRO59546
FIG. 1284: DNA273694, NP_006092.1, 204162_at
FIG. 1285: PRO61661
FIG. 1286: DNA227116, NP_006738.1, 204164_at
FIG. 1287: PRO37579
FIG. 1288A-B: DNA254376, NP_055778.1,
204166_at
FIG. 1289: PRO49486
FIG. 1290: DNA272655, NP_001818.1, 204170_s_at
FIG. 1291: PRO60781
FIG. 1292: DNA330041, NP_000088.2, 204172_at
FIG. 1293: PRO85324
FIG. 1294: DNA328528, MLC1SA, 204173_at
FIG. 1295: PRO60636
FIG. 1296: DNA329148, NP_056955.1, 204175_at
FIG. 1297: PRO84782
FIG. 1298: DNA226380, NP_001765.1, 204192_at
FIG. 1299: PRO4695
FIG. 1300: DNA271778, NP_068594.1, 204205_at
FIG. 1301: PRO60062
FIG. 1302: DNA330042, HSU16307, 204221_x_at
FIG. 1303: PRO85325
FIG. 1304: DNA150812, NP_006842.1, 204222_s_at
FIG. 1305: PRO12481
FIG. 1306: DNA227514, NP_000152.1, 204224_s_at
FIG. 1307: PRO37977
FIG. 1308: DNA88308, NP_004097.1, 204232_at
FIG. 1309: PRO2739
FIG. 1310: DNA226881, NP_002008.2, 204236_at
FIG. 1311: PRO37344
FIG. 1312: DNA270434, NP_006434.1, 204238_s_at
FIG. 1313: PRO58814
FIG. 1314A-B: DNA287273, NP_006435.1,
204240_s_at
FIG. 1315: PRO69545
FIG. 1316: DNA330043, NP_001789.2, 204252_at
FIG. 1317: PRO85326
FIG. 1318A-B: DNA103527, NP_000367.1,
204253_s_at
FIG. 1319: PRO4854
FIG. 1320A-B: DNA103527, VDR, 204254_s_at
FIG. 1321: PRO4854
FIG. 1322A-B: DNA103527, HUMVDR,
204255_s_at
FIG. 1323: PRO4854
FIG. 1324: DNA228132, NP_076995.1, 204256_at
FIG. 1325: PRO38595
FIG. 1326: DNA226577, NP_071390.1, 204265_s_at
FIG. 1327: PRO37040
FIG. 1328: DNA88643, SGSH, 204293_at
FIG. 1329: PRO2455
FIG. 1330: DNA330044, GTSE1, 204318_s_at
FIG. 1331: PRO85327
FIG. 1332: DNA330045, NP_005943.1, 204326_x_at
FIG. 1333: PRO82583
FIG. 1334: DNA328530, NP_009198.2, 204328_at
FIG. 1335: PRO24118
FIG. 1336: DNA330046, 987987.10, 204334_at
FIG. 1337: PRO85328
FIG. 1338: DNA328531, NP_037542.1, 204348_s_at
FIG. 1339: PRO84338
FIG. 1340: DNA330047, BC005250, 204349_at
FIG. 1341: PRO37777
FIG. 1342A-B: DNA193847, NP_055518.1,
204377_s_at
FIG. 1343: PRO23272
FIG. 1344: DNA328533, NP_003647.1, 204392_at
FIG. 1345: PRO84340
FIG. 1346: DNA226462, NP_002241.1, 204401_at
FIG. 1347: PRO36925
FIG. 1348A-B: DNA330048, AF080255, 204407_at
FIG. 1349: PRO85329
FIG. 1350: DNA327616, NP_075011.1, 204415_at
FIG. 1351: PRO83624
FIG. 1352: DNA331473, NP_000839.1, 204418_x_at
FIG. 1353: PRO60552
FIG. 1354: DNA226286, NP_001657.1, 204425_at
FIG. 1355: PRO36749
FIG. 1356: DNA327617, NP_006811.1, 204439_at
FIG. 1357: PRO83625
FIG. 1358A-B: DNA330049, NP_004514.2,
204444_at
FIG. 1359: PRO85330
FIG. 1360: DNA329150, NP_000689.1, 204446_s_at
FIG. 1361: PRO84783
FIG. 1362: DNA270496, NP_001316.1, 204459_at
FIG. 1363: PRO58875
FIG. 1364: DNA330050, NP_056289.1, 204502_at
FIG. 1365: PRO85331
FIG. 1366: DNA273612, HSU79274, 204521_at
FIG. 1367: PRO61586
FIG. 1368: DNA330051, NP_003431.1, 204523_at
FIG. 1369: PRO85332
FIG. 1370A-B: DNA330052, NP_009227.1,
204531_s_at
FIG. 1371: PRO25103
FIG. 1372: DNA82362, NP_001556.1, 204533_at
FIG. 1373: PRO1718
FIG. 1374A-B: DNA331474, 357276.11, 204552_at
FIG. 1375: PRO86521
FIG. 1376A-B: DNA329036, NP_002451.1,
204562_at
FIG. 1377: PRO84703
FIG. 1378: DNA287284, NP_060943.1, 204565_at
FIG. 1379: PRO59915
FIG. 1380: DNA151910, NP_004906.2, 204567_s_at
FIG. 1381: PRO12754
FIG. 1382A-B: DNA273627, NP_055739.1,
204568_at
FIG. 1383: PRO61599
FIG. 1384: DNA272992, N4BP1, 204601_at
FIG. 1385: PRO61064
FIG. 1386: DNA254157, NP_005245.2, 204618_s_at
FIG. 1387: PRO49271
FIG. 1388: DNA151048, NP_006177.1, 204621_s_at
FIG. 1389: PRO12850
FIG. 1390: DNA151048, NR4A2, 204622_x_at
FIG. 1391: PRO12850
FIG. 1392A-B: DNA330054, NP_004746.1,
204633_s_at
FIG. 1393: PRO85334
FIG. 1394: DNA254470, NP_002488.1, 204641_at
FIG. 1395: PRO49578
FIG. 1396: DNA226182, EDG1, 204642_at
FIG. 1397: PRO36645
FIG. 1398: DNA210121, CDW52, 204661_at
FIG. 1399: PRO33667
FIG. 1400: DNA103526, LRMP, 204674_at
FIG. 1401: PRO4853
FIG. 1402: DNA225974, NP_000864.1, 204683_at
FIG. 1403: PRO36437
FIG. 1404: DNA256295, LRN, 204692_at
FIG. 1405: PRO51339
FIG. 1406: DNA227573, NP_001780.1, 204696_s_at
FIG. 1407: PRO38036
FIG. 1408: DNA329151, NP_004280.3, 204702_s_at
FIG. 1409: PRO84784
FIG. 1410: DNA331475, KNSL5, 204709_s_at
FIG. 1411: PRO86522
FIG. 1412A-B: DNA331476, NP_000121.1,
204713_s_at
FIG. 1413: PRO86523
FIG. 1414A-B: DNA225911, F5, 204714_s_at
FIG. 1415: PRO36374
FIG. 1416A-B: DNA218283, NP_004436.1,
204718_at
FIG. 1417: PRO34335
FIG. 1418A-B: DNA256461, NP_009017.1,
204728_s_at
FIG. 1419: PRO51498
FIG. 1420A-C: DNA274487, NP_055562.1,
204730_at
FIG. 1421: PRO62389
FIG. 1422A-B: DNA83176, NP_003234.1, 204731_at
FIG. 1423: PRO2620
FIG. 1424A-B: DNA325192, NP_038203.1,
204744_s_at
FIG. 1425: PRO81753
FIG. 1426: DNA330057, NP_005941.1, 204745_x_at
FIG. 1427: PRO85337
FIG. 1428: DNA287178, NP_001540.1, 204747_at
FIG. 1429: PRO69467
FIG. 1430: DNA330058, NP_004529.2, 204749_at
FIG. 1431: PRO85338
FIG. 1432: DNA329153, NP_001259.1, 204759_at
FIG. 1433: PRO84786
FIG. 1434: DNA330059, NP_068370.1, 204760_s_at
FIG. 1435: PRO85339
FIG. 1436: DNA330060, NP_002443.2, 204766_s_at
FIG. 1437: PRO85340
FIG. 1438: DNA329154, BC000323, 204767_s_at
FIG. 1439: PRO69568
FIG. 1440: DNA325479, NP_004102.1, 204768_s_at
FIG. 1441: PRO69568
FIG. 1442: DNA328541, NP_004503.1, 204773_at
FIG. 1443: PRO4843
FIG. 1444: DNA329155, NP_000034.1, 204780_s_at
FIG. 1445: PRO1207
FIG. 1446: DNA329155, TNFRSF6, 204781_s_at
FIG. 1447: PRO1207
FIG. 1448: DNA272121, NP_005895.1, 204790_at
FIG. 1449: PRO60391
FIG. 1450A-B: DNA330061, NP_055525.1,
204793_at
FIG. 1451: PRO85341
FIG. 1452: DNA103269, NP_005366.1, 204798_at
FIG. 1453: PRO4599
FIG. 1454: DNA287168, NP_003132.2, 204804_at
FIG. 1455: PRO69460
FIG. 1456: DNA330062, NP_006017.1, 204805_s_at
FIG. 1457: PRO85342
FIG. 1458A-B: DNA329907, ESPL1, 204817_at
FIG. 1459: PRO85224
FIG. 1460: DNA331477, NP_003309.1, 204822_at
FIG. 1461: PRO58276
FIG. 1462: DNA255289, NP_055606.1, 204825_at
FIG. 1463: PRO50363
FIG. 1464A-B: DNA226387, NP_001752.1,
204826_at
FIG. 1465: PRO36850
FIG. 1466: DNA328544, NP_006673.1, 204834_at
FIG. 1467: PRO84347
FIG. 1468A-B: DNA270446, NP_058633.1,
204835_at
FIG. 1469: PRO58825
FIG. 1470: DNA330063, HUMLPTPASE,
204852_s_at
FIG. 1471: PRO85343
FIG. 1472: DNA150598, NP_003541.1, 204857_at
FIG. 1473: PRO12142
FIG. 1474: DNA225661, NP_001944.1, 204858_s_at
FIG. 1475: PRO36124
FIG. 1476A-B: DNA330064, 332518.2, 204886_at
FIG. 1477: PRO85344
FIG. 1478: DNA330065, NP_055079.2, 204887_s_at
FIG. 1479: PRO85345
FIG. 1480: DNA103444, LCK, 204890_s_at
FIG. 1481: PRO4771
FIG. 1482: DNA331478, BC013200, 204891_s_at
FIG. 1483: PRO86524
FIG. 1484: DNA194139, DNA194139, 204897_at
FIG. 1485: PRO23533
FIG. 1486: DNA255326, NP_003855.1, 204900_x_at
FIG. 1487: PRO50396
FIG. 1488: DNA329157, NP_004271.1, 204905_s_at
FIG. 1489: PRO62861
FIG. 1490: DNA329011, NP_005169.1, 204908_s_at
FIG. 1491: PRO4785
FIG. 1492A-B: DNA76503, NP_001549.1, 204912_at
FIG. 1493: PRO2536
FIG. 1494: DNA330066, NP_004520.1, 204917_s_at
FIG. 1495: PRO85346
FIG. 1496: DNA228014, NP_002153.1, 204949_at
FIG. 1497: PRO38477
FIG. 1498: DNA271093, NP_004064.1, 204958_at
FIG. 1499: PRO59417
FIG. 1500: DNA103283, NP_002423.1, 204959_at
FIG. 1501: PRO4613
FIG. 1502: DNA330067, NP_001800.1, 204962_s_at
FIG. 1503: PRO60368
FIG. 1504: DNA287399, NP_058197.1, 204972_at
FIG. 1505: PRO69656
FIG. 1506: DNA269665, NP_002454.1, 204994_at
FIG. 1507: PRO58076
FIG. 1508: DNA331479, 411441.5, 204995_at
FIG. 1509: PRO86525
FIG. 1510: DNA272427, NP_004799.1, 205005_s_at
FIG. 1511: PRO60679
FIG. 1512: DNA272427, NMT2, 205006_s_at
FIG. 1513: PRO60679
FIG. 1514: DNA329534, NP_004615.2, 205019_s_at
FIG. 1515: PRO2904
FIG. 1516: DNA331480, RAD51, 205024_s_at
FIG. 1517: PRO86526
FIG. 1518: DNA329159, NP_005195.2, 205027_s_at
FIG. 1519: PRO4660
FIG. 1520: DNA325061, NP_005208.1, 205033_s_at
FIG. 1521: PRO9980
FIG. 1522: DNA328297, NP_477097.1, 205034_at
FIG. 1523: PRO59418
FIG. 1524A-C: DNA331481, NP_001804.1,
205046_at
FIG. 1525: PRO86527
FIG. 1526: DNA324991, ASNS, 205047_s_at
FIG. 1527: PRO81585
FIG. 1528: DNA271461, NP_000937.1, 205053_at
FIG. 1529: PRO59757
FIG. 1530A-B: DNA220750, NP_002199.2,
205055_at
FIG. 1531: PRO34728
FIG. 1532: DNA330071, NP_003607.1, 205063_at
FIG. 1533: PRO85350
FIG. 1534: DNA330072, NP_071801.1, 205072_s_at
FIG. 1535: PRO85351
FIG. 1536: DNA304705, NP_002634.1, 205078_at
FIG. 1537: PRO71131
FIG. 1538: DNA327632, NP_001302.1, 205081_at
FIG. 1539: PRO83635
FIG. 1540: DNA255336, NP_061332.1, 205084_at
FIG. 1541: PRO50406
FIG. 1542: DNA330073, NP_004144.1, 205085_at
FIG. 1543: PRO85352
FIG. 1544: DNA330074, HUMHM145, 205098_at
FIG. 1545: PRO85353
FIG. 1546: DNA226177, NP_001286.1, 205099_s_at
FIG. 1547: PRO36640
FIG. 1548: DNA192060, NP_002974.1, 205114_s_at
FIG. 1549: PRO21960
FIG. 1550: DNA299899, NP_002148.1, 205133_s_at
FIG. 1551: PRO62760
FIG. 1552: DNA331482, NP_001241.1, 205153_s_at
FIG. 1553: PRO34457
FIG. 1554: DNA330075, CDC25C, 205167_s_at
FIG. 1555: PRO85354
FIG. 1556: DNA330076, NP_005410.1, 205170_at
FIG. 1557: PRO85355
FIG. 1558: DNA328810, NP_001770.1, 205173_x_at
FIG. 1559: PRO2557
FIG. 1560: DNA330077, ITGB3BP, 205176_s_at
FIG. 1561: PRO85356
FIG. 1562: DNA151804, NP_006500.1, 205205_at
FIG. 1563: PRO12188
FIG. 1564: DNA272443, NP_055531.1, 205213_at
FIG. 1565: PRO60693
FIG. 1566: DNA273535, NP_004217.1, 205214_at
FIG. 1567: PRO61515
FIG. 1568: DNA325255, NP_001994.2, 205237_at
FIG. 1569: PRO1910
FIG. 1570: DNA330078, NP_001648.1, 205239_at
FIG. 1571: PRO46
FIG. 1572: DNA327634, NP_005129.1, 205241_at
FIG. 1573: PRO83636
FIG. 1574: DNA188333, NP_006410.1, 205242_at
FIG. 1575: PRO21708
FIG. 1576: DNA227081, NP_000390.2, 205249_at
FIG. 1577: PRO37544
FIG. 1578: DNA227447, NP_003193.1, 205254_x_at
FIG. 1579: PRO37910
FIG. 1580: DNA227447, TCF7, 205255_x_at
FIG. 1581: PRO37910
FIG. 1582A-B: DNA226483, NP_000892.1,
205259_at
FIG. 1583: PRO36946
FIG. 1584A-B: DNA330079, 341358.1, 205263_at
FIG. 1585: PRO1162
FIG. 1586A-B: DNA188301, NP_002300.1,
205266_at
FIG. 1587: PRO21834
FIG. 1588: DNA227173, NP_001456.1, 205285_s_at
FIG. 1589: PRO37636
FIG. 1590A-B: DNA331483, CDC14A, 205288_at
FIG. 1591: PRO86528
FIG. 1592A-B: DNA331484, NP_000869.1,
205291_at
FIG. 1593: PRO3276
FIG. 1594: DNA88119, NP_000617.1, 205297_s_at
FIG. 1595: PRO2663
FIG. 1596A-B: DNA330081, NP_003026.1,
205339_at
FIG. 1597: PRO85358
FIG. 1598: DNA256854, NP_000456.1, 205345_at
FIG. 1599: PRO51785
FIG. 1600: DNA270415, NP_002059.1, 205349_at
FIG. 1601: PRO58796
FIG. 1602: DNA325568, NP_001265.1, 205393_s_at
FIG. 1603: PRO12187
FIG. 1604: DNA325568, CHEK1, 205394_at
FIG. 1605: PRO12187
FIG. 1606: DNA330082, NP_005582.1, 205395_s_at
FIG. 1607: PRO60497
FIG. 1608: DNA328561, NP_004624.1, 205403_at
FIG. 1609: PRO2019
FIG. 1610: DNA329010, NP_004942.1, 205419_at
FIG. 1611: PRO23370
FIG. 1612A-B: DNA210654, NP_055726.1,
205434_s_at
FIG. 1613: PRO54603
FIG. 1614: DNA287337, NP_002096.1, 205436_s_at
FIG. 1615: PRO69600
FIG. 1616: DNA330083, NP_003073.1, 205443_at
FIG. 1617: PRO69499
FIG. 1618: DNA272221, NP_037431.1, 205449_at
FIG. 1619: PRO60483
FIG. 1620: DNA88194, NP_000724.1, 205456_at
FIG. 1621: PRO2220
FIG. 1622: DNA188355, NP_004582.1, 205476_at
FIG. 1623: PRO21885
FIG. 1624: DNA287224, NP_005092.1, 205483_s_at
FIG. 1625: PRO69503
FIG. 1626: DNA330084, NP_055265.1, 205484_at
FIG. 1627: PRO9895
FIG. 1628: DNA225959, NP_006135.1, 205488_at
FIG. 1629: PRO36422
FIG. 1630: DNA331485, GNLY, 205495_s_at
FIG. 1631: PRO86529
FIG. 1632: DNA328566, NP_060446.1, 205510_s_at
FIG. 1633: PRO84363
FIG. 1634: DNA327639, NP_001053.2, 205513_at
FIG. 1635: PRO83640
FIG. 1636: DNA330085, D86324, 205518_s_at
FIG. 1637: PRO85359
FIG. 1638: DNA330086, NP_079184.1, 205519_at
FIG. 1639: PRO85360
FIG. 1640: DNA254810, NP_056536.1, 205527_s_at
FIG. 1641: PRO49906
FIG. 1642: DNA331486, OAS1, 205552_s_at
FIG. 1643: PRO69559
FIG. 1644: DNA330087, PCSK5, 205559_s_at
FIG. 1645: PRO85361
FIG. 1646: DNA256257, NP_055213.1, 205569_at
FIG. 1647: PRO51301
FIG. 1648A-B: DNA327643, NP_055712.1,
205594_at
FIG. 1649: PRO83644
FIG. 1650: DNA329013, NP_005649.1, 205599_at
FIG. 1651: PRO20128
FIG. 1652: DNA324324, NP_000679.1, 205633_s_at
FIG. 1653: PRO81000
FIG. 1654: DNA330088, NP_003087.1, 205644_s_at
FIG. 1655: PRO61962
FIG. 1656: DNA287317, NP_003724.1, 205660_at
FIG. 1657: PRO69582
FIG. 1658: DNA328570, NP_004040.1, 205681_at
FIG. 1659: PRO37843
FIG. 1660: DNA330089, NP_004200.2, 205691_at
FIG. 1661: PRO12507
FIG. 1662: DNA226234, NP_001766.1, 205692_s_at
FIG. 1663: PRO36697
FIG. 1664: DNA330090, NP_002749.2, 205698_s_at
FIG. 1665: PRO62976
FIG. 1666: DNA220761, NP_000880.1, 205718_at
FIG. 1667: PRO34739
FIG. 1668A-B: DNA271762, NP_000048.1,
205733_at
FIG. 1669: PRO60046
FIG. 1670: DNA331318, NP_003636.1, 205768_s_at
FIG. 1671: PRO51139
FIG. 1672: DNA331318, SLC27A2, 205769_at
FIG. 1673: PRO51139
FIG. 1674: DNA330091, NP_057461.1, 205771_s_at
FIG. 1675: PRO85362
FIG. 1676: DNA330092, NP_004904.1, 205781_at
FIG. 1677: PRO85363
FIG. 1678A-B: DNA220752, NP_000623.1,
205786_s_at
FIG. 1679: PRO34730
FIG. 1680: DNA330093, NP_003717.2, 205790_at
FIG. 1681: PRO85364
FIG. 1682: DNA76517, NP_002176.1, 205798_at
FIG. 1683: PRO2541
FIG. 1684A-B: DNA271915, NP_056191.1,
205801_s_at
FIG. 1685: PRO60192
FIG. 1686: DNA194766, NP_079504.1, 205804_s_at
FIG. 1687: PRO24046
FIG. 1688A-B: DNA328574, NP_004963.1,
205841_at
FIG. 1689: PRO84368
FIG. 1690A-B: DNA328574, JAK2, 205842_s_at
FIG. 1691: PRO84368
FIG. 1692: DNA330094, TREX1, 205875_s_at
FIG. 1693: PRO85365
FIG. 1694: DNA331320, HSU37122, 205882_x_at
FIG. 1695: PRO86409
FIG. 1696A-B: DNA220746, NP_000876.1,
205884_at
FIG. 1697: PRO34724
FIG. 1698A-B: DNA220746, ITGA4, 205885_s_at
FIG. 1699: PRO34724
FIG. 1700: DNA329540, NP_006389.1, 205890_s_at
FIG. 1701: PRO85090
FIG. 1702: DNA330095, NP_004732.1, 205895_s_at
FIG. 1703: PRO85366
FIG. 1704: DNA328576, HSU20350, 205898_at
FIG. 1705: PRO4940
FIG. 1706: DNA287318, NP_002683.1, 205909_at
FIG. 1707: PRO69583
FIG. 1708: DNA75525, NP_005805.1, 205929_at
FIG. 1709: PRO2524
FIG. 1710: DNA76516, NP_000556.1, 205945_at
FIG. 1711: PRO2022
FIG. 1712: DNA329047, NP_006390.1, 205965_at
FIG. 1713: PRO58425
FIG. 1714: DNA273487, NP_004785.1, 206039_at
FIG. 1715: PRO61470
FIG. 1716A-B: DNA290265, NP_003421.1,
206059_at
FIG. 1717: PRO70395
FIG. 1718: DNA330096, NP_057051.1, 206060_s_at
FIG. 1719: PRO37163
FIG. 1720: DNA271992, NP_006665.1, 206082_at
FIG. 1721: PRO60267
FIG. 1722: DNA270851, NP_006617.1, 206098_at
FIG. 1723: PRO59189
FIG. 1724: DNA226105, NP_002925.1, 206111_at
FIG. 1725: PRO36568
FIG. 1726: DNA83063, NP_004429.1, 206114_at
FIG. 1727: PRO2068
FIG. 1728A-B: DNA151420, NP_004421.1,
206115_at
FIG. 1729: PRO12876
FIG. 1730: DNA287306, NP_059993.1, 206133_at
FIG. 1731: PRO69572
FIG. 1732: DNA330097, NP_001233.1, 206150_at
FIG. 1733: PRO2024
FIG. 1734: DNA331487, GABPB2, 206173_x_at
FIG. 1735: PRO86530
FIG. 1736: DNA329005, NP_003028.1, 206181_at
FIG. 1737: PRO12612
FIG. 1738: DNA330098, NP_073619.1, 206205_at
FIG. 1739: PRO85367
FIG. 1740: DNA329168, CLC, 206207_at
FIG. 1741: PRO84794
FIG. 1742: DNA281446, NP_031394.1, 206220_s_at
FIG. 1743: PRO66285
FIG. 1744: DNA281446, GAP1IP4BP, 206221_at
FIG. 1745: PRO66285
FIG. 1746A-B: DNA331488, NP_055523.1,
206316_s_at
FIG. 1747: PRO86531
FIG. 1748: DNA327661, NP_005522.1, 206332_s_at
FIG. 1749: PRO83652
FIG. 1750: DNA218278, NP_000408.1, 206341_at
FIG. 1751: PRO34330
FIG. 1752: DNA269870, NP_005382.1, 206348_s_at
FIG. 1753: PRO58270
FIG. 1754A-B: DNA330100, NP_055690.1,
206364_at
FIG. 1755: PRO85369
FIG. 1756: DNA329169, NP_002986.1, 206366_x_at
FIG. 1757: PRO1610
FIG. 1758: DNA271310, NP_004411.1, 206374_at
FIG. 1759: PRO59617
FIG. 1760A-E: DNA331489, NP_066267.1,
206385_s_at
FIG. 1761: PRO86532
FIG. 1762: DNA326727, NP_001527.1, 206445_s_at
FIG. 1763: PRO83069
FIG. 1764A-B: DNA271891, NP_055766.1,
206448_at
FIG. 1765: PRO60170
FIG. 1766: DNA153751, NP_005942.1, 206461_x_at
FIG. 1767: PRO12925
FIG. 1768: DNA88203, NP_055022.1, 206485_at
FIG. 1769: PRO2698
FIG. 1770: DNA288243, NP_002277.3, 206486_at
FIG. 1771: PRO36451
FIG. 1772: DNA269850, NP_002003.1, 206492_at
FIG. 1773: PRO58251
FIG. 1774: DNA270444, NP_004824.1, 206513_at
FIG. 1775: PRO58823
FIG. 1776A-B: DNA188192, NP_006130.1,
206545_at
FIG. 1777: PRO21704
FIG. 1778A-B: DNA330102, NP_004289.1,
206550_s_at
FIG. 1779: PRO85371
FIG. 1780: DNA331490, OAS2, 206553_at
FIG. 1781: PRO69656
FIG. 1782: DNA227540, NP_003036.1, 206566_at
FIG. 1783: PRO38003
FIG. 1784: DNA330103, NP_056179.1, 206584_at
FIG. 1785: PRO19671
FIG. 1786: DNA329172, NP_005254.1, 206589_at
FIG. 1787: PRO84796
FIG. 1788: DNA103451, NP_003846.1, 206618_at
FIG. 1789: PRO4778
FIG. 1790: DNA227709, NP_000947.1, 206631_at
FIG. 1791: PRO38172
FIG. 1792: DNA331491, NP_004891.2, 206632_s_at
FIG. 1793: PRO62308
FIG. 1794: DNA331492, BCL2L1, 206665_s_at
FIG. 1795: PRO83141
FIG. 1796: DNA88374, NP_002095.1, 206666_at
FIG. 1797: PRO2768
FIG. 1798: DNA330105, HUMNCAX, 206676_at
FIG. 1799: PRO85372
FIG. 1800: DNA328590, C6orf32, 206707_x_at
FIG. 1801: PRO84375
FIG. 1802: DNA330106, NP_003646.1, 206724_at
FIG. 1803: PRO85373
FIG. 1804A-B: DNA88191, NP_001234.1, 206729_at
FIG. 1805: PRO2691
FIG. 1806A-B: DNA88650, NP_005807.1, 206761_at
FIG. 1807: PRO2460
FIG. 1808: DNA226427, NP_002251.1, 206785_s_at
FIG. 1809: PRO36890
FIG. 1810: DNA88195, NP_000064.1, 206804_at
FIG. 1811: PRO2693
FIG. 1812: DNA256561, NP_062550.1, 206914_at
FIG. 1813: PRO51592
FIG. 1814: DNA93439, NP_006555.1, 206974_at
FIG. 1815: PRO4515
FIG. 1816: DNA35629, NP_000586.2, 206975_at
FIG. 1817: PRO7
FIG. 1818: DNA328591, NP_006635.1, 206976_s_at
FIG. 1819: PRO84376
FIG. 1820: DNA331493, CCR2, 206978_at
FIG. 1821: PRO84690
FIG. 1822: DNA188346, NP_001450.1, 206980_s_at
FIG. 1823: PRO21766
FIG. 1824A-B: DNA227659, NP_000570.1,
206991_s_at
FIG. 1825: PRO38122
FIG. 1826A-B: DNA227750, NP_001550.1,
206999_at
FIG. 1827: PRO38213
FIG. 1828: DNA329903, PPP3CC, 207000_s_at
FIG. 1829: PRO85220
FIG. 1830: DNA330108, NP_004080.1, 207001_x_at
FIG. 1831: PRO85374
FIG. 1832: DNA331494, PLAGL1, 207002_s_at
FIG. 1833: PRO62736
FIG. 1834: DNA331495, HUMBCL2B, 207005_s_at
FIG. 1835: PRO86533
FIG. 1836: DNA330110, HUMK10A, 207023_x_at
FIG. 1837: PRO85375
FIG. 1838: DNA225550, NP_003844.1, 207072_at
FIG. 1839: PRO36013
FIG. 1840: DNA273159, NP_005457.1, 207078_at
FIG. 1841: PRO61201
FIG. 1842: DNA227481, VAMP1, 207100_s_at
FIG. 1843: PRO37944
FIG. 1844: DNA218655, NP_000585.1, 207113_s_at
FIG. 1845: PRO34451
FIG. 1846: DNA330111, NP_002615.2, 207132_x_at
FIG. 1847: PRO85376
FIG. 1848: DNA330112, NP_444504.1, 207153_s_at
FIG. 1849: PRO61610
FIG. 1850: DNA103418, NP_036616.1, 207165_at
FIG. 1851: PRO4746
FIG. 1852: DNA330113, NP_203124.1, 207181_s_at
FIG. 1853: PRO85377
FIG. 1854: DNA330114, NP_006134.1, 207183_at
FIG. 1855: PRO4946
FIG. 1856: DNA331496, RBMS1, 207266_x_at
FIG. 1857: PRO86534
FIG. 1858: DNA83048, NP_001916.1, 207269_at
FIG. 1859: PRO2057
FIG. 1860A-B: DNA330115, NP_077739.1,
207324_s_at
FIG. 1861: PRO85378
FIG. 1862A-B: DNA226536, NP_003225.1,
207332_s_at
FIG. 1863: PRO36999
FIG. 1864: DNA331497, LTB, 207339_s_at
FIG. 1865: PRO11604
FIG. 1866: DNA330117, NP_003966.1, 207351_s_at
FIG. 1867: PRO85379
FIG. 1868: DNA330118, NP_036389.2, 207361_at
FIG. 1869: PRO85380
FIG. 1870: DNA226396, NP_002180.1, 207375_s_at
FIG. 1871: PRO36859
FIG. 1872: DNA227668, NP_000158.1, 207387_s_at
FIG. 1873: PRO38131
FIG. 1874A-B: DNA329093, MSF, 207425_s_at
FIG. 1875: PRO84745
FIG. 1876: DNA36718, NP_000563.1, 207433_at
FIG. 1877: PRO73
FIG. 1878A-B: DNA330119, NP_060189.2,
207474_at
FIG. 1879: PRO85381
FIG. 1880: DNA328597, NP_001680.1, 207507_s_at
FIG. 1881: PRO84381
FIG. 1882: DNA328597, ATP5G3, 207508_at
FIG. 1883: PRO84381
FIG. 1884A-B: DNA256059, NP_005164.1,
207521_s_at
FIG. 1885: PRO51107
FIG. 1886A-B: DNA256059, ATP2A3, 207522_s_at
FIG. 1887: PRO51107
FIG. 1888: DNA304473, NP_001552.2, 207536_s_at
FIG. 1889: PRO2023
FIG. 1890: DNA325454, NP_003637.1, 207556_s_at
FIG. 1891: PRO81977
FIG. 1892: DNA328601, NP_056490.1, 207574_s_at
FIG. 1893: PRO84384
FIG. 1894A-B: DNA330120, FLJ10971, 207606_s_at
FIG. 1895: PRO85382
FIG. 1896: DNA255271, NP_038475.1, 207610_s_at
FIG. 1897: PRO50348
FIG. 1898: DNA331498, TANK, 207616_s_at
FIG. 1899: PRO86535
FIG. 1900: DNA226337, NP_005683.2, 207622_s_at
FIG. 1901: PRO36800
FIG. 1902: DNA227606, NP_001872.2, 207630_s_at
FIG. 1903: PRO38069
FIG. 1904: DNA196426, NP_037440.1, 207651_at
FIG. 1905: PRO24924
FIG. 1906: DNA328554, NP_038202.1, 207677_s_at
FIG. 1907: PRO84354
FIG. 1908A-B: DNA226405, NP_006525.1,
207700_s_at
FIG. 1909: PRO36868
FIG. 1910: DNA329064, NP_060301.1, 207735_at
FIG. 1911: PRO84724
FIG. 1912: DNA329020, NUP62, 207740_s_at
FIG. 1913: PRO84695
FIG. 1914: DNA325654, NP_054752.1, 207761_s_at
FIG. 1915: PRO4348
FIG. 1916A-B: DNA329179, NP_056958.1,
207785_s_at
FIG. 1917: PRO84802
FIG. 1918: DNA227494, NP_002158.1, 207826_s_at
FIG. 1919: PRO37957
FIG. 1920A-C: DNA331499, NP_057427.2,
207828_s_at
FIG. 1921: PRO86536
FIG. 1922: DNA329182, HPIP, 207838_x_at
FIG. 1923: PRO84805
FIG. 1924: DNA330123, NP_008984.1, 207840_at
FIG. 1925: PRO35080
FIG. 1926: DNA227175, NP_006857.1, 207857_at
FIG. 1927: PRO37638
FIG. 1928: DNA330124, NP_002981.2, 207861_at
FIG. 1929: PRO34107
FIG. 1930: DNA217245, NP_000579.1, 207906_at
FIG. 1931: PRO34287
FIG. 1932: DNA218651, NP_003798.1, 207907_at
FIG. 1933: PRO34447
FIG. 1934: DNA330125, NP_002729.2, 207957_s_at
FIG. 1935: PRO85385
FIG. 1936A-B: DNA226290, NP_036333.1,
207966_s_at
FIG. 1937: PRO36753
FIG. 1938: DNA329183, NP_055962.1, 207971_s_at
FIG. 1939: PRO84806
FIG. 1940A-B: DNA330126, NP_008912.1,
207978_s_at
FIG. 1941: PRO85386
FIG. 1942: DNA329184, CITED2, 207980_s_at
FIG. 1943: PRO84807
FIG. 1944A-C: DNA254145, NP_004329.1,
207996_s_at
FIG. 1945: PRO49260
FIG. 1946: DNA275286, NP_009205.1, 208002_s_at
FIG. 1947: PRO62967
FIG. 1948: DNA288217, NP_002101.1, 208018_s_at
FIG. 1949: PRO69990
FIG. 1950: DNA227224, NP_060877.1, 208029_s_at
FIG. 1951: PRO37687
FIG. 1952A-B: DNA188492, NAB1, 208047_s_at
FIG. 1953: PRO22070
FIG. 1954: DNA330127, NP_006442.2, 208051_s_at
FIG. 1955: PRO85387
FIG. 1956A-B: DNA328607, NP_003639.1,
208072_s_at
FIG. 1957: PRO84390
FIG. 1958A-C: DNA331500, NP_003307.2,
208073_x_at
FIG. 1959: PRO86537
FIG. 1960A-B: DNA328312, NP_110378.1,
208078_s_at
FIG. 1961: PRO84180
FIG. 1962: DNA331501, STK6, 208079_s_at
FIG. 1963: PRO58855
FIG. 1964: DNA323896, NP_112182.1, 208103_s_at
FIG. 1965: PRO80638
FIG. 1966: DNA330129, NP_112495.1, 208119_s_at
FIG. 1967: PRO85389
FIG. 1968: DNA325329, NP_004719.1, 208152_s_at
FIG. 1969: PRO81872
FIG. 1970: DNA36717, NP_000581.1, 208193_at
FIG. 1971: PRO72
FIG. 1972A-E: DNA330130, HSTITIN, 208195_at
FIG. 1973: DNA328611, RASGRP2, 208206_s_at
FIG. 1974: PRO84393
FIG. 1975: DNA328612, NP_000166.2, 208308_s_at
FIG. 1976: PRO84394
FIG. 1977A-D: DNA331502, NP_000050.1,
208368_s_at
FIG. 1978: PRO86538
FIG. 1979: DNA324250, NP_536349.1, 208392_x_at
FIG. 1980: PRO80934
FIG. 1981A-B: DNA331503, RAD50, 208393_s_at
FIG. 1982: PRO86539
FIG. 1983: DNA327690, NP_004022.1, 208436_s_at
FIG. 1984: PRO83673
FIG. 1985: DNA103427, NP_005239.1, 208438_s_at
FIG. 1986: PRO4755
FIG. 1987A-C: DNA331504, ATM, 208442_s_at
FIG. 1988: PRO86540
FIG. 1989A-B: DNA330134, BAZ1B, 208445_s_at
FIG. 1990: PRO85394
FIG. 1991A-C: DNA331505, NP_000642.2,
208488_s_at
FIG. 1992: PRO86541
FIG. 1993: DNA330136, NP_002441.1, 208581_x_at
FIG. 1994: PRO82583
FIG. 1995A-C: DNA331506, NP_001448.1,
208614_s_at
FIG. 1996: PRO86542
FIG. 1997A-B: DNA330138, PTP4A2, 208617_s_at
FIG. 1998: PRO85397
FIG. 1999A-B: DNA273567, NP_004944.1,
208624_s_at
FIG. 2000: PRO61545
FIG. 2001A-B: DNA273567, EIF4G1, 208625_s_at
FIG. 2002: PRO61545
FIG. 2003: DNA325912, NP_001093.1, 208636_at
FIG. 2004: PRO82367
FIG. 2005: DNA325912, ACTN1, 208637_x_at
FIG. 2006: PRO82367
FIG. 2007: DNA329188, BC012142, 208638_at
FIG. 2008: PRO84810
FIG. 2009: DNA324641, NP_005608.1, 208646_at
FIG. 2010: PRO10849
FIG. 2011: DNA271268, NP_009057.1, 208649_s_at
FIG. 2012: PRO59579
FIG. 2013: DNA328617, AF299343, 208653_s_at
FIG. 2014: PRO84399
FIG. 2015: DNA330139, AK022493, 208657_s_at
FIG. 2016: PRO85398
FIG. 2017A-C: DNA151898, TTC3, 208661_s_at
FIG. 2018: PRO12135
FIG. 2019A-C: DNA151898, D84294, 208662_s_at
FIG. 2020: PRO12135
FIG. 2021A-C: DNA331507, D83327, 208663_s_at
FIG. 2022: DNA304686, NP_002565.1, 208680_at
FIG. 2023: PRO71112
FIG. 2024A-B: DNA328619, BC001188, 208691_at
FIG. 2025: PRO84401
FIG. 2026: DNA287189, NP_002038.1, 208693_s_at
FIG. 2027: PRO69475
FIG. 2028: DNA330140, AF275798, 208696_at
FIG. 2029: PRO85399
FIG. 2030A-C: DNA331508, 198777.9, 208707_at
FIG. 2031: PRO86543
FIG. 2032: DNA97298, NP_003899.1, 208726_s_at
FIG. 2033: PRO3645
FIG. 2034: DNA330142, BC003564, 208737_at
FIG. 2035: PRO85401
FIG. 2036: DNA331509, 1138554.23, 208740_at
FIG. 2037: PRO86544
FIG. 2038: DNA328591, HSP105B, 208744_x_at
FIG. 2039: PRO84376
FIG. 2040: DNA287285, NP_005794.1, 208748_s_at
FIG. 2041: PRO69556
FIG. 2042: DNA324217, ATIC, 208758_at
FIG. 2043: PRO80908
FIG. 2044: DNA327696, AF228339, 208763_s_at
FIG. 2045: PRO83679
FIG. 2046A-B: DNA331510, 1298307.1, 208776_at
FIG. 2047: PRO86545
FIG. 2048: DNA287427, NP_002806.1, 208777_s_at
FIG. 2049: PRO69684
FIG. 2050: DNA287219, NP_110379.1, 208778_s_at
FIG. 2051: PRO69498
FIG. 2052: DNA329189, NP_009139.1, 208787_at
FIG. 2053: PRO4911
FIG. 2054: DNA238565, NP_005907.2, 208795_s_at
FIG. 2055: PRO39210
FIG. 2056: DNA330145, NP_002788.1, 208799_at
FIG. 2057: PRO84403
FIG. 2058: DNA331511, HSMPIO, 208805_at
FIG. 2059A-C: DNA331512, 1397486.26, 208806_at
FIG. 2060: PRO86547
FIG. 2061A-B: DNA330147, HSU91543,
208807_s_at
FIG. 2062: PRO85405
FIG. 2063: DNA324531, NP_002120.1, 208808_s_at
FIG. 2064: PRO81185
FIG. 2065: DNA273521, NP_002070.1, 208813_at
FIG. 2066: PRO61502
FIG. 2067A-B: DNA330148, AB020636, 208838_at
FIG. 2068A-B: DNA330149, HSM801778,
208839_s_at
FIG. 2069: PRO82209
FIG. 2070: DNA227874, NP_003320.1, 208864_s_at
FIG. 2071: PRO38337
FIG. 2072: DNA328624, BC003562, 208891_at
FIG. 2073: PRO59076
FIG. 2074: DNA331513, DUSP6, 208892_s_at
FIG. 2075: PRO84404
FIG. 2076: DNA331330, BC005047, 208893_s_at
FIG. 2077: PRO82215
FIG. 2078: DNA329221, NP_061984.1, 208894_at
FIG. 2079: PRO4555
FIG. 2080A-B: DNA329007, NP_003277.1,
208900_s_at
FIG. 2081: PRO37029
FIG. 2082A-B: DNA329007, TOP1, 208901_s_at
FIG. 2083: PRO37029
FIG. 2084: DNA327700, BC015130, 208905_at
FIG. 2085: PRO83683
FIG. 2086: DNA327701, NP_001203.1, 208910_s_at
FIG. 2087: PRO82667
FIG. 2088: DNA281442, NP_149124.1, 208912_s_at
FIG. 2089: PRO66281
FIG. 2090A-B: DNA330151, AB029003, 208914_at
FIG. 2091: DNA325473, NP_006353.2, 208922_s_at
FIG. 2092: PRO81996
FIG. 2093: DNA329552, NP_063948.1, 208925_at
FIG. 2094: PRO85097
FIG. 2095: DNA326233, NP_000968.2, 208929_x_at
FIG. 2096: PRO82645
FIG. 2097: DNA327702, NP_006490.2, 208934_s_at
FIG. 2098: PRO83684
FIG. 2099: DNA330152, NP_001939.1, 208956_x_at
FIG. 2100: PRO85406
FIG. 2101: DNA290261, NP_001291.2, 208960_s_at
FIG. 2102: PRO70387
FIG. 2103A-B: DNA325478, NP_037534.2,
208962_s_at
FIG. 2104: PRO81999
FIG. 2105: DNA327661, IFI16, 208965_s_at
FIG. 2106: PRO83652
FIG. 2107A-B: DNA270277, AF208043,
208966_x_at
FIG. 2108: PRO58665
FIG. 2109: DNA326343, KPNB1, 208974_x_at
FIG. 2110: PRO82739
FIG. 2111A-B: DNA330153, HUMIMP90A,
208975_s_at
FIG. 2112: PRO82739
FIG. 2113: DNA328629, NP_006079.1, 208977_x_at
FIG. 2114: PRO84407
FIG. 2115: DNA330154, HUMPECAM27,
208981_at
FIG. 2116: DNA330155, 7692317.2, 208982_at
FIG. 2117: PRO85407
FIG. 2118: DNA330156, NP_003749.1, 208985_s_at
FIG. 2119: PRO85408
FIG. 2120: DNA331514, STAT3, 208992_s_at
FIG. 2121: PRO86548
FIG. 2122: DNA227552, NP_003346.2, 208997_s_at
FIG. 2123: PRO38015
FIG. 2124: DNA227552, UCP2, 208998_at
FIG. 2125: PRO38015
FIG. 2126: DNA328630, NP_036293.1, 209004_s_at
FIG. 2127: PRO84408
FIG. 2128: DNA331515, FBXL5, 209005_at
FIG. 2129: PRO86549
FIG. 2130: DNA328631, AK027318, 209006_s_at
FIG. 2131: PRO84409
FIG. 2132: DNA331516, DNAJB6, 209015_s_at
FIG. 2133: PRO83680
FIG. 2134: DNA328633, NP_004784.2, 209017_s_at
FIG. 2135: PRO84411
FIG. 2136: DNA330158, NP_057554.4, 209020_at
FIG. 2137: PRO85410
FIG. 2138: DNA327851, NP_006363.2, 209024_s_at
FIG. 2139: PRO83795
FIG. 2140: DNA328635, BC020946, 209026_x_at
FIG. 2141: PRO84413
FIG. 2142: DNA331517, NP_004150.1, 209040_s_at
FIG. 2143: PRO69506
FIG. 2144A-C: DNA328637, HSA7042, 209052_s_at
FIG. 2145: PRO81109
FIG. 2146A-B: DNA331518, AF330040,
209053_s_at
FIG. 2147: PRO86550
FIG. 2148A-B: DNA226405, NCOA3, 209060_x_at
FIG. 2149: PRO36868
FIG. 2150: DNA330159, HSM801885, 209064_x_at
FIG. 2151: PRO85411
FIG. 2152: DNA330160, NP_006285.1, 209066_x_at
FIG. 2153: PRO85412
FIG. 2154: DNA329194, NP_112740.1, 209068_at
FIG. 2155: PRO84814
FIG. 2156A-B: DNA330161, NP_085059.1,
209081_s_at
FIG. 2157: PRO85413
FIG. 2158: DNA330162, NP_057093.1, 209091_s_at
FIG. 2159: PRO85414
FIG. 2160: DNA330163, NP_060308.1, 209104_s_at
FIG. 2161: PRO85415
FIG. 2162: DNA330164, NP_004752.1, 209110_s_at
FIG. 2163: PRO85416
FIG. 2164: DNA327709, NP_000509.1, 209116_x_at
FIG. 2165: PRO83690
FIG. 2166: DNA288254, NP_006000.2, 209118_s_at
FIG. 2167: PRO69536
FIG. 2168: DNA325163, NP_001113.1, 209122_at
FIG. 2169: PRO81730
FIG. 2170: DNA330165, BC015833, 209138_x_at
FIG. 2171: PRO85417
FIG. 2172: DNA327713, BC010653, 209146_at
FIG. 2173: PRO37975
FIG. 2174: DNA325285, AKR1C3, 209160_at
FIG. 2175: PRO81832
FIG. 2176: DNA330166, BC001588, 209161_at
FIG. 2177: PRO85418
FIG. 2178: DNA271722, NP_004688.1, 209162_s_at
FIG. 2179: PRO60006
FIG. 2180: DNA330167, CAB43224.1, 209177_at
FIG. 2181: PRO85419
FIG. 2182A-B: DNA328642, AF073310,
209184_s_at
FIG. 2183: PRO84418
FIG. 2184: DNA331331, AF161416, 209185_s_at
FIG. 2185A-B: DNA328643, HUMHK1A,
209186_at
FIG. 2186: PRO84419
FIG. 2187: DNA189700, NP_005243.1, 209189_at
FIG. 2188: PRO25619
FIG. 2189: DNA324766, NP_005443.2, 209196_at
FIG. 2190: PRO81387
FIG. 2191: DNA226176, NP_003458.1, 209201_x_at
FIG. 2192: PRO36639
FIG. 2193: DNA326267, NP_004861.1, 209208_at
FIG. 2194: PRO82674
FIG. 2195: DNA326891, NP_001748.1, 209213_at
FIG. 2196: PRO83212
FIG. 2197: DNA227483, NP_003120.1, 209218_at
FIG. 2198: PRO37946
FIG. 2199: DNA330168, NP_006322.1, 209233_at
FIG. 2200: PRO85420
FIG. 2201: DNA328649, NP_116093.1, 209251_x_at
FIG. 2202: PRO84424
FIG. 2203: DNA255255, NP_071437.1, 209267_s_at
FIG. 2204: PRO50332
FIG. 2205A-B: DNA188492, AF045451, 209272_at
FIG. 2206: PRO22070
FIG. 2207A-B: DNA226827, NP_001673.1,
209281_s_at
FIG. 2208: PRO37290
FIG. 2209: DNA328601, GADD45B, 209304_x_at
FIG. 2210: PRO84384
FIG. 2211: DNA328651, AF087853, 209305_s_at
FIG. 2212: PRO82889
FIG. 2213: DNA151780, NP_006611.1, 209314_s_at
FIG. 2214: PRO12057
FIG. 2215: DNA330169, NP_006709.1, 209318_x_at
FIG. 2216: PRO62736
FIG. 2217: DNA275106, HSU76248, 209339_at
FIG. 2218: PRO62821
FIG. 2219: DNA269630, NP_003281.1, 209344_at
FIG. 2220: PRO58042
FIG. 2221A-B: DNA328658, AF055376,
209348_s_at
FIG. 2222: PRO84432
FIG. 2223: DNA330170, AF109161, 209357_at
FIG. 2224: PRO84807
FIG. 2225: DNA327720, NP_001970.1, 209368_at
FIG. 2226: PRO83699
FIG. 2227: DNA330171, CAA34971.1, 209374_s_at
FIG. 2228: PRO85421
FIG. 2229: DNA330172, BC009529, 209377_s_at
FIG. 2230: PRO85422
FIG. 2231: DNA330173, HUMAUTOTAX,
209392_at
FIG. 2232: PRO85423
FIG. 2233: DNA330174, AK027512, 209404_s_at
FIG. 2234: PRO85424
FIG. 2235: DNA330175, NP_006836.1, 209408_at
FIG. 2236: PRO59681
FIG. 2237A-B: DNA271241, HSU61500, 209412_at
FIG. 2238: PRO59556
FIG. 2239: DNA330176, AAB61703.1, 209417_s_at
FIG. 2240: PRO85425
FIG. 2241: DNA225767, NP_000534.1, 209420_s_at
FIG. 2242: PRO36230
FIG. 2243: DNA330177, BC001743, 209446_s_at
FIG. 2244: PRO10283
FIG. 2245: DNA273076, HSU59863, 209451_at
FIG. 2246: PRO61137
FIG. 2247: DNA326089, HBA2, 209458_x_at
FIG. 2248: PRO3629
FIG. 2249: DNA287304, AAH00040.1, 209461_x_at
FIG. 2250: PRO69571
FIG. 2251: DNA297388, NP_004208.1, 209464_at
FIG. 2252: PRO70812
FIG. 2253: DNA330178, HSTM2CEA, 209498_at
FIG. 2254: PRO85426
FIG. 2255: DNA330179, NP_067023.1, 209504_s_at
FIG. 2256: PRO85427
FIG. 2257: DNA324899, NP_002938.1, 209507_at
FIG. 2258: PRO81503
FIG. 2259: DNA330180, NP_009149.2, 209510_at
FIG. 2260: PRO85428
FIG. 2261: DNA274027, RAB27A, 209514_s_at
FIG. 2262: PRO61971
FIG. 2263: DNA274027, HSU38654, 209515_s_at
FIG. 2264: PRO61971
FIG. 2265: DNA272213, NP_002477.1, 209520_s_at
FIG. 2266: PRO60475
FIG. 2267: DNA330181, HSM802358, 209523_at
FIG. 2268: DNA328663, NP_057157.1, 209524_at
FIG. 2269: PRO36183
FIG. 2270: DNA330182, PLAA, 209533_s_at
FIG. 2271: PRO85430
FIG. 2272: DNA330183, AF181265, 209536_s_at
FIG. 2273: DNA327724, AF323542S7, 209546_s_at
FIG. 2274: DNA257501, NP_115688.1, 209551_at
FIG. 2275: PRO52073
FIG. 2276: DNA330184, BC022475, 209566_at
FIG. 2277: PRO85432
FIG. 2278: DNA290251, NP_055207.1, 209569_x_at
FIG. 2279: PRO70367
FIG. 2280: DNA329202, BC001745, 209570_s_at
FIG. 2281: PRO70367
FIG. 2282: DNA329203, NP_003788.1, 209572_s_at
FIG. 2283: PRO84819
FIG. 2284: DNA304797, NP_005935.3, 209583_s_at
FIG. 2285: PRO71209
FIG. 2286: DNA328666, AF084943, 209585_s_at
FIG. 2287: PRO1917
FIG. 2288: DNA270689, NP_002042.1, 209604_s_at
FIG. 2289: PRO59053
FIG. 2290: DNA271823, NP_004279.2, 209606_at
FIG. 2291: PRO60104
FIG. 2292A-B: DNA328670, BC001618,
209610_s_at
FIG. 2293: PRO70011
FIG. 2294: DNA330185, NP_071415.1, 209624_s_at
FIG. 2295: PRO85433
FIG. 2296: DNA328599, HSNFKBS, 209636_at
FIG. 2297: PRO84382
FIG. 2298: DNA330186, NP_004327.1, 209642_at
FIG. 2299: PRO85434
FIG. 2300A-B: DNA330187, HSM801454,
209649_at
FIG. 2301: PRO85435
FIG. 2302: DNA330188, NP_004356.1, 209662_at
FIG. 2303: PRO85436
FIG. 2304: DNA323856, PAI-RBP1, 209669_s_at
FIG. 2305: PRO80599
FIG. 2306: DNA330189, BC000712, 209680_s_at
FIG. 2307: PRO85437
FIG. 2308: DNA193881, AAF15129.1, 209681_at
FIG. 2309: PRO23299
FIG. 2310A-B: DNA272671, HSU26710, 209682_at
FIG. 2311: PRO60796
FIG. 2312: DNA330125, HUMPKB, 209685_s_at
FIG. 2313: PRO85385
FIG. 2314: DNA331519, HMMR, 209709_s_at
FIG. 2315: PRO86551
FIG. 2316: DNA328264, NP_005183.2, 209714_s_at
FIG. 2317: PRO12087
FIG. 2318: DNA330191, NP_036249.1, 209715_at
FIG. 2319: PRO85439
FIG. 2320A-C: DNA254412, AF008915, 209717_at
FIG. 2321: PRO49522
FIG. 2322A-B: DNA330192, 234780.1, 209733_at
FIG. 2323: PRO85440
FIG. 2324: DNA330193, BC015929, 209750_at
FIG. 2325: DNA330194, HSU09087, 209754_s_at
FIG. 2326: PRO85442
FIG. 2327: DNA275195, NP_001025.1, 209773_s_at
FIG. 2328: PRO62893
FIG. 2329: DNA329205, NP_001343.1, 209782_s_at
FIG. 2330: PRO84821
FIG. 2331: DNA226436, NP_001772.1, 209795_at
FIG. 2332: PRO36899
FIG. 2333: DNA327731, NP_003302.1, 209803_s_at
FIG. 2334: PRO83707
FIG. 2335A-B: DNA271368, HUMKIAAI,
209804_at
FIG. 2336: PRO59668
FIG. 2337: DNA329206, AF151103, 209813_x_at
FIG. 2338: PRO84822
FIG. 2339A-C: DNA331520, 1096711.1, 209815_at
FIG. 2340: PRO86552
FIG. 2341: DNA327732, UMPK, 209825_s_at
FIG. 2342: PRO61801
FIG. 2343: DNA328676, IL16, 209827_s_at
FIG. 2344: PRO84448
FIG. 2345A-B: DNA196499, AB002384, 209829_at
FIG. 2346: PRO24988
FIG. 2347: DNA330197, NP_112190.1, 209832_s_at
FIG. 2348: PRO85445
FIG. 2349: DNA328677, AF060511, 209836_x_at
FIG. 2350: PRO84449
FIG. 2351: DNA270180, NP_478123.1, 209849_s_at
FIG. 2352: PRO58569
FIG. 2353: DNA331521, BC018951, 209868_s_at
FIG. 2354: PRO58719
FIG. 2355A-B: DNA329536, NP_005494.2,
209870_s_at
FIG. 2356: PRO22775
FIG. 2357: DNA330198, AB014719, 209871_s_at
FIG. 2358: PRO85446
FIG. 2359: DNA324184, NP_065726.1, 209891_at
FIG. 2360: PRO80882
FIG. 2361: DNA328258, HSM802616, 209900_s_at
FIG. 2362: PRO84151
FIG. 2363: DNA330152, DUT, 209932_s_at
FIG. 2364: PRO85406
FIG. 2365: DNA150133, AAD01646.1, 209933_s_at
FIG. 2366: PRO12219
FIG. 2367: DNA329208, CFLAR, 209939_x_at
FIG. 2368: PRO84823
FIG. 2369: DNA330199, BC004357, 209944_at
FIG. 2370: PRO85447
FIG. 2371A-B: DNA329065, HSU12767, 209959_at
FIG. 2372: PRO84725
FIG. 2373: DNA154921, DNA154921, 209967_s_at
FIG. 2374: DNA327736, BC002704, 209969_s_at
FIG. 2375: PRO83711
FIG. 2376: DNA324895, JTV1, 209971_x_at
FIG. 2377: PRO81501
FIG. 2378: DNA226658, NP_003736.1, 209999_x_at
FIG. 2379: PRO37121
FIG. 2380: DNA226658, SSI-1, 210001_s_at
FIG. 2381: PRO37121
FIG. 2382: DNA330200, NP_056222.1, 210006_at
FIG. 2383: PRO85448
FIG. 2384: DNA269534, NP_002155.1, 210029_at
FIG. 2385: PRO57950
FIG. 2386: DNA326054, NP_002159.1, 210046_s_at
FIG. 2387: PRO82489
FIG. 2388: DNA326809, NP_036244.2, 210052_s_at
FIG. 2389: PRO83142
FIG. 2390: DNA150551, AAB97010.1, 210054_at
FIG. 2391: PRO12778
FIG. 2392: DNA274960, SFRS5, 210077_s_at
FIG. 2393: PRO62694
FIG. 2394: DNA324922, BC018962, 210095_s_at
FIG. 2395: PRO119
FIG. 2396A-B: DNA328685, NP_127497.1,
210113_s_at
FIG. 2397: PRO34751
FIG. 2398: DNA330201, NP_003774.1, 210121_at
FIG. 2399: PRO50625
FIG. 2400: DNA330202, NP_005400.1, 210163_at
FIG. 2401: PRO19838
FIG. 2402: DNA287620, NP_004122.1, 210164_at
FIG. 2403: PRO2081
FIG. 2404: DNA270196, HUMZFM1B, 210172_at
FIG. 2405: PRO58584
FIG. 2406: DNA330203, NP_003755.1, 210190_at
FIG. 2407: PRO85449
FIG. 2408: DNA331335, AF070576, 210201_x_at
FIG. 2409: DNA331522, AF068918, 210202_s_at
FIG. 2410: PRO86553
FIG. 2411: DNA331523, RAD1, 210216_x_at
FIG. 2412: PRO61690
FIG. 2413: DNA328467, AF056322, 210218_s_at
FIG. 2414: PRO84293
FIG. 2415: DNA217253, NP_000749.1, 210229_s_at
FIG. 2416: PRO34295
FIG. 2417: DNA331084, BC008487, 210254_at
FIG. 2418: PRO81984
FIG. 2419A-B: DNA270015, NP_003444.1,
210281_s_at
FIG. 2420: PRO58410
FIG. 2421: DNA330206, NP_005801.2, 210288_at
FIG. 2422: PRO85450
FIG. 2423: DNA329945, SEC23B, 210293_s_at
FIG. 2424: PRO85252
FIG. 2425: DNA218653, NP_003799.1, 210314_x_at
FIG. 2426: PRO34449
FIG. 2427: DNA326239, NP_006752.1, 210317_s_at
FIG. 2428: PRO39530
FIG. 2429: DNA329213, NP_219491.1, 210321_at
FIG. 2430: PRO2313
FIG. 2431A-B: DNA329214, NP_001087.1,
210337_s_at
FIG. 2432: PRO84826
FIG. 2433: DNA225528, NP_000610.1, 210354_at
FIG. 2434: PRO35991
FIG. 2435: DNA196621, HUMLY9, 210370_s_at
FIG. 2436: DNA330207, BC001131, 210387_at
FIG. 2437: PRO85451
FIG. 2438: DNA226229, NP_002432.1, 210410_s_at
FIG. 2439: PRO36692
FIG. 2440A-B: DNA330208, AF164622,
210425_x_at
FIG. 2441: PRO85452
FIG. 2442: DNA329215, NP_036224.1, 210439_at
FIG. 2443: PRO7424
FIG. 2444: DNA226394, NP_002552.1, 210448_s_at
FIG. 2445: PRO36857
FIG. 2446: DNA331524, BC003388, 210458_s_at
FIG. 2447: PRO86554
FIG. 2448: DNA331525, BC002448, 210461_s_at
FIG. 2449: PRO86555
FIG. 2450: DNA329216, AF022375, 210512_s_at
FIG. 2451: PRO84827
FIG. 2452: DNA227633, NP_001156.1, 210538_s_at
FIG. 2453: PRO38096
FIG. 2454: DNA330209, BC000585, 210542_s_at
FIG. 2455: PRO85453
FIG. 2456: DNA331526, BC014563, 210559_s_at
FIG. 2457: PRO58324
FIG. 2458: DNA331527, BC001602, 210563_x_at
FIG. 2459: PRO86556
FIG. 2460: DNA331528, AF00619, 210564_x_at
FIG. 2461: PRO86557
FIG. 2462: DNA329217, BC003406, 210571_s_at
FIG. 2463: PRO84828
FIG. 2464: DNA330210, HSU03858, 210607_at
FIG. 2465: PRO126
FIG. 2466: DNA330211, NP_009092.1, 210629_x_at
FIG. 2467: PRO85454
FIG. 2468: DNA330212, HUMKRT10A,
210633_x_at
FIG. 2469: PRO85455
FIG. 2470: DNA331529, LAIR1, 210644_s_at
FIG. 2471: PRO86558
FIG. 2472A-C: DNA330214, HUMTPRD,
210645_s_at
FIG. 2473: PRO12135
FIG. 2474: DNA329218, NP_055227.1, 210691_s_at
FIG. 2475: PRO84829
FIG. 2476: DNA330215, DKFZp762A227Homo,
210692_s_at
FIG. 2477: DNA331530, AF064103, 210742_at
FIG. 2478: PRO86559
FIG. 2479: DNA237817, NP_001307.1, 210766_s_at
FIG. 2480: PRO38923
FIG. 2481A-B: DNA330216, NP_006445.1,
210778_s_at
FIG. 2482: PRO85457
FIG. 2483: DNA226881, FLI1, 210786_s_at
FIG. 2484: PRO37344
FIG. 2485: DNA255402, NP_055288.1, 210802_s_at
FIG. 2486: PRO50469
FIG. 2487: DNA330027, SSBP2, 210829_s_at
FIG. 2488: PRO85312
FIG. 2489: DNA329219, BC000385, 210844_x_at
FIG. 2490: PRO81278
FIG. 2491A-B: DNA331107, HSU26455,
210858_x_at
FIG. 2492: PRO86255
FIG. 2493: DNA188234, NP_000630.1, 210865_at
FIG. 2494: PRO21942
FIG. 2495: DNA331531, PFDN5, 210908_s_at
FIG. 2496: PRO86560
FIG. 2497: DNA330217, AF043183, 210915_x_at
FIG. 2498: PRO85458
FIG. 2499: DNA274326, NP_003079.1, 210933_s_at
FIG. 2500: PRO62244
FIG. 2501: DNA329317, NP_057353.1, 210948_s_at
FIG. 2502: PRO81157
FIG. 2503: DNA331532, AF125393, 210951_x_at
FIG. 2504: PRO86561
FIG. 2505: DNA330218, HUMTCAXA,
210972_x_at
FIG. 2506: DNA273236, NP_004306.1, 210980_s_at
FIG. 2507: PRO61263
FIG. 2508: DNA269888, NP_002073.1, 210981_s_at
FIG. 2509: PRO58286
FIG. 2510: DNA329221, HLA-DRA, 210982_s_at
FIG. 2511: PRO4555
FIG. 2512: DNA238565, MCM7, 210983_s_at
FIG. 2513: PRO39210
FIG. 2514: DNA326239, YWHAE, 210996_s_at
FIG. 2515: PRO39530
FIG. 2516A-B: DNA330219, NP_150241.1,
211013_x_at
FIG. 2517: PRO85459
FIG. 2518: DNA327699, AB023420, 211015_s_at
FIG. 2519: PRO83682
FIG. 2520: DNA288254, TUBA3, 211058_x_at
FIG. 2521: PRO69536
FIG. 2522: DNA329992, MGAT2, 211061_s_at
FIG. 2523: PRO59267
FIG. 2524: DNA324171, NP_065438.1, 211070_x_at
FIG. 2525: PRO60753
FIG. 2526: DNA330220, NP_006809.1, 211071_s_at
FIG. 2527: PRO60769
FIG. 2528: DNA287198, K-ALPHA-1, 211072_x_at
FIG. 2529: PRO69484
FIG. 2530: DNA254470, NEK2, 211080_s_at
FIG. 2531: PRO49578
FIG. 2532: DNA196432, AF064804, 211106_at
FIG. 2533: PRO24928
FIG. 2534: DNA330202, CXCL11, 211122_s_at
FIG. 2535: PRO19838
FIG. 2536: DNA304765, HUMTCRGAD,
211144_x_at
FIG. 2537: PRO71178
FIG. 2538: DNA327752, HSDHACTYL,
211150_s_at
FIG. 2539A-B: DNA328700, SCD, 211162_x_at
FIG. 2540: PRO84464
FIG. 2541: DNA330221, NP_056071.1, 211207_s_at
FIG. 2542: PRO85460
FIG. 2543: DNA330222, NP_003848.1, 211226_at
FIG. 2544: PRO45958
FIG. 2545: DNA218278, IL2RA, 211269_s_at
FIG. 2546: PRO34330
FIG. 2547: DNA151022, DGKA, 211272_s_at
FIG. 2548: PRO12096
FIG. 2549: DNA330223, NP_001790.1, 211297_s_at
FIG. 2550: PRO49730
FIG. 2551A-C: DNA328811, ITPR1, 211323_s_at
FIG. 2552: PRO84551
FIG. 2553: DNA188234, TNFSF6, 211333_s_at
FIG. 2554: PRO21942
FIG. 2555: DNA103395, HSU80737, 211352_s_at
FIG. 2556: PRO4723
FIG. 2557A-B: DNA275066, NP_000170.1,
211450_s_at
FIG. 2558: PRO62786
FIG. 2559: DNA327755, NP_115957.1, 211458_s_at
FIG. 2560: PRO83725
FIG. 2561: DNA93439, CXCR6, 211469_s_at
FIG. 2562: PRO4515
FIG. 2563: DNA330175, KNSL6, 211519_s_at
FIG. 2564: PRO59681
FIG. 2565: DNA327756, NP_068814.2, 211538_s_at
FIG. 2566: PRO83726
FIG. 2567: DNA269888, GPRK6, 211543_s_at
FIG. 2568: PRO58286
FIG. 2569: DNA226255, NP_003047.1, 211576_s_at
FIG. 2570: PRO36718
FIG. 2571: DNA330211, LST1, 211581_x_at
FIG. 2572: PRO85454
FIG. 2573: DNA330224, HUMNCA, 211657_at
FIG. 2574: PRO85461
FIG. 2575: DNA327709, HBB, 211696_x_at
FIG. 2576: PRO83690
FIG. 2577: DNA331533, PPARG, 211699_x_at
FIG. 2578: PRO86562
FIG. 2579: DNA331534, AF116616, 211708_s_at
FIG. 2580: DNA226342, PTEN, 211711_s_at
FIG. 2581: PRO36805
FIG. 2582: DNA328706, BC021909, 211714_x_at
FIG. 2583: PRO10347
FIG. 2584: DNA88307, NP_001992.1, 211734_s_at
FIG. 2585: PRO2280
FIG. 2586: DNA329225, EVI2B, 211742_s_at
FIG. 2587: PRO84833
FIG. 2588: DNA331535, AF105974, 211745_x_at
FIG. 2589: PRO3629
FIG. 2590: DNA328649, TUBA6, 211750_x_at
FIG. 2591: PRO84424
FIG. 2592: DNA254725, KPNA2, 211762_s_at
FIG. 2593: PRO49824
FIG. 2594: DNA330225, NP_115712.1, 211767_at
FIG. 2595: PRO85462
FIG. 2596A-B: DNA329226, BC006181,
211784_s_at
FIG. 2597: PRO60388
FIG. 2598: DNA304473, BC006196, 211786_at
FIG. 2599: PRO2023
FIG. 2600: DNA330226, AF198052, 211794_at
FIG. 2601: PRO85463
FIG. 2602: DNA227173, FYB, 211795_s_at
FIG. 2603: PRO37636
FIG. 2604: DNA331536, AAA60662.1, 211796_s_at
FIG. 2605: PRO86563
FIG. 2606: DNA331537, CCNE2, 211814_s_at
FIG. 2607: PRO59418
FIG. 2608A-B: DNA331342, DEFCAP, 211822_s_at
FIG. 2609: PRO86422
FIG. 2610: DNA331343, AK026398, 211824_x_at
FIG. 2611: PRO86423
FIG. 2612: DNA331538, AF327066, 211825_s_at
FIG. 2613: PRO86564
FIG. 2614A-B: DNA331539, BRCA1, 211851_x_at
FIG. 2615: PRO86565
FIG. 2616A-B: DNA188192, CD28, 211856_x_at
FIG. 2617: PRO21704
FIG. 2618: DNA331540, AF222343, 211861_x_at
FIG. 2619: PRO86566
FIG. 2620: DNA330228, HUMTCRAZ, 211902_x_at
FIG. 2621: PRO85465
FIG. 2622: DNA226176, CXCR4, 211919_s_at
FIG. 2623: PRO36639
FIG. 2624: DNA272286, CAT, 211922_s_at
FIG. 2625: PRO60544
FIG. 2626: DNA330229, BC011915, 211926_s_at
FIG. 2627: PRO85466
FIG. 2628: DNA226254, NP_001408.1, 211937_at
FIG. 2629: PRO36717
FIG. 2630: DNA330230, NP_060977.1, 211938_at
FIG. 2631: PRO85467
FIG. 2632A-B: DNA325306, ITGB1, 211945_s_at
FIG. 2633: PRO81851
FIG. 2634A-B: DNA272195, HUMORFGA,
211951_at
FIG. 2635: DNA328437, NP_005792.1, 211956_s_at
FIG. 2636: PRO84271
FIG. 2637: DNA325941, NP_005339.1, 211969_at
FIG. 2638: PRO82388
FIG. 2639: DNA287194, AAA60258.1, 211974_x_at
FIG. 2640: PRO69480
FIG. 2641A-C: DNA331541, 1390535.1, 211986_at
FIG. 2642: PRO86567
FIG. 2643: DNA330232, NP_291032.1, 211991_s_at
FIG. 2644: PRO85469
FIG. 2645: DNA330233, AF218029, 211999_at
FIG. 2646: PRO11403
FIG. 2647: DNA287433, NP_006810.1, 212009_s_at
FIG. 2648: PRO69690
FIG. 2649A-D: DNA103461, MKI67, 212020_s_at
FIG. 2650: PRO4788
FIG. 2651A-D: DNA226463, HSMKI67A,
212021_s_at
FIG. 2652: PRO36926
FIG. 2653A-D: DNA103461, HSMKI67,
212022_s_at
FIG. 2654: PRO4788
FIG. 2655A-D: DNA226463, DNA226463,
212023_s_at
FIG. 2656: PRO36926
FIG. 2657: DNA275447, HSMEMA, 212037_at
FIG. 2658: PRO63095
FIG. 2659: DNA103380, NP_003365.1, 212038_s_at
FIG. 2660: PRO4710
FIG. 2661A-B: DNA330234, 215138.24, 212045_at
FIG. 2662: PRO85470
FIG. 2663: DNA328709, BC004151, 212048_s_at
FIG. 2664: PRO37676
FIG. 2665A-B: DNA330235, BAA20790.1,
212061_at
FIG. 2666: PRO85471
FIG. 2667: DNA330236, 228447.20, 212071_s_at
FIG. 2668: PRO85472
FIG. 2669: DNA154139, DNA154139, 212099_at
FIG. 2670A-B: DNA331542, BAA74910.1,
212108_at
FIG. 2671: PRO86568
FIG. 2672A-B: DNA150956, BAA06685.1,
212110_at
FIG. 2673: PRO12560
FIG. 2674: DNA328711, AK023154, 212115_at
FIG. 2675: PRO84468
FIG. 2676: DNA219225, NP_002874.1, 212125_at
FIG. 2677: PRO34531
FIG. 2678: DNA330238, BC019676, 212127_at
FIG. 2679: DNA328713, AF100737, 212130_x_at
FIG. 2680: PRO84470
FIG. 2681: DNA330239, AK027643, 212131_at
FIG. 2682: PRO85474
FIG. 2683: DNA330240, CAA52801.1, 212141_at
FIG. 2684: PRO85475
FIG. 2685: DNA330240, HSP1CDC21, 212142_at
FIG. 2686A-B: DNA150829, AB014568, 212144_at
FIG. 2687: DNA329602, AK2, 212175_s_at
FIG. 2688: PRO85133
FIG. 2689: DNA330241, AF314185, 212176_at
FIG. 2690: DNA328716, HSM800707, 212179_at
FIG. 2691: DNA330242, BC007034, 212185_x_at
FIG. 2692: PRO85477
FIG. 2693: DNA330243, BC015663, 212190_at
FIG. 2694: PRO2584
FIG. 2695: DNA326233, RPL13, 212191_x_at
FIG. 2696: PRO82645
FIG. 2697A-C: DNA330244, 253946.17, 212196_at
FIG. 2698: PRO85478
FIG. 2699A-B: DNA330245, 230497.7, 212206_s_at
FIG. 2700: PRO85479
FIG. 2701: DNA331543, BC008710, 212227_x_at
FIG. 2702: PRO84271
FIG. 2703: DNA327770, 1384008.4, 212239_at
FIG. 2704: PRO83736
FIG. 2705: DNA151120, DNA151120, 212240_s_at
FIG. 2706: PRO12179
FIG. 2707: DNA330246, AF326773, 212241_at
FIG. 2708A-B: DNA329229, 1345070.7, 212249_at
FIG. 2709: PRO84835
FIG. 2710: DNA329182, BC016852, 212259_s_at
FIG. 2711: PRO84805
FIG. 2712: DNA331544, BC018823, 212266_s_at
FIG. 2713: PRO86569
FIG. 2714: DNA327771, NP_109591.1, 212268_at
FIG. 2715: PRO83737
FIG. 2716: DNA326463, NP_000976.1, 212270_x_at
FIG. 2717: PRO82846
FIG. 2718: DNA150980, HUMMAC30X, 212279_at
FIG. 2719: DNA150980, DNA150980, 212281_s_at
FIG. 2720: PRO12566
FIG. 2721: DNA253017, DNA253017, 212282_at
FIG. 2722: PRO48926
FIG. 2723: DNA328719, BC012895, 212295_s_at
FIG. 2724: PRO84475
FIG. 2725: DNA271103, NP_005796.1, 212296_at
FIG. 2726: PRO59425
FIG. 2727: DNA207620, DNA207620, 212300_at
FIG. 2728: DNA330247, BC019110, 212313_at
FIG. 2729: PRO85481
FIG. 2730: DNA330248, BC019924, 212320_at
FIG. 2731: PRO10347
FIG. 2732A-B: DNA124122, HSP130K, 212331_at
FIG. 2733: PRO6323
FIG. 2734A-B: DNA124122, NP_005602.2,
212332_at
FIG. 2735: PRO6323
FIG. 2736: DNA287190, CAB43217.1, 212333_at
FIG. 2737: PRO69476
FIG. 2738A-B: DNA330216, MAD4, 212347_x_at
FIG. 2739: PRO85457
FIG. 2740A-B: DNA327773, BAA25456.1,
212366_at
FIG. 2741: PRO83739
FIG. 2742A-C: DNA330249, AAA99177.1,
212372_at
FIG. 2743: PRO85482
FIG. 2744: DNA329231, NP_000810.1, 212378_at
FIG. 2745: PRO84837
FIG. 2746: DNA329231, GART, 212379_at
FIG. 2747: PRO84837
FIG. 2748A-B: DNA150950, HUMKIAAH,
21239_s_at
FIG. 2749A-B: DNA328549, NP_002897.1,
212397_at
FIG. 2750: PRO84350
FIG. 2751A-B: DNA328549, RDX, 212398_at
FIG. 2752: PRO84350
FIG. 2753: DNA151330, DNA151330, 212400_at
FIG. 2754: PRO11708
FIG. 2755A-B: DNA330250, NP_060727.1,
212406_s_at
FIG. 2756: PRO85483
FIG. 2757: DNA254828, AK023204, 212408_at
FIG. 2758: PRO49923
FIG. 2759: DNA330251, NP_059965.1, 212430_at
FIG. 2760: PRO85484
FIG. 2761: DNA327774, BC016808, 212460_at
FIG. 2762: PRO83740
FIG. 2763A-B: DNA330252, NP_055447.1,
212473_s_at
FIG. 2764: PRO85485
FIG. 2765: DNA269630, TPM4, 212481_s_at
FIG. 2766: PRO58042
FIG. 2767: DNA330253, BC007665, 212493_s_at
FIG. 2768: PRO85486
FIG. 2769: DNA330254, AK024029, 212508_at
FIG. 2770: PRO85487
FIG. 2771A-B: DNA254192, BAA07648.1,
212510_at
FIG. 2772: PRO49304
FIG. 2773: DNA329233, 383512.16, 212527_at
FIG. 2774: PRO84839
FIG. 2775: DNA226041, NP_005555.1, 212531_at
FIG. 2776: PRO36504
FIG. 2777: DNA269882, HSWEE1HU, 212533_at
FIG. 2778: PRO58280
FIG. 2779A-D: DNA328737, 148650.1, 212560_at
FIG. 2780: PRO84490
FIG. 2781A-B: DNA330255, AK025499, 212561_at
FIG. 2782: PRO85488
FIG. 2783: DNA225632, NP_002037.2, 212581_x_at
FIG. 2784: PRO36095
FIG. 2785A-C: DNA329236, AF392452, 212582_at
FIG. 2786: PRO84841
FIG. 2787A-B: DNA331545, AB040884, 212585_at
FIG. 2788: DNA275100, DNA275100, 212589_at
FIG. 2789: DNA330256, BC020889, 212592_at
FIG. 2790: PRO81145
FIG. 2791: DNA330257, 441179.4, 212605_s_at
FIG. 2792: PRO85489
FIG. 2793A-B: DNA330258, BAA22955.2,
212619_at
FIG. 2794: PRO85490
FIG. 2795A-B: DNA330258, AB006624, 212621_at
FIG. 2796: DNA330259, NP_008944.1, 212638_s_at
FIG. 2797: PRO49366
FIG. 2798: DNA331357, BC010494, 212639_x_at
FIG. 2799: PRO38556
FIG. 2800A-D: DNA327777, HSIL1RECA,
212657_s_at
FIG. 2801A-B: DNA327778, AB011154,
21267_s_at
FIG. 2802: DNA273465, DNA273465, 212677_s_at
FIG. 2803: DNA328744, AF318364, 212680_x_at
FIG. 2804: PRO84496
FIG. 2805A-B: DNA329901, AB007915, 212683_at
FIG. 2806A-B: DNA269508, AB011110, 212706_at
FIG. 2807A-B: DNA331546, 332730.12, 212714_at
FIG. 2808: PRO86570
FIG. 2809: DNA331547, BC010994, 212734_x_at
FIG. 2810: PRO82645
FIG. 2811: DNA329906, BC007848, 212738_at
FIG. 2812: PRO85223
FIG. 2813: DNA330261, NP_110383.1, 212762_s_at
FIG. 2814: PRO85492
FIG. 2815: DNA330262, NP_006409.2, 212768_s_at
FIG. 2816: PRO85493
FIG. 2817A-B: DNA254149, BAA06224.1,
212789_at
FIG. 2818: PRO49264
FIG. 2819: DNA331548, BC017356, 212827_at
FIG. 2820: PRO86571
FIG. 2821A-B: DNA150452, BAA32470.1,
212830_at
FIG. 2822: PRO12260
FIG. 2823A-B: DNA331549, BAA07892.2,
212832_s_at
FIG. 2824: PRO86572
FIG. 2825: DNA271714, BAA05039.1, 212836_at
FIG. 2826: PRO59998
FIG. 2827: DNA331550, AAA59587.1, 212859_x_at
FIG. 2828: PRO6386
FIG. 2829A-B: DNA328753, BAA13212.1,
212873_at
FIG. 2830: PRO84502
FIG. 2831: DNA330265, NP_056436.1, 212886_at
FIG. 2832: PRO85495
FIG. 2833A-B: DNA271215, BAA24380.1,
212892_at
FIG. 2834: PRO59530
FIG. 2835A-B: DNA330266, CAA10334.1,
212902_at
FIG. 2836: PRO85496
FIG. 2837A-B: DNA271137, AB014589, 212905_at
FIG. 2838: DNA271630, DNA271630, 212907_at
FIG. 2839: DNA330267, 235076.14, 212914_at
FIG. 2840: PRO85497
FIG. 2841: DNA330268, BC009116, 212928_at
FIG. 2842: PRO85498
FIG. 2843: DNA331551, BC013078, 212933_x_at
FIG. 2844: PRO82645
FIG. 2845A-B: DNA330269, BC020584, 212936_at
FIG. 2846: PRO23868
FIG. 2847: DNA330270, HUMORF007, 212949_at
FIG. 2848A-B: DNA331552, PAM, 212958_x_at
FIG. 2849: PRO86573
FIG. 2850: DNA273283, HUMCYSTRNA,
212971_at
FIG. 2851: DNA330271, 399773.20, 212980_at
FIG. 2852: PRO85500
FIG. 2853: DNA330272, AF119896, 212981_s_at
FIG. 2854: DNA330273, AK027564, 213007_at
FIG. 2855: PRO85502
FIG. 2856: DNA254940, BAA91770.1, 213008_at
FIG. 2857: PRO50030
FIG. 2858: DNA325596, TPI1, 213011_s_at
FIG. 2859: PRO69549
FIG. 2860: DNA331553, 228519.3, 213021_at
FIG. 2861: PRO86574
FIG. 2862A-B: DNA253815, BAA20833.2,
213035_at
FIG. 2863: PRO49218
FIG. 2864A-B: DNA329240, NP_056133.1,
213039_at
FIG. 2865: PRO84845
FIG. 2866A-B: DNA330275, BAA25487.1,
213045_at
FIG. 2867: PRO85504
FIG. 2868A-B: DNA329242, BAA76857.1,
213056_at
FIG. 2869: PRO84847
FIG. 2870: DNA323869, NP_000960.2, 213080_x_at
FIG. 2871: PRO80612
FIG. 2872: DNA270466, HUMG6PD, 213093_at
FIG. 2873: DNA330276, NP_001614.3, 213095_x_at
FIG. 2874: PRO85505
FIG. 2875: DNA331554, AF118070, 213113_s_at
FIG. 2876: PRO86575
FIG. 2877: DNA287230, AAA36325.1, 213138_at
FIG. 2878: PRO69509
FIG. 2879: DNA330277, CAB45152.1, 213142_x_at
FIG. 2880: PRO85506
FIG. 2881: DNA228053, DNA228053, 213156_at
FIG. 2882: DNA151370, DNA151370, 213158_at
FIG. 2883: PRO11747
FIG. 2884: DNA106374, DNA106374, 213164_at
FIG. 2885A-B: DNA330278, BAA13216.1,
213174_at
FIG. 2886: PRO85507
FIG. 2887: DNA330279, AF043182, 213193_x_at
FIG. 2888: PRO85508
FIG. 2889: DNA227909, NP_005024.1, 213226_at
FIG. 2890: PRO38372
FIG. 2891A-B: DNA330280, BAA83045.2,
213254_at
FIG. 2892: PRO85509
FIG. 2893A-B: DNA328761, BAA82991.1,
213280_at
FIG. 2894: PRO84509
FIG. 2895: DNA331555, BC009874, 213281_at
FIG. 2896A-B: DNA274945, HSACKI10,
213287_s_at
FIG. 2897: DNA260974, NP_006065.1, 213293_s_at
FIG. 2898: PRO54720
FIG. 2899: DNA328357, 1452321.2, 213295_at
FIG. 2900: PRO84217
FIG. 2901A-B: DNA329248, BAA20816.1,
213302_at
FIG. 2902: PRO84850
FIG. 2903A-B: DNA255273, BAA83044.1,
213309_at
FIG. 2904: PRO50349
FIG. 2905: DNA155418, DNA155418, 213326_at
FIG. 2906A-B: DNA331355, AAG24545.1,
213330_s_at
FIG. 2907: PRO86431
FIG. 2908A-B: DNA330281, AB058688, 213341_at
FIG. 2909: DNA327789, 1449824.5, 213348_at
FIG. 2910: PRO83753
FIG. 2911: DNA287176, AB025254, 213361_at
FIG. 2912: DNA327790, 1448999.3, 213364_s_at
FIG. 2913: PRO83754
FIG. 2914A-B: DNA330282, 217860.13, 213376_at
FIG. 2915: PRO85510
FIG. 2916: DNA330283, BC020225, 213408_s_at
FIG. 2917: PRO85511
FIG. 2918: DNA330284, 235806.16, 213434_at
FIG. 2919: PRO85512
FIG. 2920: DNA225632, GAPD, 213453_x_at
FIG. 2921: PRO36095
FIG. 2922A-B: DNA330285, 241020.1, 213469_at
FIG. 2923: PRO85513
FIG. 2924: DNA328766, NP_006077.1, 213476_x_at
FIG. 2925: PRO84514
FIG. 2926: DNA330286, BC018130, 213506_at
FIG. 2927: PRO85514
FIG. 2928: DNA326639, NP_001229.1, 213523_at
FIG. 2929: PRO82992
FIG. 2930A-C: DNA330287, AF380180, 213538_at
FIG. 2931: PRO85515
FIG. 2932: DNA227483, SQLE, 213562_s_at
FIG. 2933: PRO37946
FIG. 2934: DNA330288, NP_005606.1, 213566_at
FIG. 2935: PRO2869
FIG. 2936: DNA330289, 197444.1, 213567_at
FIG. 2937: PRO85516
FIG. 2938: DNA159560, DNA159560, 213577_at
FIG. 2939: DNA330290, 1398807.8, 213581_at
FIG. 2940: PRO85517
FIG. 2941: DNA327799, HSRP26AA, 213587_s_at
FIG. 2942: PRO40011
FIG. 2943: DNA273753, AAC39561.1, 213599_at
FIG. 2944: PRO61716
FIG. 2945: DNA330291, 1500175.9, 213616_at
FIG. 2946: PRO85518
FIG. 2947A-C: DNA330292, NP_056045.2,
213618_at
FIG. 2948: PRO85519
FIG. 2949: DNA225974, ICAM2, 213620_s_at
FIG. 2950: PRO36437
FIG. 2951: DNA331556, BC009513, 213646_x_at
FIG. 2952: PRO38556
FIG. 2953A-B: DNA273985, BAA07647.1,
213647_at
FIG. 2954: PRO61932
FIG. 2955: DNA270758, HSU54778, 213655_at
FIG. 2956: PRO59117
FIG. 2957: DNA330293, BC011922, 213666_at
FIG. 2958: PRO85520
FIG. 2959: DNA325704, MARS, 213671_s_at
FIG. 2960: PRO82188
FIG. 2961: DNA304796, NP_443109.1, 213696_s_at
FIG. 2962: PRO71208
FIG. 2963: DNA273236, ASAH1, 213702_x_at
FIG. 2964: PRO61263
FIG. 2965: DNA255913, DNA255913, 213725_x_at
FIG. 2966: DNA328629, TUBB2, 213726_x_at
FIG. 2967: PRO84407
FIG. 2968: DNA328771, HSMYOSIE, 213733_at
FIG. 2969A-C: DNA151167, FLNA, 213746_s_at
FIG. 2970: PRO12867
FIG. 2971: DNA326273, BC001832, 213757_at
FIG. 2972: PRO82678
FIG. 2973A-B: DNA274483, NP_000126.1,
213778_x_at
FIG. 2974: PRO62385
FIG. 2975: DNA328774, NP_004263.1, 213793_s_at
FIG. 2976: PRO60536
FIG. 2977: DNA327804, AF442151, 213797_at
FIG. 2978: PRO69493
FIG. 2979A-B: DNA329967, SMARCA5,
213859_x_at
FIG. 2980: PRO85270
FIG. 2981: DNA151041, HSAMYB2, 213906_at
FIG. 2982: DNA330294, 426625.1, 213908_at
FIG. 2983: PRO85521
FIG. 2984: DNA330295, NP_037515.1, 213951_s_at
FIG. 2985: PRO85522
FIG. 2986: DNA327807, NP_115613.1, 213975_s_at
FIG. 2987: PRO83768
FIG. 2988: DNA327808, NP_002961.1, 213988_s_at
FIG. 2989: PRO83769
FIG. 2990: DNA329136, HSPC111, 214011_s_at
FIG. 2991: PRO84772
FIG. 2992: DNA196110, DNA196110, 214016_s_at
FIG. 2993: PRO24635
FIG. 2994: DNA227224, LC27, 214039_s_at
FIG. 2995: PRO37687
FIG. 2996: DNA330296, 206955.3, 214054_at
FIG. 2997: PRO85523
FIG. 2998: DNA273696, DNA273696, 214060_at
FIG. 2999A-B: DNA330297, AF378753, 214081_at
FIG. 3000: PRO85524
FIG. 3001: DNA227091, NP_000256.1, 214084_x_at
FIG. 3002: PRO37554
FIG. 3003: DNA331557, BC016778, 214085_x_at
FIG. 3004: PRO86576
FIG. 3005: DNA254686, NP_005475.1, 214086_s_t
FIG. 3006: PRO49786
FIG. 3007: DNA330298, BC011911, 214095_at
FIG. 3008: PRO83772
FIG. 3009: DNA329254, BC004215, 214096_s_at
FIG. 3010: PRO84854
FIG. 3011: DNA330299, AK023737, 214102_at
FIG. 3012: PRO85525
FIG. 3013: DNA331360, AK022497, 214177_s_at
FIG. 3014: PRO86435
FIG. 3015A-B: DNA269826, NP_003195.1,
214179_s_at
FIG. 3016: PRO58228
FIG. 3017: DNA331558, AF000424, 214181_x_at
FIG. 3018: PRO86577
FIG. 3019: DNA290295, NP_055203.1, 214193_s_at
FIG. 3020: PRO70455
FIG. 3021: DNA327701, C1QBP, 214214_s_at
FIG. 3022: PRO82667
FIG. 3023: DNA331361, NP_003318.1, 214228_x_at
FIG. 3024: PRO2398
FIG. 3025: DNA154914, DNA154914, 214230_at
FIG. 3026: DNA330300, NP_004883.1, 214257_s_at
FIG. 3027: PRO41086
FIG. 3028: DNA273940, DNA273940, 214272_at
FIG. 3029: DNA97279, JUND, 214326_x_at
FIG. 3030: PRO3628
FIG. 3031: DNA84130, HSU37518, 214329_x_at
FIG. 3032: PRO1096
FIG. 3033: DNA272928, DAZAP2, 214334_x_at
FIG. 3034: PRO61012
FIG. 3035: DNA331362, AF275719, 214359_s_at
FIG. 3036: PRO86436
FIG. 3037: DNA331559, AF043723, 214368_at
FIG. 3038: PRO85114
FIG. 3039: DNA328611, AF043722, 214369_s_at
FIG. 3040: PRO84393
FIG. 3041: DNA273138, NP_005495.1, 214390_s_at
FIG. 3042: PRO61182
FIG. 3043: DNA273174, NP_001951.1, 214394_x_at
FIG. 3044: PRO61211
FIG. 3045: DNA328782, 337794.1, 214405_at
FIG. 3046: PRO84528
FIG. 3047: DNA326090, NP_000549.1, 214414_x_at
FIG. 3048: PRO3629
FIG. 3049: DNA271374, CHAF1A, 214426_x_at
FIG. 3050: PRO59673
FIG. 3051: DNA287630, NP_000160.1, 214430_at
FIG. 3052: PRO2154
FIG. 3053: DNA327811, SHMT2, 214437_s_at
FIG. 3054: PRO83772
FIG. 3055: DNA331363, AF001383, 214439_x_at
FIG. 3056: PRO86437
FIG. 3057: DNA331560, NP_001326.1, 214450_at
FIG. 3058: PRO85081
FIG. 3059: DNA273138, BCAT1, 214452_at
FIG. 3060: PRO61182
FIG. 3061: DNA327812, NP_006408.2, 214453_s_at
FIG. 3062: PRO83773
FIG. 3063: DNA150971, NP_002249.1, 214470_at
FIG. 3064: PRO12564
FIG. 3065: DNA330301, NP_008908.1, 214482_at
FIG. 3066: PRO85526
FIG. 3067: DNA325246, RRP4, 214507_s_at
FIG. 3068: PRO81800
FIG. 3069: DNA331561, CREM, 214508_x_at
FIG. 3070: PRO86578
FIG. 3071: DNA331562, NP_003090.1, 214531_s_at
FIG. 3072: PRO58654
FIG. 3073: DNA216515, NP_003166.1, 214567_s_at
FIG. 3074: PRO34267
FIG. 3075: DNA331223, HUMPRF1M, 214617_at
FIG. 3076: DNA331563, BC004101, 214643_x_at
FIG. 3077: PRO86579
FIG. 3078: DNA150552, AAB97011.1, 214661_s_at
FIG. 3079: PRO12326
FIG. 3080: DNA330303, BAA05499.1, 214662_at
FIG. 3081: PRO85528
FIG. 3082: DNA330304, HSIGVL026, 214677_x_at
FIG. 3083: PRO85529
FIG. 3084: DNA287355, ALDOA, 214687_x_at
FIG. 3085: PRO69617
FIG. 3086: DNA330305, HSU79263, 214700_x_at
FIG. 3087: DNA288259, NP_114172.1, 214710_s_at
FIG. 3088: PRO4676
FIG. 3089: DNA324984, NP_115540.1, 214714_at
FIG. 3090: PRO81578
FIG. 3091: DNA330306, 407311.1, 214743_at
FIG. 3092: PRO85531
FIG. 3093: DNA331564, BC014654, 214752_x_at
FIG. 3094: PRO86580
FIG. 3095: DNA254338, AAA60119.1, 214765_s_at
FIG. 3096: PRO49449
FIG. 3097: DNA275473, DNA275473, 214787_at
FIG. 3098A-B: DNA272353, AB007958, 214833_at
FIG. 3099: DNA226577, C6orf9, 214847_s_at
FIG. 3100: PRO37040
FIG. 3101A-B: DNA331565, BAA34472.1,
214945_at
FIG. 3102: PRO86581
FIG. 3103: DNA328530, LAK-4P, 214958_s_at
FIG. 3104: PRO24118
FIG. 3105A-B: DNA271654, AB020704,
214978_s_at
FIG. 3106A-B: DNA329261, HSM802517,
215001_s_at
FIG. 3107: PRO84859
FIG. 3108: DNA330308, 307914.1, 215029_at
FIG. 3109: PRO85533
FIG. 3110: DNA196372, HSBCLXL, 215037_s_at
FIG. 3111: PRO24874
FIG. 3112: DNA331566, AIF1, 215051_x_at
FIG. 3113: PRO86582
FIG. 3114: DNA330309, NP_003503.1, 215071_s_at
FIG. 3115: PRO85534
FIG. 3116A-B: DNA330307, AB018295,
215133_s_at
FIG. 3117: DNA331567, 333089.1, 215147_at
FIG. 3118: PRO86583
FIG. 3119: DNA273371, UMPS, 215165_x_at
FIG. 3120: PRO61373
FIG. 3121A-B: DNA150496, AB023212, 215175_at
FIG. 3122A-B: DNA220748, ITGA6, 215177_s_at
FIG. 3123: PRO34726
FIG. 3124: DNA330311, 405318.1, 215221_at
FIG. 3125: PRO85536
FIG. 3126: DNA227597, NP_000627.1, 215223_s_at
FIG. 3127: PRO38060
FIG. 3128A-B: DNA330312, 406407.1, 215262_at
FIG. 3129: PRO85537
FIG. 3130: DNA331568, TADA3L, 215273_s_at
FIG. 3131: PRO80953
FIG. 3132: DNA330314, 026641.5, 215275_at
FIG. 3133: PRO85538
FIG. 3134: DNA330315, 1500205.1, 215283_at
FIG. 3135: PRO85539
FIG. 3136: DNA330316, 1448781.1, 215284_at
FIG. 3137: PRO85540
FIG. 3138: DNA330317, 228133.1, 215330_at
FIG. 3139: PRO85541
FIG. 3140: DNA331569, NP_000552.1, 215333_x_at
FIG. 3141: PRO85542
FIG. 3142: DNA327831, NP_076956.1, 215380_s_at
FIG. 3143: PRO83783
FIG. 3144: DNA328801, 407831.1, 215392_at
FIG. 3145: PRO84543
FIG. 3146: DNA325174, NP_038470.1, 215416_s_at
FIG. 3147: PRO9819
FIG. 3148: DNA275385, NP_002085.1, 215438_x_at
FIG. 3149: PRO63048
FIG. 3150: DNA331570, BC015794, 215440_s_at
FIG. 3151: PRO84545
FIG. 3152: DNA330319, AF247727, 215483_at
FIG. 3153: DNA331571, MAP2K3, 215498_s_at
FIG. 3154: PRO86584
FIG. 3155: DNA330186, BUB1, 215509_s_at
FIG. 3156: PRO85434
FIG. 3157: DNA330321, 315726.1, 215605_at
FIG. 3158: PRO85545
FIG. 3159: DNA331572, AF000426, 215633_x_at
FIG. 3160: PRO86585
FIG. 3161: DNA330031, LOC51668, 215691_x_at
FIG. 3162: PRO85316
FIG. 3163: DNA331573, HSAPT1, 215719_x_at
FIG. 3164A-B: DNA254376, KIAA0963,
215760_s_at
FIG. 3165: PRO49486
FIG. 3166A-B: DNA328805, BAA86482.1,
215785_s_at
FIG. 3167: PRO84547
FIG. 3168: DNA331574, HUMTCGCH, 215806_x_at
FIG. 3169: DNA330322, 234025.21, 215855_s_at
FIG. 3170: PRO85546
FIG. 3171: DNA330323, 335053.1, 215908_at
FIG. 3172: PRO85547
FIG. 3173: DNA330324, HHEX, 215933_s_at
FIG. 3174: PRO58034
FIG. 3175: DNA331575, AF223408, 215942_s_at
FIG. 3176: PRO86587
FIG. 3177: DNA330325, NP_055057.1, 215948_x_at
FIG. 3178: PRO85548
FIG. 3179: DNA227668, GK, 215966_x_at
FIG. 3180: PRO38131
FIG. 3181: DNA330326, AY007142, 215967_s_at
FIG. 3182: PRO85549
FIG. 3183: DNA331576, HSRNAGLK, 215977_x_at
FIG. 3184: DNA188736, U00115, 215990_s_at
FIG. 3185: PRO26296
FIG. 3186: DNA331577, 208045.1, 216109_at
FIG. 3187: PRO86588
FIG. 3188: DNA331578, HSTCELD, 216133_at
FIG. 3189: PRO86589
FIG. 3190: DNA254783, DKC1, 216212_s_at
FIG. 3191: PRO49881
FIG. 3192A-B: DNA255273, AB029015,
216218_s_at
FIG. 3193A-B: DNA256461, AND-1, 216228_s_at
FIG. 3194: PRO51498
FIG. 3195: DNA329266, BC000142, 216237_s_at
FIG. 3196: PRO12845
FIG. 3197: DNA151048, HSNOT, 216248_s_at
FIG. 3198: PRO12850
FIG. 3199: DNA329155, BC012479, 216252_x_at
FIG. 3200: PRO1207
FIG. 3201: DNA331579, HSCLCA, 216295_s_at
FIG. 3202: DNA88189, CD24, 216379_x_at
FIG. 3203: PRO2690
FIG. 3204: DNA330329, IR1875335, 216483_s_at
FIG. 3205: DNA287243, NP_004452.1, 216602_s_at
FIG. 3206: PRO69518
FIG. 3207: DNA331580, 1099517.2, 216607_s_at
FIG. 3208: PRO86590
FIG. 3209: DNA227874, TXN, 216609_at
FIG. 3210: PRO38337
FIG. 3211: DNA88296, NP_005733.1, 216640_s_at
FIG. 3212: PRO2274
FIG. 3213: DNA269692, S59049, 216834_at
FIG. 3214: PRO58102
FIG. 3215: DNA227597, SOD2, 216841_s_at
FIG. 3216: PRO38060
FIG. 3217A-B: DNA330331, BAA86451.1,
216873_s_at
FIG. 3218: PRO85554
FIG. 3219: DNA188275, NP_002181.1, 216876_s_at
FIG. 3220: PRO21800
FIG. 3221A-B: DNA150987, NP_006051.1,
216901_s_at
FIG. 3222: PRO12163
FIG. 3223: DNA329267, HUMTCRGAAC,
216920_s_at
FIG. 3224A-C: DNA328811, HUMINSP3R1,
216944_s_at
FIG. 3225: PRO84551
FIG. 3226A-B: DNA151027, AAA80979.1,
216952_s_at
FIG. 3227: PRO12843
FIG. 3228A-E: DNA269650, PLEC1, 216971_s_at
FIG. 3229A-B: PRO58061
FIG. 3230: DNA328812, BAA86575.1, 216997_x_at
FIG. 3231: PRO84552
FIG. 3232: DNA331581, AAB59396.1, 217022_s_at
FIG. 3233: PRO86591
FIG. 3234: DNA331366, HUMGPCR, 217028_at
FIG. 3235: PRO4516
FIG. 3236A-B: DNA227293, AB020721,
217047_s_at
FIG. 3237: PRO37756
FIG. 3238A-B: DNA329269, BAA32292.2,
217122_s_at
FIG. 3239: PRO84865
FIG. 3240: DNA331582, AAA59588.1, 217165_x_at
FIG. 3241: PRO86592
FIG. 3242: DNA331583, S70123, 217173_s_at
FIG. 3243: DNA331584, AF105973, 217232_x_at
FIG. 3244: PRO86593
FIG. 3245: DNA330334, NP_114402.1, 217286_s_at
FIG. 3246: PRO85557
FIG. 3247: DNA331369, HSU88968, 217294_s_at
FIG. 3248A-B: DNA331585, AF051334,
217299_s_at
FIG. 3249: PRO86594
FIG. 3250: DNA331586, S81916, 217356_s_at
FIG. 3251: DNA331587, HSNGMRNA, 217398_x_at
FIG. 3252: PRO86595
FIG. 3253: DNA330335, NP_054765.1, 217408_at
FIG. 3254: PRO62166
FIG. 3255: DNA331588, AF097635, 217414_x_at
FIG. 3256: PRO3629
FIG. 3257: DNA329539, HLA-DMA, 217478_s_at
FIG. 3258: PRO85089
FIG. 3259: DNA331589, 243999.2, 217502_at
FIG. 3260: PRO86596
FIG. 3261: DNA329271, 406848.1, 217591_at
FIG. 3262: PRO84867
FIG. 3263: DNA330337, 1447003.1, 217616_at
FIG. 3264: PRO85559
FIG. 3265: DNA331590, 368556.1, 217655_at
FIG. 3266: PRO86597
FIG. 3267: DNA330339, HSA012375, 217672_x_at
FIG. 3268: DNA323856, HSM800628, 217725_x_at
FIG. 3269: PRO80599
FIG. 3270: DNA326523, NP_001121.2, 217729_s_at
FIG. 3271: PRO71126
FIG. 3272: DNA325832, NP_068839.1, 217731_s_at
FIG. 3273: PRO1869
FIG. 3274A-B: DNA327847, 142131.14, 217738_at
FIG. 3275: PRO2834
FIG. 3276: DNA88541, NP_005737.1, 217739_s_at
FIG. 3277: PRO2834
FIG. 3278: DNA327935, NP_079422.1, 217745_s_at
FIG. 3279: PRO83866
FIG. 3280: DNA327849, NP_057269.1, 217755_at
FIG. 3281: PRO83794
FIG. 3282A-B: DNA274131, AF183421,
217762_s_at
FIG. 3283: PRO62067
FIG. 3284: DNA330340, NP_006859.1, 217763_s_at
FIG. 3285: PRO85562
FIG. 3286A-B: DNA274131, DNA274131,
217764_s_at
FIG. 3287: PRO62067
FIG. 3288: DNA325821, NP_057016.1, 217769_s_at
FIG. 3289: PRO82287
FIG. 3290: DNA325910, AF167438, 217776_at
FIG. 3291: PRO82365
FIG. 3292: DNA227358, NP_057479.1, 217777_s_at
FIG. 3293: PRO37821
FIG. 3294: DNA328819, NP_057145.1, 217783_s_at
FIG. 3295: PRO84557
FIG. 3296: DNA325873, SKB1, 217786_at
FIG. 3297: PRO82331
FIG. 3298: DNA331591, NP_055241.1, 217792_at
FIG. 3299: PRO69560
FIG. 3300: DNA328303, NP_056525.1, 217807_s_at
FIG. 3301: PRO84173
FIG. 3302: DNA227223, NP_064583.1, 217814_at
FIG. 3303: PRO37686
FIG. 3304: DNA327851, NSAP1, 217834_s_at
FIG. 3305: PRO83795
FIG. 3306: DNA328823, NP_057421.1, 217838_s_at
FIG. 3307: PRO84561
FIG. 3308: DNA330341, NP_006061.2, 217839_at
FIG. 3309: PRO85563
FIG. 3310: DNA254773, NP_057231.1, 217841_s_at
FIG. 3311: PRO49871
FIG. 3312: DNA330342, NP_067021.1, 217844_at
FIG. 3313: PRO85564
FIG. 3314: DNA329272, NP_055181.1, 217850_at
FIG. 3315: PRO84868
FIG. 3316A-B: DNA330343, AF403012,
217857_s_at
FIG. 3317: DNA330344, NP_057392.1, 217870_s_at
FIG. 3318: PRO85565
FIG. 3319: DNA326937, NP_002406.1, 217871_s_at
FIG. 3320: PRO83255
FIG. 3321: DNA330345, NP_055130.1, 217906_at
FIG. 3322: PRO85566
FIG. 3323: DNA330346, NP_054880.2, 217907_at
FIG. 3324: PRO85567
FIG. 3325: DNA325780, NP_060371.1, 217914_at
FIG. 3326: PRO82250
FIG. 3327: DNA327853, NP_054769.1, 217919_s_at
FIG. 3328: PRO82223
FIG. 3329: DNA330347, 255559.4, 217922_at
FIG. 3330: PRO85568
FIG. 3331: DNA330348, NP_079150.1, 217929_s_at
FIG. 3332: PRO85569
FIG. 3333: DNA330349, BC022093, 217931_at
FIG. 3334: DNA287241, NP_056991.1, 217933_s_at
FIG. 3335: PRO69516
FIG. 3336A-B: DNA225648, NP_061165.1,
217941_s_at
FIG. 3337: PRO36111
FIG. 3338: DNA326730, NP_057037.1, 217950_at
FIG. 3339: PRO83072
FIG. 3340: DNA329273, NP_037374.1, 217957_at
FIG. 3341: PRO84869
FIG. 3342: DNA328829, NP_057230.1, 217959_s_at
FIG. 3343: PRO84566
FIG. 3344: DNA328830, NP_061118.1, 217962_at
FIG. 3345: PRO84567
FIG. 3346: DNA329274, NP_055195.1, 217963_s_at
FIG. 3347: PRO84870
FIG. 3348: DNA325496, NP_037397.2, 217969_at
FIG. 3349: PRO82013
FIG. 3350: DNA327855, NP_057387.1, 217975_at
FIG. 3351: PRO83367
FIG. 3352: DNA227218, NP_003721.2, 217983_s_at
FIG. 3353: PRO37681
FIG. 3354: DNA227218, RNASE6PL, 217984_at
FIG. 3355: PRO37681
FIG. 3356A-B: DNA227238, NP_038476.1,
217985_s_at
FIG. 3357: PRO37701
FIG. 3358A-B: DNA227238, BAZ1A, 217986_s_at
FIG. 3359: PRO37701
FIG. 3360: DNA328831, NP_057329.1, 217989_at
FIG. 3361: PRO233
FIG. 3362: DNA328832, NP_067022.1, 217995_at
FIG. 3363: PRO84568
FIG. 3364: DNA328833, BC018929, 217996_at
FIG. 3365: PRO84569
FIG. 3366: DNA328834, AF220656, 217997_at
FIG. 3367: DNA287364, NP_031376.1, 218000_s_at
FIG. 3368: PRO69625
FIG. 3369: DNA273008, NP_003972.1, 218009_s_at
FIG. 3370: PRO61079
FIG. 3371: DNA330350, NP_006108.1, 218025_s_at
FIG. 3372: PRO85570
FIG. 3373: DNA328836, NP_054894.1, 218027_at
FIG. 3374: PRO84572
FIG. 3375: DNA329275, AF070673, 218032_at
FIG. 3376: PRO12342
FIG. 3377: DNA331592, ANKT, 218039_at
FIG. 3378: PRO82424
FIG. 3379: DNA328838, NP_054797.2, 218049_s_at
FIG. 3380: PRO70319
FIG. 3381: DNA330352, NP_075059.1, 218051_s_at
FIG. 3382: PRO85571
FIG. 3383: DNA329276, NP_077001.1, 218069_at
FIG. 3384: PRO12104
FIG. 3385: DNA328841, NP_060557.2, 218073_s_at
FIG. 3386: PRO84575
FIG. 3387: DNA329277, NP_054883.3, 218084_x_at
FIG. 3388: PRO6241
FIG. 3389: DNA330353, BC020796, 218085_at
FIG. 3390: PRO69464
FIG. 3391: DNA329278, NP_004495.1, 218092_s_at
FIG. 3392: PRO84871
FIG. 3393: DNA227313, NP_060945.1, 218095_s_at
FIG. 3394: PRO37776
FIG. 3395: DNA331593, MRPL4, 218105_s_at
FIG. 3396: PRO86598
FIG. 3397: DNA326596, NP_060624.1, 218115_at
FIG. 3398: PRO82954
FIG. 3399: DNA330355, NP_055063.1, 218117_at
FIG. 3400: PRO83289
FIG. 3401: DNA330356, NP_006318.1, 218118_s_at
FIG. 3402: PRO85572
FIG. 3403: DNA330357, NP_078786.2, 218130_at
FIG. 3404: PRO85573
FIG. 3405: DNA227155, NP_057654.1, 218135_at
FIG. 3406: PRO37618
FIG. 3407: DNA254496, NP_060076.1, 218149_s_at
FIG. 3408: PRO49604
FIG. 3409: DNA330358, NP_079012.1, 218154_at
FIG. 3410: PRO85574
FIG. 3411: DNA254739, NP_068766.1, 218156_s_at
FIG. 3412: PRO49837
FIG. 3413: DNA304470, PRO2577, 218172_s_at
FIG. 3414: PRO2577
FIG. 3415: DNA330359, NP_065145.1, 218178_s_at
FIG. 3416: PRO85575
FIG. 3417: DNA304495, NP_057156.1, 218193_s_at
FIG. 3418: PRO793
FIG. 3419A-C: DNA330360, NP_078789.1,
218204_s_at
FIG. 3420: PRO85576
FIG. 3421: DNA327858, NP_036473.1, 218238_at
FIG. 3422: PRO83800
FIG. 3423: DNA327858, CRFG, 218239_s_at
FIG. 3424: PRO83800
FIG. 3425A-B: DNA330361, CKAP2, 218252_at
FIG. 3426: PRO85577
FIG. 3427: DNA328850, NP_057187.1, 218254_s_at
FIG. 3428: PRO84581
FIG. 3429: DNA331594, MRPL24, 218270_at
FIG. 3430: PRO11652
FIG. 3431: DNA273230, NP_060914.1, 218273_s_at
FIG. 3432: PRO61257
FIG. 3433: DNA324444, NP_006333.1, 218308_at
FIG. 3434: PRO81108
FIG. 3435: DNA330363, NP_060252.1, 218331_s_at
FIG. 3436: PRO85578
FIG. 3437: DNA329281, NP_036526.2, 218336_at
FIG. 3438: PRO84874
FIG. 3439A-B: DNA330364, NP_004417.1,
218338_at
FIG. 3440: PRO85579
FIG. 3441: DNA272918, NP_055269.1, 218346_s_at
FIG. 3442: PRO61003
FIG. 3443: DNA327862, NP_060445.1, 218349_s_at
FIG. 3444: PRO83803
FIG. 3445: DNA328854, NP_056979.1, 218350_s_at
FIG. 3446: PRO84585
FIG. 3447A-B: DNA273415, KIF4A, 218355_at
FIG. 3448: PRO61414
FIG. 3449: DNA324890, NP_037525.1, 218356_at
FIG. 3450: PRO81496
FIG. 3451: DNA330365, NP_036591.1, 218357_s_at
FIG. 3452: PRO85580
FIG. 3453A-B: DNA331595, NP_073602.2,
218376_s_at
FIG. 3454: PRO86599
FIG. 3455: DNA330367, NP_057174.1, 218379_at
FIG. 3456: PRO85582
FIG. 3457: DNA328856, NP_068376.1, 218380_at
FIG. 3458: PRO84586
FIG. 3459: DNA227248, NP_006287.1, 218397_at
FIG. 3460: PRO37711
FIG. 3461A-B: DNA287192, NP_006178.1,
218400_at
FIG. 3462: PRO69478
FIG. 3463: DNA329912, TTC4, 218442_at
FIG. 3464: PRO85227
FIG. 3465: DNA150661, NP_057162.1, 218446_s_at
FIG. 3466: PRO12398
FIG. 3467: DNA304781, NP_057385.2, 218461_at
FIG. 3468: PRO71191
FIG. 3469: DNA328861, NP_057030.2, 218472_s_at
FIG. 3470: PRO84589
FIG. 3471: DNA330368, NP_064446.1, 218494_s_at
FIG. 3472: PRO85583
FIG. 3473: DNA150648, NP_037464.1, 218507_at
FIG. 3474: PRO11576
FIG. 3475: DNA328864, NP_060726.2, 218512_at
FIG. 3476: PRO84592
FIG. 3477: DNA330369, NP_060822.1, 218513_at
FIG. 3478: PRO85584
FIG. 3479: DNA330370, NP_060415.1, 218519_at
FIG. 3480: PRO190
FIG. 3481: DNA327867, NP_061873.2, 218532_s_at
FIG. 3482: PRO83808
FIG. 3483: DNA330371, NP_060813.1, 218535_s_at
FIG. 3484: PRO85585
FIG. 3485: DNA327868, NP_060601.2, 218542_at
FIG. 3486: PRO83809
FIG. 3487: DNA255113, NP_073587.1, 218543_s_at
FIG. 3488: PRO50195
FIG. 3489: DNA330372, NP_057117.1, 218549_s_at
FIG. 3490: PRO85586
FIG. 3491: DNA330373, NP_060751.1, 218552_at
FIG. 3492: PRO85587
FIG. 3493: DNA330374, NP_054901.1, 218556_at
FIG. 3494: PRO23321
FIG. 3495: DNA330375, NP_059142.1, 218558_s_at
FIG. 3496: PRO85588
FIG. 3497: DNA329587, NP_036256.1, 218566_s_at
FIG. 3498: PRO85121
FIG. 3499: DNA329286, NP_005691.2, 218567_x_at
FIG. 3500: PRO69644
FIG. 3501: DNA329054, NP_078805.2, 218578_at
FIG. 3502: PRO84716
FIG. 3503A-B: DNA273435, NP_057532.1,
218585_s_at
FIG. 3504: PRO61430
FIG. 3505: DNA227327, NP_060547.1, 218593_at
FIG. 3506: PRO37790
FIG. 3507: DNA328628, NP_060542.2, 218594_at
FIG. 3508: PRO84406
FIG. 3509: DNA287642, NP_060934.1, 218597_s_at
FIG. 3510: PRO9902
FIG. 3511A-B: DNA254789, NP_057301.1,
218603_at
FIG. 3512: PRO49887
FIG. 3513: DNA330376, NP_076962.1, 218622_at
FIG. 3514: PRO85589
FIG. 3515: DNA327869, NP_057672.1, 218625_at
FIG. 3516: PRO1898
FIG. 3517: DNA330377, NP_036577.1, 218638_s_at
FIG. 3518: PRO85590
FIG. 3519: DNA330378, NP_071741.2, 218662_s_at
FIG. 3520: PRO81126
FIG. 3521: DNA330378, HCAP-G, 218663_at
FIG. 3522: PRO81126
FIG. 3523: DNA287291, NP_067036.1, 218676_s_at
FIG. 3524: PRO69561
FIG. 3525: DNA304835, NP_071327.1, 218681_s_at
FIG. 3526: PRO71242
FIG. 3527: DNA330379, NP_073562.1, 218689_at
FIG. 3528: PRO85591
FIG. 3529: DNA329288, NP_061910.1, 218695_at
FIG. 3530: PRO84880
FIG. 3531: DNA287378, NP_060898.1, 218715_at
FIG. 3532: PRO69637
FIG. 3533: DNA327202, NP_057289.1, 218718_at
FIG. 3534: PRO200
FIG. 3535: DNA330380, NP_078937.2, 218722_s_at
FIG. 3536: PRO85592
FIG. 3537: DNA324251, NP_060880.2, 218726_at
FIG. 3538: PRO80935
FIG. 3539: DNA227617, NP_057161.1, 218732_at
FIG. 3540: PRO38080
FIG. 3541: DNA330381, NP_076958.1, 218741_at
FIG. 3542: PRO38668
FIG. 3543: DNA330382, NP_005724.1, 218755_at
FIG. 3544: PRO61907
FIG. 3545: DNA330383, NP_054828.1, 218782_s_at
FIG. 3546: PRO85593
FIG. 3547: DNA330384, NP_060388.1, 218802_at
FIG. 3548: PRO51129
FIG. 3549: DNA88315, NP_004098.1, 218831_s_at
FIG. 3550: PRO2743
FIG. 3551: DNA330385, NP_057733.2, 218859_s_at
FIG. 3552: PRO85594
FIG. 3553: DNA330386, NP_057394.1, 218866_s_at
FIG. 3554: PRO85595
FIG. 3555: DNA330387, NP_036309.1, 218875_s_at
FIG. 3556: PRO85596
FIG. 3557: DNA327874, BC022791, 218880_at
FIG. 3558: PRO4805
FIG. 3559A-B: DNA271829, NP_006775.1,
218882_s_at
FIG. 3560: PRO60109
FIG. 3561: DNA330388, NP_078905.1, 218883_s_at
FIG. 3562: PRO85597
FIG. 3563: DNA226633, NP_060376.1, 218886_at
FIG. 3564: PRO37096
FIG. 3565: DNA304780, NP_060562.2, 218888_s_at
FIG. 3566: PRO69889
FIG. 3567: DNA256762, AK022882, 218889_at
FIG. 3568: PRO51695
FIG. 3569: DNA328881, NP_057706.2, 218890_x_at
FIG. 3570: PRO49469
FIG. 3571: DNA325622, NP_060518.1, 218894_s_at
FIG. 3572: PRO82113
FIG. 3573: DNA225694, NP_060087.1, 218902_at
FIG. 3574: PRO36157
FIG. 3575: DNA325690, NP_076973.1, 218903_s_at
FIG. 3576: PRO82179
FIG. 3577: DNA328364, SIGIRR, 218921_at
FIG. 3578: PRO84223
FIG. 3579: DNA287166, NP_055129.1, 218943_s_at
FIG. 3580: PRO69459
FIG. 3581: DNA330389, NP_079221.1, 218979_at
FIG. 3582: PRO85598
FIG. 3583: DNA329050, NP_057053.1, 218982_s_at
FIG. 3584: PRO84712
FIG. 3585: DNA330390, NP_057630.1, 218983_at
FIG. 3586: PRO85599
FIG. 3587: DNA288277, NP_061915.1, 218984_at
FIG. 3588: PRO70034
FIG. 3589: DNA256265, NP_060101.1, 218986_s_at
FIG. 3590: PRO51309
FIG. 3591: DNA227194, FLJ11000, 218999_at
FIG. 3592: PRO37657
FIG. 3593: DNA330391, NP_076999.1, 219000_s_at
FIG. 3594: PRO34008
FIG. 3595: DNA330392, NP_078923.2, 219007_at
FIG. 3596: PRO85600
FIG. 3597: DNA328885, NP_061108.2, 219017_at
FIG. 3598: PRO50294
FIG. 3599: DNA330393, NP_067635.1, 219024_at
FIG. 3600: PRO85601
FIG. 3601: DNA329292, NP_057185.1, 219031_s_at
FIG. 3602: PRO84882
FIG. 3603: DNA330394, NP_079402.1, 219035_s_at
FIG. 3604: PRO85602
FIG. 3605: DNA329293, NP_057136.1, 219037_at
FIG. 3606: PRO84883
FIG. 3607: DNA328886, NP_078811.1, 219040_at
FIG. 3608: PRO84610
FIG. 3609: DNA331596, NP_060841.1, 219049_at
FIG. 3610: PRO84884
FIG. 3611: DNA330395, NP_060212.1, 219062_s_at
FIG. 3612: PRO85603
FIG. 3613: DNA330396, NP_077303.1, 219088_s_at
FIG. 3614: PRO85604
FIG. 3615: DNA330397, NP_054873.1, 219094_at
FIG. 3616: PRO85605
FIG. 3617: DNA331597, PLA2G4B, 219095_at
FIG. 3618: PRO86600
FIG. 3619: DNA330398, NP_060367.1, 219133_at
FIG. 3620: PRO85606
FIG. 3621: DNA297191, NP_060962.2, 219148_at
FIG. 3622: PRO70808
FIG. 3623: DNA329295, NP_036549.1, 219155_at
FIG. 3624: PRO84885
FIG. 3625A-B: DNA329438, NP_476516.1,
219158_s_at
FIG. 3626: PRO85008
FIG. 3627: DNA328892, NP_067643.2, 219165_at
FIG. 3628: PRO84616
FIG. 3629: DNA330399, NP_060609.1, 219166_at
FIG. 3630: PRO85607
FIG. 3631: DNA330400, NP_078796.1, 219176_at
FIG. 3632: PRO85608
FIG. 3633: DNA271455, NP_057735.1, 219179_at
FIG. 3634: PRO59751
FIG. 3635: DNA330401, NP_057377.1, 219191_s_at
FIG. 3636: PRO85609
FIG. 3637: DNA330402, NP_076996.1, 219200_at
FIG. 3638: PRO85610
FIG. 3639: DNA287235, NP_060598.1, 219204_s_at
FIG. 3640: PRO69514
FIG. 3641: DNA327879, NP_071451.1, 219209_at
FIG. 3642: PRO83818
FIG. 3643: DNA330403, NP_059110.1, 219211_at
FIG. 3644: PRO85611
FIG. 3645: DNA330404, ZNF361, 219228_at
FIG. 3646: PRO85612
FIG. 3647: DNA225594, NP_037404.1, 219229_at
FIG. 3648: PRO36057
FIG. 3649: DNA328894, NP_060796.1, 219243_at
FIG. 3650: PRO84617
FIG. 3651: DNA329296, NP_060328.1, 219258_at
FIG. 3652: PRO84886
FIG. 3653: DNA304461, NP_054877.1, 219283_at
FIG. 3654: PRO71039
FIG. 3655: DNA330405, RBM15, 219286_s_at
FIG. 3656: PRO85613
FIG. 3657A-B: DNA329076, NP_064627.1,
219306_at
FIG. 3658: PRO84733
FIG. 3659: DNA329914, FLJ12542, 219311_at
FIG. 3660: PRO85229
FIG. 3661: DNA255939, NP_078876.1, 219315_s_at
FIG. 3662: PRO50991
FIG. 3663: DNA287404, NP_073748.1, 219334_s_at
FIG. 3664: PRO69661
FIG. 3665: DNA254710, NP_060382.1, 219352_at
FIG. 3666: PRO49810
FIG. 3667: DNA325169, HSPC177, 219356_s_at
FIG. 3668: PRO81734
FIG. 3669: DNA330406, NP_079368.1, 219359_at
FIG. 3670: PRO85614
FIG. 3671: DNA330407, NP_057026.2, 219363_s_at
FIG. 3672: PRO85615
FIG. 3673: DNA330408, NP_077024.1, 219364_at
FIG. 3674: PRO85616
FIG. 3675: DNA254518, NP_057354.1, 219371_s_at
FIG. 3676: PRO49625
FIG. 3677: DNA327886, NP_060832.1, 219399_at
FIG. 3678: PRO41077
FIG. 3679: DNA256417, NP_077271.1, 219402_s_at
FIG. 3680: PRO51457
FIG. 3681A-B: DNA327887, NP_006656.1,
219403_s_at
FIG. 3682: PRO83823
FIG. 3683: DNA271811, NP_036514.1, 219421_at
FIG. 3684: PRO60092
FIG. 3685: DNA329014, NP_005746.2, 219424_at
FIG. 3686: PRO9998
FIG. 3687: DNA328901, FLJ20533, 219449_s_at
FIG. 3688: PRO84622
FIG. 3689: DNA328902, NP_071750.1, 219452_at
FIG. 3690: PRO84623
FIG. 3691: DNA328367, RIN3, 219456_s_at
FIG. 3692: PRO84226
FIG. 3693: DNA331598, AK026092, 219457_s_at
FIG. 3694: PRO86601
FIG. 3695: DNA327890, NP_079021.1, 219493_at
FIG. 3696: PRO83826
FIG. 3697A-B: DNA227179, NP_059120.1,
219505_at
FIG. 3698: PRO37642
FIG. 3699A-C: DNA331599, BCL11B, 219528_s_at
FIG. 3700: PRO86602
FIG. 3701: DNA329300, GEMIN6, 219539_at
FIG. 3702: PRO84889
FIG. 3703: DNA328908, 7691567.2, 219540_at
FIG. 3704: PRO84629
FIG. 3705: DNA256737, NP_060276.1, 219541_at
FIG. 3706: PRO51671
FIG. 3707: DNA330410, NP_060925.1, 219555_s_at
FIG. 3708: PRO85618
FIG. 3709A-B: DNA331600, NP_061985.1,
219577_s_at
FIG. 3710: PRO86603
FIG. 3711: DNA325053, NP_060230.2, 219588_s_at
FIG. 3712: PRO81637
FIG. 3713: DNA330412, NP_057617.1, 219594_at
FIG. 3714: PRO23600
FIG. 3715: DNA331601, NP_071915.1, 219628_at
FIG. 3716: PRO85620
FIG. 3717: DNA330414, NP_057615.1, 219657_s_at
FIG. 3718: PRO81138
FIG. 3719A-B: DNA274044, HSM801565,
219671_at
FIG. 3720: PRO61987
FIG. 3721: DNA293243, RCP, 219681_s_at
FIG. 3722: PRO70699
FIG. 3723: DNA255161, NP_071430.1, 219684_at
FIG. 3724: PRO50241
FIG. 3725: DNA287206, NP_060124.1, 219691_at
FIG. 3726: PRO69488
FIG. 3727A-B: DNA330297, NP_065138.2,
219700_at
FIG. 3728: PRO85524
FIG. 3729: DNA330416, TDP1, 219715_s_at
FIG. 3730: PRO85622
FIG. 3731: DNA330417, NP_085144.1, 219716_at
FIG. 3732: PRO21341
FIG. 3733A-B: DNA227255, NP_036579.1,
219753_at
FIG. 3734: PRO37718
FIG. 3735: DNA328919, NP_078987.1, 219777_at
FIG. 3736: PRO84637
FIG. 3737A-B: DNA331602, NP_060568.3,
219787_s_at
FIG. 3738: PRO86604
FIG. 3739: DNA255822, NP_036346.1, 219797_at
FIG. 3740: PRO50877
FIG. 3741: DNA227305, NP_064564.1, 219806_s_at
FIG. 3742: PRO37768
FIG. 3743: DNA329303, NP_054737.1, 219819_s_at
FIG. 3744: PRO84892
FIG. 3745: DNA287295, NP_078784.1, 219836_at
FIG. 3746: PRO69564
FIG. 3747: DNA287234, NP_114174.1, 219862_s_at
FIG. 3748: PRO69513
FIG. 3749: DNA287221, NP_057407.1, 219863_at
FIG. 3750: PRO69500
FIG. 3751: DNA330419, NP_038469.1, 219864_s_at
FIG. 3752: PRO85624
FIG. 3753: DNA255255, LOC64116, 219869_s_at
FIG. 3754: PRO50332
FIG. 3755: DNA330420, NP_078890.1, 219871_at
FIG. 3756: PRO85625
FIG. 3757: DNA256325, NP_005470.1, 219889_at
FIG. 3758: PRO51367
FIG. 3759: DNA330421, NP_057438.2, 219911_s_at
FIG. 3760: PRO85626
FIG. 3761A-B: DNA330422, NP_057736.2,
219913_s_at
FIG. 3762: PRO85627
FIG. 3763: DNA227787, NP_060606.1, 219918_s_at
FIG. 3764: PRO38250
FIG. 3765: DNA330423, NP_037466.2, 219920_s_at
FIG. 3766: PRO85628
FIG. 3767A-B: DNA330424, LTBP3, 219922_s_at
FIG. 3768: PRO85629
FIG. 3769: DNA328924, NP_057150.2, 219933_at
FIG. 3770: PRO84641
FIG. 3771: DNA218280, NP_068570.1, 219971_at
FIG. 3772: PRO34332
FIG. 3773: DNA325979, NP_060924.4, 219978_s_at
FIG. 3774: PRO82424
FIG. 3775: DNA330425, NP_078956.1, 219990_at
FIG. 3776: PRO85630
FIG. 3777A-B: DNA330426, SGKL, 220038_at
FIG. 3778: PRO85631
FIG. 3779: DNA328926, NP_064703.1, 220046_s_at
FIG. 3780: PRO84643
FIG. 3781A-B: DNA218680, NP_071731.1,
220048_at
FIG. 3782: PRO21724
FIG. 3783: DNA330427, NP_036593.1, 220052_s_at
FIG. 3784: PRO85632
FIG. 3785: DNA330428, NP_060385.1, 220060_s_at
FIG. 3786: PRO85633
FIG. 3787: DNA330537, NP_060533.2, 220085_at
FIG. 3788: PRO81892
FIG. 3789: DNA256091, NP_071385.1, 220094_s_at
FIG. 3790: PRO51141
FIG. 3791: DNA330430, NP_078945.1, 220112_at
FIG. 3792: PRO85634
FIG. 3793: DNA330431, NP_055198.1, 220118_at
FIG. 3794: PRO85635
FIG. 3795: DNA227302, NP_037401.1, 220132_s_at
FIG. 3796: PRO37765
FIG. 3797: DNA330432, NP_079219.1, 220169_at
FIG. 3798: PRO85636
FIG. 3799: DNA331603, TMPRSS3, 220177_s_at
FIG. 3800: PRO83482
FIG. 3801: DNA256291, NP_079182.1, 220232_at
FIG. 3802: PRO51335
FIG. 3803: DNA330434, NP_060842.1, 220235_s_at
FIG. 3804: PRO85637
FIG. 3805: DNA330435, NP_060179.1, 220306_at
FIG. 3806: PRO85638
FIG. 3807: DNA330436, NP_037394.1, 220319_s_at
FIG. 3808: PRO85639
FIG. 3809: DNA327904, NP_071419.2, 220330_s_at
FIG. 3810: PRO83839
FIG. 3811: DNA287186, NP_061134.1, 220358_at
FIG. 3812: PRO69472
FIG. 3813A-B: DNA330437, NP_079366.1,
220370_s_at
FIG. 3814: PRO85640
FIG. 3815: DNA330438, NP_061026.1, 220485_s_at
FIG. 3816: PRO50795
FIG. 3817: DNA327214, NP_078991.2, 220495_s_at
FIG. 3818: PRO83483
FIG. 3819: DNA324252, NP_060444.1, 220521_s_at
FIG. 3820: PRO80936
FIG. 3821: DNA331604, PHEMX, 220558_x_at
FIG. 3822: PRO86605
FIG. 3823: DNA256363, NP_057686.1, 220565_at
FIG. 3824: PRO51405
FIG. 3825: DNA255798, NP_079265.1, 220576_at
FIG. 3826: PRO50853
FIG. 3827: DNA330440, NP_079098.1, 220591_s_at
FIG. 3828: PRO85642
FIG. 3829: DNA255734, NP_057607.1, 220646_s_at
FIG. 3830: PRO50791
FIG. 3831A-B: DNA327908, MCM10, 220651_s_at
FIG. 3832: PRO83843
FIG. 3833: DNA329306, NP_079149.2, 220655_at
FIG. 3834: PRO84895
FIG. 3835A-B: DNA327909, ARNTL2, 220658_s_at
FIG. 3836: PRO83844
FIG. 3837: DNA329307, NP_037483.1, 220684_at
FIG. 3838: PRO84896
FIG. 3839: DNA323756, NP_057267.2, 220688_s_at
FIG. 3840: PRO80512
FIG. 3841: DNA331380, DKFZp566O084Homo,
220690_s_at
FIG. 3842: DNA330442, NP_054866.1, 220692_at
FIG. 3843: PRO85643
FIG. 3844: DNA330443, NP_061086.1, 220702_at
FIG. 3845: PRO85644
FIG. 3846: DNA288247, NP_478059.1, 220892_s_at
FIG. 3847: PRO70011
FIG. 3848: DNA327916, NP_079466.1, 220940_at
FIG. 3849: PRO83851
FIG. 3850: DNA327953, NP_055182.2, 220942_x_at
FIG. 3851: PRO83878
FIG. 3852: DNA327917, NP_112240.1, 220966_x_at
FIG. 3853: PRO83852
FIG. 3854: DNA329078, VMP1, 220990_s_at
FIG. 3855: PRO23253
FIG. 3856A-B: DNA254516, NP_112196.1,
220992_s_at
FIG. 3857: PRO49623
FIG. 3858: DNA330444, NP_110405.1, 220999_s_at
FIG. 3859: PRO85645
FIG. 3860: DNA324246, NP_112188.1, 221004_s_at
FIG. 3861: PRO80930
FIG. 3862: DNA330445, NP_112174.1, 221012_s_at
FIG. 3863: PRO85646
FIG. 3864A-B: DNA254816, NP_110444.1,
221031_s_at
FIG. 3865: PRO49912
FIG. 3866: DNA330446, NP_054889.1, 221046_s_at
FIG. 3867: PRO85647
FIG. 3868: DNA330447, NP_079174.1, 221080_s_at
FIG. 3869: PRO85648
FIG. 3870: DNA226227, NP_060872.1, 221111_at
FIG. 3871: PRO36690
FIG. 3872: DNA227267, NP_061130.1, 221123_x_at
FIG. 3873: PRO37730
FIG. 3874: DNA217256, NP_065386.1, 221165_s_at
FIG. 3875: PRO34298
FIG. 3876: DNA329310, AK027224, 221185_s_at
FIG. 3877: PRO84899
FIG. 3878: DNA324408, NP_060493.2, 221203_s_at
FIG. 3879: PRO81072
FIG. 3880A-B: DNA330448, NP_059111.1,
221221_s_at
FIG. 3881: PRO85649
FIG. 3882: DNA331605, CISH, 221223_x_at
FIG. 3883: PRO86458
FIG. 3884: DNA330450, AK025947, 221235_s_at
FIG. 3885: PRO85651
FIG. 3886: DNA330451, NP_110429.1, 221249_s_at
FIG. 3887: PRO85652
FIG. 3888: DNA330452, NP_112494.2, 221258_s_at
FIG. 3889: PRO85653
FIG. 3890: DNA295327, NP_068575.1, 221271_at
FIG. 3891: PRO70773
FIG. 3892: DNA330453, NP_112597.1, 221277_s_at
FIG. 3893: PRO85654
FIG. 3894: DNA329312, NP_005205.2, 221331_x_at
FIG. 3895: PRO84901
FIG. 3896: DNA288250, NP_112487.1, 221434_s_at
FIG. 3897: PRO70013
FIG. 3898: DNA330454, NP_112589.1, 221436_s_at
FIG. 3899: PRO85655
FIG. 3900: DNA330455, 1097190.16, 221477_s_at
FIG. 3901: PRO85656
FIG. 3902: DNA150865, NP_057005.1, 221488_s_at
FIG. 3903: PRO11587
FIG. 3904: DNA272972, NP_057356.1, 221496_s_at
FIG. 3905: PRO61052
FIG. 3906A-B: DNA329316, AF158555,
221510_s_at
FIG. 3907: PRO84904
FIG. 3908: DNA330456, NP_060571.1, 221520_s_at
FIG. 3909: PRO85657
FIG. 3910: DNA326221, NP_057179.1, 221521_s_at
FIG. 3911: PRO82634
FIG. 3912: DNA328953, NP_004086.1, 221539_at
FIG. 3913: PRO70296
FIG. 3914: DNA329317, AF288571, 221558_s_at
FIG. 3915: PRO81157
FIG. 3916: DNA330457, NP_076944.1, 221559_s_at
FIG. 3917: PRO85658
FIG. 3918: DNA329319, BC006401, 221601_s_at
FIG. 3919: PRO1607
FIG. 3920: DNA329319, NP_005440.1, 221602_s_at
FIG. 3921: PRO1607
FIG. 3922: DNA254308, NP_060950.1, 221622_s_at
FIG. 3923: PRO49419
FIG. 3924: DNA287254, NP_077004.1, 221637_s_at
FIG. 3925: PRO69528
FIG. 3926: DNA330458, NP_060634.1, 221652_s_at
FIG. 3927: PRO85659
FIG. 3928: DNA218280, IL21R, 221658_s_at
FIG. 3929: PRO34332
FIG. 3930: DNA327927, NP_037390.2, 221666_s_at
FIG. 3931: PRO57311
FIG. 3932: DNA254777, NP_055140.1, 221676_s_at
FIG. 3933: PRO49875
FIG. 3934: DNA330459, NP_060083.1, 221677_s_at
FIG. 3935: PRO50083
FIG. 3936: DNA330460, NP_060255.2, 221685_s_at
FIG. 3937: PRO85660
FIG. 3938: DNA273185, DNA273185, 221727_at
FIG. 3939: DNA330461, BC005104, 221732_at
FIG. 3940: DNA328961, NP_443112.1, 221756_at
FIG. 3941: PRO84667
FIG. 3942: DNA328961, MGC17330, 221757_at
FIG. 3943: PRO84667
FIG. 3944: DNA330462, NP_060103.1, 221766_s_at
FIG. 3945: PRO85661
FIG. 3946: DNA193901, DNA193901, 221768_at
FIG. 3947: PRO23319
FIG. 3948: DNA328964, AK056028, 221770_at
FIG. 3949: PRO84669
FIG. 3950: DNA330463, HSM801191, 221790_s_at
FIG. 3951A-B: DNA151745, DNA151745,
221805_at
FIG. 3952: PRO12033
FIG. 3953: DNA274058, NP_057203.1, 221816_s_at
FIG. 3954: PRO61999
FIG. 3955: DNA325039, NP_004902.1, 221824_s_at
FIG. 3956: PRO2733
FIG. 3957: DNA273311, NP_003022.1, 221833_at
FIG. 3958: PRO61319
FIG. 3959: DNA272419, AF105036, 221841_s_at
FIG. 3960: PRO60672
FIG. 3961: DNA330464, NP_067082.1, 221882_s_at
FIG. 3962: PRO85663
FIG. 3963A-B: DNA330465, 253695.2, 221916_at
FIG. 3964: PRO85664
FIG. 3965A-B: DNA330466, AB018304, 221922_at
FIG. 3966: DNA329321, NP_112493.1, 221931_s_at
FIG. 3967: PRO84906
FIG. 3968: DNA330467, NP_060114.1, 221986_s_at
FIG. 3969: PRO85665
FIG. 3970: DNA287235, FLJ10534, 221987_s_at
FIG. 3971: PRO69514
FIG. 3972: DNA327114, RPL10, 221989_at
FIG. 3973: PRO62466
FIG. 3974: DNA331606, BC018529, 222017_x_at
FIG. 3975: PRO86606
FIG. 3976: DNA257797, DNA257797, 222036_s_at
FIG. 3977: DNA257798, DNA257798, 222037_at
FIG. 3978: DNA330468, 1454101.4, 222044_at
FIG. 3979: PRO85666
FIG. 3980: DNA329919, BC013365, 222045_s_at
FIG. 3981: PRO85234
FIG. 3982: DNA304466, NP_004834.1, 222062_at
FIG. 3983: PRO34336
FIG. 3984: DNA325648, NP_037409.2, 222077_s_at
FIG. 3985: PRO82139
FIG. 3986: DNA331386, HST000012, 222150_s_at
FIG. 3987: DNA287209, NP_056350.1, 222154_s_at
FIG. 3988: PRO69490
FIG. 3989: DNA256784, NP_075069.1, 222209_s_at
FIG. 3990: PRO51716
FIG. 3991: DNA328977, NP_071344.1, 222216_s_at
FIG. 3992: PRO84678
FIG. 3993: DNA330469, NP_056249.1, 222250_s_at
FIG. 3994: PRO85667
FIG. 3995: DNA328885, EKI1, 222262_s_at
FIG. 3996: PRO50294
FIG. 3997: DNA330470, 096828.1, 222307_at
FIG. 3998: PRO85668
FIG. 3999: DNA330471, 027307.1, 222309_at
FIG. 4000: PRO85669
FIG. 4001: DNA330472, 128864.1, 222326_at
FIG. 4002: PRO85670
FIG. 4003: DNA330473, NP_060676.2, 222387_s_at
FIG. 4004: PRO85671
FIG. 4005: DNA330474, AF186382, 222388_s_at
FIG. 4006: PRO85672
FIG. 4007: DNA331607, HSA251830, 222392_x_at
FIG. 4008: PRO86607
FIG. 4009A-B: DNA270901, NP_004238.1,
222398_s_at
FIG. 4010: PRO59235
FIG. 4011: DNA325821, BC014334, 222402_at
FIG. 4012: PRO82287
FIG. 4013: DNA227358, HSPC121, 222404_x_at
FIG. 4014: PRO37821
FIG. 4015: DNA330476, AK027421, 222405_at
FIG. 4016: PRO85674
FIG. 4017: DNA328819, CGI-127, 222408_s_at
FIG. 4018: PRO84557
FIG. 4019: DNA331608, SNX5, 222417_s_at
FIG. 4020: PRO69560
FIG. 4021: DNA326307, NP_056399.1, 222425_s_at
FIG. 4022: PRO82707
FIG. 4023: DNA227223, GK001, 222432_s_at
FIG. 4024: PRO37686
FIG. 4025A-B: DNA329326, NP_005110.1,
222439_s_at
FIG. 4026: PRO84910
FIG. 4027: DNA327939, NP_060654.1, 222442_s_at
FIG. 4028: PRO83869
FIG. 4029: DNA329327, AF198620, 222443_s_at
FIG. 4030: PRO84911
FIG. 4031A-B: DNA256489, NP_079110.1,
222464_s_at
FIG. 4032: PRO51526
FIG. 4033A-B: DNA225648, ERBB2IP, 222473_s_at
FIG. 4034: PRO36111
FIG. 4035: DNA304460, BC003048, 222500_at
FIG. 4036: PRO4984
FIG. 4037: DNA330477, NP_036227.1, 222516_at
FIG. 4038: PRO37979
FIG. 4039: DNA329328, NP_067026.2, 222532_at
FIG. 4040: PRO84912
FIG. 4041: DNA16435, DNA16435, 222543_at
FIG. 4042: PRO276
FIG. 4043: DNA330478, NP_056978.2, 222557_at
FIG. 4044: PRO85675
FIG. 4045A-B: DNA330479, 900264.1, 222572_at
FIG. 4046: PRO85676
FIG. 4047: DNA330480, NP_060697.2, 222600_s_at
FIG. 4048: PRO85677
FIG. 4049A-B: DNA330481, AB058718, 222603_at
FIG. 4050: DNA330482, AK027468, 222606_at
FIG. 4051: PRO85678
FIG. 4052: DNA330483, AK001472, 222608_s_at
FIG. 4053: PRO85679
FIG. 4054: DNA329330, NP_057130.1, 222609_s_at
FIG. 4055: PRO84914
FIG. 4056A-B: DNA331609, 402471.3, 222613_at
FIG. 4057: PRO86608
FIG. 4058: DNA330485, NP_057415.1, 222624_s_at
FIG. 4059: PRO85681
FIG. 4060: DNA327942, NP_060596.1, 222642_s_at
FIG. 4061: PRO83870
FIG. 4062: DNA327943, NP_055399.1, 222646_s_at
FIG. 4063: PRO865
FIG. 4064A-B: DNA273435, RAMP, 222680_s_at
FIG. 4065: PRO61430
FIG. 4066: DNA330486, HSM802473, 222692_s_at
FIG. 4067: DNA330487, AB052751, 222696_at
FIG. 4068: DNA330488, AK025568, 222704_at
FIG. 4069: PRO85682
FIG. 4070: DNA272874, NP_057111.1, 222714_s_at
FIG. 4071: PRO60967
FIG. 4072: DNA275116, DNA275116, 222726_s_at
FIG. 4073: DNA330489, BC019909, 222740_at
FIG. 4074: PRO85683
FIG. 4075: DNA330490, 399171.38, 222754_at
FIG. 4076: PRO85684
FIG. 4077: DNA330491, BC002522, 222759_at
FIG. 4078: PRO85685
FIG. 4079A-B: DNA330492, FLJ11294, 222763_s_at
FIG. 4080: PRO85686
FIG. 4081: DNA329332, LOC51605, 222768_s_at
FIG. 4082: PRO84916
FIG. 4083: DNA330493, AK025248, 222770_s_at
FIG. 4084: PRO85687
FIG. 4085: DNA304780, NETO2, 222774_s_at
FIG. 4086: PRO69889
FIG. 4087: DNA330494, BC020651, 222775_s_at
FIG. 4088: PRO85688
FIG. 4089: DNA330495, NP_060468.1, 222781_s_at
FIG. 4090: PRO85689
FIG. 4091: DNA330496, HSM802366, 222793_at
FIG. 4092: DNA330395, FLJ20281, 222816_s_at
FIG. 4093: PRO85603
FIG. 4094A-B: DNA331610, TBDN100,
222837_s_at
FIG. 4095: PRO86609
FIG. 4096: DNA330881, AB027233, 222838_at
FIG. 4097: PRO1138
FIG. 4098: DNA329335, AK023411, 222843_at
FIG. 4099: PRO84919
FIG. 4100: DNA273489, NP_055210.1, 222858_s_at
FIG. 4101: PRO61472
FIG. 4102: DNA273489, DAPP1, 222859_s_at
FIG. 4103: PRO61472
FIG. 4104: DNA330498, NP_036225.1, 222862_s_at
FIG. 4105: PRO85691
FIG. 4106: DNA329336, NP_057144.1, 222867_s_at
FIG. 4107: PRO84920
FIG. 4108: DNA287404, FLJ22833, 222872_x_at
FIG. 4109: PRO69661
FIG. 4110: DNA330499, AK026944, 222875_at
FIG. 4111: PRO85692
FIG. 4112: DNA330500, AK022872, 222889_at
FIG. 4113: PRO85693
FIG. 4114A-C: DNA330409, HSA404614,
222895_s_at
FIG. 4115: PRO85617
FIG. 4116: DNA330501, AK022792, 222958_s_at
FIG. 4117: PRO85694
FIG. 4118A-B: DNA330502, AB042719,
222962_s_at
FIG. 4119: PRO85695
FIG. 4120: DNA329337, AF279437, 222974_at
FIG. 4121: PRO10096
FIG. 4122: DNA329338, 459502.10, 222977_at
FIG. 4123: PRO84921
FIG. 4124A-B: DNA329339, 459502.5, 222978_at
FIG. 4125: PRO84922
FIG. 4126: DNA329340, AF078866, 222979_s_at
FIG. 4127: PRO81805
FIG. 4128: DNA152786, NP_057215.1, 222980_at
FIG. 4129: PRO10928
FIG. 4130: DNA152786, RAB10, 222981_s_at
FIG. 4131: PRO10928
FIG. 4132A-B: DNA287236, AB024334, 222985_at
FIG. 4133: PRO10607
FIG. 4134: DNA330503, NP_038466.2, 222989_s_at
FIG. 4135: PRO85696
FIG. 4136: DNA331611, UBQLN1, 222991_s_at
FIG. 4137: PRO86610
FIG. 4138: DNA330504, NP_057575.2, 222993_at
FIG. 4139: PRO84923
FIG. 4140: DNA329571, NP_057547.3, 222996_s_at
FIG. 4141: PRO51662
FIG. 4142: DNA326195, NP_054781.1, 223018_at
FIG. 4143: PRO82611
FIG. 4144: DNA330505, BC005937, 223021_x_at
FIG. 4145: PRO85697
FIG. 4146A-B: DNA329342, AF172847, 223027_at
FIG. 4147: PRO84924
FIG. 4148: DNA329344, FRSB, 223035_s_at
FIG. 4149: PRO84926
FIG. 4150: DNA330506, NP_067061.1, 223038_s_at
FIG. 4151: PRO82123
FIG. 4152: DNA330507, AK054681, 223039_at
FIG. 4153: PRO85698
FIG. 4154: DNA287260, NP_057184.1, 223040_at
FIG. 4155: PRO69532
FIG. 4156: DNA324198, HSM801908, 223044_at
FIG. 4157: PRO37675
FIG. 4158: DNA330508, AF116694, 223047_at
FIG. 4159: PRO85699
FIG. 4160: DNA189412, NP_057390.1, 223054_at
FIG. 4161: PRO25349
FIG. 4162A-B: DNA256347, AF298880,
223055_s_at
FIG. 4163: PRO51389
FIG. 4164A-B: DNA329345, AB033117,
223056_s_at
FIG. 4165: DNA327948, NP_060394.1, 223060_at
FIG. 4166: PRO69660
FIG. 4167: DNA288247, PSA, 223062_s_at
FIG. 4168: PRO70011
FIG. 4169: DNA330509, AK024555, 223066_at
FIG. 4170: PRO80652
FIG. 4171: DNA227294, NP_060225.1, 223076_s_at
FIG. 4172: PRO37757
FIG. 4173: DNA331612, AF097492, 223079_s_at
FIG. 4174: PRO86611
FIG. 4175: DNA326258, NP_077273.1, 223081_at
FIG. 4176: PRO82665
FIG. 4177: DNA329346, AK027070, 223085_at
FIG. 4178: PRO84928
FIG. 4179: DNA327949, NP_057581.2, 223086_x_at
FIG. 4180: PRO83874
FIG. 4181: DNA331613, 238178.17, 223087_at
FIG. 4182: PRO86612
FIG. 4183: DNA329347, NP_060949.1, 223088_x_at
FIG. 4184: PRO84929
FIG. 4185: DNA330511, AK001338, 223090_x_at
FIG. 4186: PRO85701
FIG. 4187: DNA324209, NP_057018.1, 223096_at
FIG. 4188: PRO80902
FIG. 4189: DNA329349, NP_054861.1, 223100_s_at
FIG. 4190: PRO84931
FIG. 4191: DNA327917, MGC3038, 223101_s_at
FIG. 4192: PRO83852
FIG. 4193: DNA330512, NP_056494.1, 223109_at
FIG. 4194: PRO85702
FIG. 4195: DNA330436, MIR, 223129_x_at
FIG. 4196: PRO85639
FIG. 4197: DNA330513, AF212221, 223130_s_at
FIG. 4198: PRO85703
FIG. 4199A-: DNA330514, DDX36, 223138_s_at
FIG. 4200: PRO85704
FIG. 4201A-: DNA330514, AF217190, 223139_s_at
FIG. 4202: PRO85704
FIG. 4203: DNA325557, NP_115675.1, 223151_at
FIG. 4204: PRO82060
FIG. 4205: DNA329352, NP_057154.2, 223156_at
FIG. 4206: PRO84932
FIG. 4207: DNA329353, NP_113665.1, 223179_at
FIG. 4208: PRO84933
FIG. 4209: DNA254276, NP_054896.1, 223180_s_at
FIG. 4210: PRO49387
FIG. 4211: DNA327953, E2IG5, 223193_x_at
FIG. 4212: PRO83878
FIG. 4213A-B: DNA281444, NP_064544.1,
223197_s_at
FIG. 4214: PRO66283
FIG. 4215: DNA304467, NP_115703.1, 223212_at
FIG. 4216: PRO71043
FIG. 4217: DNA227267, LOC55893, 223216_x_at
FIG. 4218: PRO37730
FIG. 4219: DNA327954, NP_113646.1, 223220_s_at
FIG. 4220: PRO83879
FIG. 4221: DNA330515, NP_004580.1, 223221_at
FIG. 4222: PRO85705
FIG. 4223: DNA329321, SEC13L, 223225_s_at
FIG. 4224: PRO84906
FIG. 4225: DNA247474, NP_054895.1, 223229_at
FIG. 4226: PRO44999
FIG. 4227: DNA330516, AK000796, 223239_at
FIG. 4228: PRO85706
FIG. 4229: DNA287171, NP_036312.1, 223240_at
FIG. 4230: PRO69462
FIG. 4231: DNA324046, NP_115700.1, 223272_s_at
FIG. 4232: PRO80763
FIG. 4233: DNA330517, NP_115879.1, 223273_at
FIG. 4234: PRO85707
FIG. 4235: DNA330518, BC002493, 223274_at
FIG. 4236: PRO85708
FIG. 4237: DNA330519, NP_060607.1, 223275_at
FIG. 4238: PRO85709
FIG. 4239: DNA330520, NP_005777.2, 223283_s_at
FIG. 4240: PRO85710
FIG. 4241: DNA330521, BC002762, 223286_at
FIG. 4242: PRO85711
FIG. 4243A-B: DNA330522, AF250920,
223287_s_at
FIG. 4244: PRO85712
FIG. 4245: DNA330523, BC001220, 223294_at
FIG. 4246: PRO85713
FIG. 4247: DNA330524, MGC4268, 223297_at
FIG. 4248: PRO85714
FIG. 4249: DNA329356, NP_115671.1, 223304_at
FIG. 4250: PRO84935
FIG. 4251: DNA330454, BC002551, 223307_at
FIG. 4252: PRO85655
FIG. 4253: DNA330526, NP_115682.1, 223318_s_at
FIG. 4254: PRO34564
FIG. 4255A-B: DNA330527, AF272663, 223319_at
FIG. 4256: PRO85716
FIG. 4257: DNA329358, NP_115649.1, 223334_at
FIG. 4258: PRO84937
FIG. 4259: DNA330528, AF151063, 223335_at
FIG. 4260: PRO50764
FIG. 4261: DNA330529, 241399.1, 223343_at
FIG. 4262: PRO85717
FIG. 4263A-B: DNA255756, HUMPDE7A,
223358_s_at
FIG. 4264: PRO50812
FIG. 4265: DNA227125, AF132297, 223377_x_at
FIG. 4266: PRO37588
FIG. 4267: DNA331614, CDCA1, 223381_at
FIG. 4268: PRO38881
FIG. 4269A-B: DNA329360, NP_115644.1,
223382_s_at
FIG. 4270: PRO84939
FIG. 4271A-B: DNA329360, NIN283, 223383_at
FIG. 4272: PRO84939
FIG. 4273: DNA330531, NP_037508.1, 223394_at
FIG. 4274: PRO85718
FIG. 4275: DNA329361, AF161528, 223397_s_at
FIG. 4276: PRO84940
FIG. 4277: DNA324156, NP_115588.1, 223403_s_at
FIG. 4278: PRO80856
FIG. 4279A-B: DNA254516, C1orf25, 223404_s_at
FIG. 4280: PRO49623
FIG. 4281: DNA256407, NP_055188.1, 223423_at
FIG. 4282: PRO51448
FIG. 4283: DNA255676, HSM801648, 223434_at
FIG. 4284: PRO50738
FIG. 4285: DNA330532, NP_078804.1, 223439_at
FIG. 4286: PRO85719
FIG. 4287: DNA330533, NP_058647.1, 223451_s_at
FIG. 4288: PRO772
FIG. 4289: DNA329365, CAB56010.1, 223452_s_at
FIG. 4290: PRO84944
FIG. 4291: DNA327958, NP_115789.1, 223484_at
FIG. 4292: PRO23554
FIG. 4293: DNA329456, NP_057126.1, 223489_x_at
FIG. 4294: PRO85023
FIG. 4295: DNA329456, RRP40, 223490_s_at
FIG. 4296: PRO85023
FIG. 4297: DNA330534, AF307332, 223494_at
FIG. 4298: PRO85720
FIG. 4299: DNA304784, NP_006564.1, 223502_s_at
FIG. 4300: PRO738
FIG. 4301: DNA330535, NP_115883.1, 223506_at
FIG. 4302: PRO85721
FIG. 4303: DNA330536, NP_115666.1, 223542_at
FIG. 4304: PRO85722
FIG. 4305: DNA330537, AF155827, 223556_at
FIG. 4306: PRO81892
FIG. 4307A-B: DNA327908, HSM801808,
223570_at
FIG. 4308: PRO83843
FIG. 4309: DNA330538, AF262027, 223598_at
FIG. 4310: PRO85723
FIG. 4311: DNA330539, NP_055411.1, 223639_s_at
FIG. 4312: PRO85724
FIG. 4313: DNA330540, NP_055081.1, 223640_at
FIG. 4314: PRO85725
FIG. 4315: DNA330541, AF277625, 223675_s_at
FIG. 4316: PRO85726
FIG. 4317: DNA330542, NP_115493.1, 223700_at
FIG. 4318: PRO85727
FIG. 4319: DNA330543, NAG73, 223725_at
FIG. 4320: PRO85728
FIG. 4321: DNA329367, TTYH2, 223741_s_at
FIG. 4322: PRO84946
FIG. 4323: DNA331615, AB049635, 223743_s_at
FIG. 4324: PRO62669
FIG. 4325: DNA188735, NP_001506.1, 223758_s_at
FIG. 4326: PRO26224
FIG. 4327: DNA287253, LOC85028, 223774_at
FIG. 4328: PRO69527
FIG. 4329: DNA331616, BC004277, 223785_at
FIG. 4330: PRO86613
FIG. 4331: DNA330544, NP_277049.1, 223800_s_at
FIG. 4332: PRO85729
FIG. 4333: DNA256005, NP_004842.1, 223806_s_at
FIG. 4334: PRO51056
FIG. 4335: DNA330545, AF233516, 223834_at
FIG. 4336: PRO70906
FIG. 4337: DNA327200, NP_114156.1, 223836_at
FIG. 4338: PRO1065
FIG. 4339: DNA330546, AF132203, 223839_s_at
FIG. 4340: PRO85730
FIG. 4341: DNA330547, NP_066014.1, 223849_s_at
FIG. 4342: PRO85731
FIG. 4343: DNA331392, NP_004186.1, 223851_s_at
FIG. 4344: PRO364
FIG. 4345: DNA330548, NP_115590.1, 223880_x_at
FIG. 4346: PRO85732
FIG. 4347A-B: DNA330522, FOXP1, 223936_s_at
FIG. 4348: PRO85712
FIG. 4349A-B: DNA330550, HSM801744,
223946_at
FIG. 4350: PRO85734
FIG. 4351: DNA331393, D83532, 223961_s_at
FIG. 4352: PRO86458
FIG. 4353: DNA324248, SP110, 223980_s_at
FIG. 4354: PRO80932
FIG. 4355: DNA330551, BC009946, 223983_s_at
FIG. 4356: PRO85735
FIG. 4357: DNA330552, BC001104, 223984_s_at
FIG. 4358: PRO85736
FIG. 4359: DNA328847, NP_056338.1, 223989_s_at
FIG. 4360: PRO84579
FIG. 4361: DNA331617, AF332652, 224046_s_at
FIG. 4362: PRO86614
FIG. 4363: DNA329369, AF293026, 224130_s_at
FIG. 4364: PRO84948
FIG. 4365: DNA330553, AF116653, 224148_at
FIG. 4366: DNA331618, AF231339, 224204_x_at
FIG. 4367: PRO86615
FIG. 4368: DNA330554, AF277993, 224211_at
FIG. 4369: PRO85737
FIG. 4370A-C: DNA227619, NP_054831.1,
224218_s_at
FIG. 4371: PRO38082
FIG. 4372: DNA324707, NP_037369.1, 224232_s_at
FIG. 4373: PRO81339
FIG. 4374: DNA323935, NP_060586.1, 224233_s_at
FIG. 4375: PRO80668
FIG. 4376: DNA329370, NP_060611.2, 224247_s_at
FIG. 4377: PRO84949
FIG. 4378A-B: DNA330555, HSM801768,
224308_s_at
FIG. 4379: PRO85738
FIG. 4380: DNA330556, NP_061881.2, 224319_s_at
FIG. 4381: PRO85739
FIG. 4382: DNA330557, C20orf154, 224320_s_at
FIG. 4383: PRO85740
FIG. 4384: DNA330558, NP_057588.1, 224330_s_at
FIG. 4385: PRO84950
FIG. 4386: DNA327949, MRP64, 224334_s_at
FIG. 4387: PRO83874
FIG. 4388A-B: DNA330559, BAB21791.1,
224336_s_at
FIG. 4389: PRO85741
FIG. 4390: DNA331619, BC010896, 224345_x_at
FIG. 4391: PRO86616
FIG. 4392: DNA331620, NDRG3, 224368_s_at
FIG. 4393: PRO86617
FIG. 4394: DNA272626, RIP5, 224376_s_at
FIG. 4395: PRO60759
FIG. 4396: DNA330560, NP_510882.1, 224413_s_at
FIG. 4397: PRO85742
FIG. 4398: DNA330561, AF321617, 224416_s_at
FIG. 4399: PRO85743
FIG. 4400: DNA328323, NP_114148.2, 224428_s_at
FIG. 4401: PRO69531
FIG. 4402: DNA331621, AF060225, 224437_s_at
FIG. 4403: PRO86618
FIG. 4404: DNA330562, NP_115716.1, 224448_s_at
FIG. 4405: PRO85744
FIG. 4406: DNA330563, NP_113668.1, 224450_s_at
FIG. 4407: PRO85745
FIG. 4408: DNA330564, NP_115885.1, 224451_x_at
FIG. 4409: PRO85746
FIG. 4410: DNA330565, BC006111, 224454_at
FIG. 4411: PRO85747
FIG. 4412: DNA330566, NP_115720.1, 224464_s_at
FIG. 4413: PRO85748
FIG. 4414: DNA329373, NP_15722.1, 224467_s_at
FIG. 4415: PRO84952
FIG. 4416: DNA330567, NP_116114.1, 224504_s_at
FIG. 4417: PRO85749
FIG. 4418: DNA327976, NP_116120.1, 224511_s_at
FIG. 4419: PRO69574
FIG. 4420: DNA330568, BC006428, 224516_s_at
FIG. 4421: PRO85750
FIG. 4422: DNA329374, NP_115735.1, 224523_s_at
FIG. 4423: PRO84953
FIG. 4424: DNA331622, TNFRSF18, 224553_s_at
FIG. 4425: PRO86619
FIG. 4426: DNA330569, BC020516, 224572_s_at
FIG. 4427A-B: DNA330570, AB040903, 224578_at
FIG. 4428: DNA330571, AK027320, 224607_s_at
FIG. 4429: PRO85752
FIG. 4430: DNA327980, BC008959, 224615_x_at
FIG. 4431: PRO83900
FIG. 4432: DNA329376, BAA91036.1, 224632_at
FIG. 4433: PRO84954
FIG. 4434: DNA330572, CAB82324.1, 224648_at
FIG. 4435: PRO85753
FIG. 4436A-B: DNA327981, 344095.3, 224654_at
FIG. 4437: PRO83901
FIG. 4438: DNA330573, C20orf108, 224690_at
FIG. 4439: PRO85754
FIG. 4440A-B: DNA330574, AB033054, 224698_at
FIG. 4441: DNA330575, AK022542, 224701_at
FIG. 4442: PRO85756
FIG. 4443: DNA331623, BC014138, 224711_at
FIG. 4444: PRO86620
FIG. 4445: DNA329378, BC022990, 224713_at
FIG. 4446: PRO84956
FIG. 4447: DNA324173, NP_115766.2, 224714_at
FIG. 4448: PRO80871
FIG. 4449: DNA330577, NP_443076.1, 224715_at
FIG. 4450: PRO85758
FIG. 4451A-B: DNA330578, 1353105.1, 224718_at
FIG. 4452: PRO85759
FIG. 4453: DNA330579, BC009925, 224719_s_at
FIG. 4454: PRO85760
FIG. 4455: DNA287382, 1383817.3, 224738_x_at
FIG. 4456: PRO69641
FIG. 4457: DNA257352, DNA257352, 224739_at
FIG. 4458: PRO51940
FIG. 4459: DNA331624, BC014242, 224740_at
FIG. 4460: PRO86621
FIG. 4461: DNA330581, MGC16386, 224753_at
FIG. 4462: PRO82014
FIG. 4463: DNA330582, 1454377.6, 224755_at
FIG. 4464: PRO85762
FIG. 4465: DNA330583, BC020522, 224759_s_at
FIG. 4466: PRO85763
FIG. 4467A-B: DNA287330, BAA86479.1,
224799_at
FIG. 4468: PRO69594
FIG. 4469A-B: DNA330584, FENS-1, 224800_at
FIG. 4470: PRO85764
FIG. 4471: DNA331397, AK001723, 224802_at
FIG. 4472: PRO23259
FIG. 4473: DNA330585, 206983.10, 224806_at
FIG. 4474: PRO85765
FIG. 4475: DNA330586, NP_443183.1, 224825_at
FIG. 4476: PRO85766
FIG. 4477A-B: DNA330559, AB051487, 224832_at
FIG. 4478A-B: DNA330809, 336997.1, 224838_at
FIG. 4479: PRO85973
FIG. 4480A-B: DNA330587, 1045521.4,
224839_s_at
FIG. 4481: PRO85767
FIG. 4482: DNA329380, BC014868, 224855_at
FIG. 4483: PRO80743
FIG. 4484: DNA330588, BC019034, 224871_at
FIG. 4485: PRO85768
FIG. 4486: DNA196374, DNA196374, 224880_at
FIG. 4487A-B: DNA331625, 411236.19, 224897_at
FIG. 4488: PRO86622
FIG. 4489: DNA329382, BC009072, 224913_s_at
FIG. 4490: DNA330590, CIP29, 224914_s_at
FIG. 4491: PRO85770
FIG. 4492A-B: DNA169523, DNA169523,
224917_at
FIG. 4493: PRO23253
FIG. 4494: DNA330591, NP_115865.1, 224919_at
FIG. 4495: PRO85771
FIG. 4496: DNA330592, AB014733, 224953_at
FIG. 4497: DNA287258, C20orf52, 224972_at
FIG. 4498: PRO52174
FIG. 4499: DNA151170, DNA151170, 224989_at
FIG. 4500: PRO12626
FIG. 4501: DNA330593, HS126A53, 225005_at
FIG. 4502A-B: DNA329385, 330826.1, 225010_at
FIG. 4503: PRO84961
FIG. 4504: DNA161646, DNA161646, 225036_at
FIG. 4505: DNA330594, BC005148, 225039_at
FIG. 4506: DNA331626, 412293.2, 225047_at
FIG. 4507: PRO86623
FIG. 4508: DNA195755, DNA195755, 225051_at
FIG. 4509A-B: DNA330596, 998535.1, 225070_at
FIG. 4510: PRO85774
FIG. 4511A-C: DNA271612, BAA92642.1,
225076_s_at
FIG. 4512: PRO59899
FIG. 4513: DNA330597, NP_057291.1, 225082_at
FIG. 4514: PRO85775
FIG. 4515: DNA330598, 1384569.2, 225086_at
FIG. 4516: PRO85776
FIG. 4517: DNA330599, 898528.3, 225095_at
FIG. 4518: PRO85777
FIG. 4519: DNA330600, HSA272196, 225096_at
FIG. 4520: PRO85778
FIG. 4521: DNA330601, 1322727.6, 225098_at
FIG. 4522: PRO85779
FIG. 4523: DNA331627, BC013920, 225105_at
FIG. 4524: PRO86624
FIG. 4525: DNA225597, NP_060703.1, 225106_s_at
FIG. 4526: PRO36060
FIG. 4527A-B: DNA331628, 245994.3, 225113_at
FIG. 4528: PRO86625
FIG. 4529A-B: DNA327993, 898436.7, 225133_at
FIG. 4530: PRO81138
FIG. 4531: DNA155396, DNA155396, 225143_at
FIG. 4532: DNA330603, 235138.16, 225157_at
FIG. 4533: PRO85781
FIG. 4534: DNA329393, NP_079272.4, 225158_at
FIG. 4535: PRO84969
FIG. 4536: DNA329393, EFG1, 225161_at
FIG. 4537: PRO84969
FIG. 4538: DNA330604, NP_277050.1, 225171_at
FIG. 4539: PRO85782
FIG. 4540: DNA327996, BC010181, 225195_at
FIG. 4541: PRO83915
FIG. 4542: DNA199601, DNA199601, 225199_at
FIG. 4543: DNA329394, BC010416, 225201_s_at
FIG. 4544: DNA329396, NP_060866.1, 225253_s_at
FIG. 4545: PRO84972
FIG. 4546: DNA329397, NP_114109.1, 225260_s_at
FIG. 4547: PRO84973
FIG. 4548A-B: DNA329398, 411135.13, 225262_at
FIG. 4549: PRO4805
FIG. 4550A-B: DNA258863, DNA258863,
225266_at
FIG. 4551A-B: DNA331629, 233102.7, 225269_s_at
FIG. 4552: PRO86626
FIG. 4553A-B: DNA330606, 475590.1, 225290_at
FIG. 4554: PRO85784
FIG. 4555: DNA329400, BC005986, 225291_at
FIG. 4556: DNA326458, BC014003, 225297_at
FIG. 4557: PRO82841
FIG. 4558: DNA330607, 167391.12, 225300_at
FIG. 4559: PRO85785
FIG. 4560: DNA330608, BC016880, 225323_at
FIG. 4561: PRO85786
FIG. 4562A-B: DNA169918, DNA169918,
225340_s_at
FIG. 4563: PRO23256
FIG. 4564: DNA330609, AF419331, 225348_at
FIG. 4565: PRO22196
FIG. 4566: DNA327965, NP_060760.1, 225367_at
FIG. 4567: PRO83888
FIG. 4568: DNA273635, HSM801117, 225371_at
FIG. 4569A-B: DNA330610, BAB15739.1,
225372_at
FIG. 4570: PRO85787
FIG. 4571: DNA331630, BC020568, 225373_at
FIG. 4572: PRO86627
FIG. 4573A-B: DNA331631, 1383781.5,
225385_s_at
FIG. 4574: PRO86628
FIG. 4575: DNA329401, BC017480, 225386_s_at
FIG. 4576: PRO84976
FIG. 4577: DNA329402, 198708.7, 225387_at
FIG. 4578: PRO4845
FIG. 4579: DNA329403, AF288394, 225399_at
FIG. 4580: DNA331632, BC022030, 225400_at
FIG. 4581: PRO86629
FIG. 4582: DNA330612, C20orf64, 225402_at
FIG. 4583: PRO85789
FIG. 4584A-B: DNA328893, BC020490, 225406_at
FIG. 4585: PRO9914
FIG. 4586: DNA330613, BC019355, 225414_at
FIG. 4587A-B: DNA331633, 1449606.5, 225433_at
FIG. 4588: PRO86630
FIG. 4589: DNA304802, AAH00967.1, 225439_at
FIG. 4590: PRO71212
FIG. 4591: DNA328005, BC004413, 225440_at
FIG. 4592: DNA330615, NP_115732.1, 225441_x_at
FIG. 4593: PRO85791
FIG. 4594: DNA330616, 429555.1, 225443_at
FIG. 4595: PRO85792
FIG. 4596A-B: DNA330617, 336147.2, 225447_at
FIG. 4597: PRO59923
FIG. 4598: DNA329404, BC013949, 225454_at
FIG. 4599: PRO82972
FIG. 4600: DNA330618, CAB55990.1, 225457_s_at
FIG. 4601: PRO85793
FIG. 4602: DNA330618, HSM801081, 225458_at
FIG. 4603: DNA196561, DNA196561, 225470_at
FIG. 4604: DNA329405, HSM800962, 225520_at
FIG. 4605A-B: DNA330619, BC013128, 225527_at
FIG. 4606: PRO12186
FIG. 4607A-B: DNA330620, CAB55950.1,
225533_at
FIG. 4608: PRO85794
FIG. 4609: DNA330621, AF116628, 225535_s_at
FIG. 4610: DNA328008, 240051.4, 225541_at
FIG. 4611: PRO83926
FIG. 4612A-B: DNA330622, 233388.8, 225543_at
FIG. 4613: PRO85796
FIG. 4614: DNA330623, 1502854.5, 225549_at
FIG. 4615: PRO85797
FIG. 4616: DNA329406, 1503139.10, 225562_at
FIG. 4617: PRO84979
FIG. 4618: DNA330624, AK000500, 225580_at
FIG. 4619: PRO85798
FIG. 4620: DNA330625, AK025643, 225581_s_at
FIG. 4621: PRO85799
FIG. 4622: DNA304469, NP_149078.1, 225621_at
FIG. 4623: PRO71045
FIG. 4624: DNA151667, DNA151667, 225634_at
FIG. 4625: PRO11970
FIG. 4626: DNA330626, 1398905.1, 225638_at
FIG. 4627: PRO85800
FIG. 4628: DNA331634, CTSC, 225647_s_at
FIG. 4629: PRO86631
FIG. 4630A-B: DNA288261, NP_037414.2,
225655_at
FIG. 4631: PRO70021
FIG. 4632: DNA329408, NP_056235.2, 225676_s_at
FIG. 4633: PRO38893
FIG. 4634A-B: DNA330627, 987725.3, 225679_at
FIG. 4635: PRO85801
FIG. 4636: DNA329409, BC017248, 225682_s_at
FIG. 4637: PRO84981
FIG. 4638: DNA325272, NP_054891.1, 225683_x_at
FIG. 4639: PRO81822
FIG. 4640: DNA328012, BC017873, 225686_at
FIG. 4641: PRO83930
FIG. 4642: DNA328013, AAH01068.1, 225687_at
FIG. 4643: PRO83931
FIG. 4644A-C: DNA330628, 1400234.13, 225690_at
FIG. 4645: PRO85802
FIG. 4646A-B: DNA330629, BAA74856.2,
225692_at
FIG. 4647: PRO50227
FIG. 4543: DNA329394, BC010416, 225201_s_at
FIG. 4544: DNA329396, NP_060866.1, 225253_s_at
FIG. 4545: PRO84972
FIG. 4546: DNA329397, NP_114109.1, 225260_s_at
FIG. 4547: PRO84973
FIG. 4548A-B: DNA329398, 411135.13, 225262_at
FIG. 4549: PRO4805
FIG. 4550A-B: DNA258863, DNA258863,
225266_at
FIG. 4551A-B: DNA331629, 233102.7, 225269_s_at
FIG. 4552: PRO86626
FIG. 4553A-B: DNA330606, 475590.1, 225290_at
FIG. 4554: PRO85784
FIG. 4555: DNA329400, BC005986, 225291_at
FIG. 4556: DNA326458, BC014003, 225297_at
FIG. 4557: PRO82841
FIG. 4558: DNA330607, 167391.12, 225300_at
FIG. 4559: PRO85785
FIG. 4560: DNA330608, BC016880, 225323_at
FIG. 4561: PRO85786
FIG. 4562A-B: DNA169918, DNA169918,
225340_s_at
FIG. 4563: PRO23256
FIG. 4564: DNA330609, AF419331, 225348_at
FIG. 4565: PRO22196
FIG. 4566: DNA327965, NP_060760.1, 225367_at
FIG. 4567: PRO83888
FIG. 4568: DNA273635, HSM801117, 225371_at
FIG. 4569A-B: DNA330610, BAB15739.1,
225372_at
FIG. 4570: PRO85787
FIG. 4571: DNA331630, BC020568, 225373_at
FIG. 4572: PRO86627
FIG. 4573A-B: DNA331631, 1383781.5,
225385_s_at
FIG. 4574: PRO86628
FIG. 4575: DNA329401, BC017480, 225386_s_at
FIG. 4576: PRO84976
FIG. 4577: DNA329402, 198708.7, 225387_at
FIG. 4578: PRO4845
FIG. 4579: DNA329403, AF288394, 225399_at
FIG. 4580: DNA331632, BC022030, 225400_at
FIG. 4581: PRO86629
FIG. 4582: DNA330612, C20orf64, 225402_at
FIG. 4583: PRO85789
FIG. 4584A-B: DNA328893, BC020490, 225406_at
FIG. 4585: PRO9914
FIG. 4586: DNA330613, BC019355, 225414_at
FIG. 4587A-B: DNA331633, 1449606.5, 225433_at
FIG. 4588: PRO86630
FIG. 4589: DNA304802, AAH00967.1, 225439_at
FIG. 4590: PRO71212
FIG. 4591: DNA328005, BC004413, 225440_at
FIG. 4592: DNA330615, NP_115732.1, 225441_x_at
FIG. 4593: PRO85791
FIG. 4594: DNA330616, 429555.1, 225443_at
FIG. 4595: PRO85792
FIG. 4596A-B: DNA330617, 336147.2, 225447_at
FIG. 4597: PRO59923
FIG. 4598: DNA329404, BC013949, 225454_at
FIG. 4599: PRO82972
FIG. 4600: DNA330618, CAB55990.1, 225457_s_at
FIG. 4601: PRO85793
FIG. 4602: DNA330618, HSM801081, 225458_at
FIG. 4603: DNA196561, DNA196561, 225470_at
FIG. 4604: DNA329405, HSM800962, 225520_at
FIG. 4605A-B: DNA330619, BC013128, 225527_at
FIG. 4606: PRO12186
FIG. 4607A-B: DNA330620, CAB55950.1,
225533_at
FIG. 4608: PRO85794
FIG. 4609: DNA330621, AF116628, 225535_s_at
FIG. 4610: DNA328008, 240051.4, 225541_at
FIG. 4611: PRO83926
FIG. 4612A-B: DNA330622, 233388.8, 225543_at
FIG. 4613: PRO85796
FIG. 4614: DNA330623, 1502854.5, 225549_at
FIG. 4615: PRO85797
FIG. 4616: DNA329406, 1503139.10, 225562_at
FIG. 4617: PRO84979
FIG. 4618: DNA330624, AK000500, 225580_at
FIG. 4619: PRO85798
FIG. 4620: DNA330625, AK025643, 225581_s_at
FIG. 4621: PRO85799
FIG. 4622: DNA304469, NP_149078.1, 225621_at
FIG. 4623: PRO71045
FIG. 4624: DNA151667, DNA151667, 225634_at
FIG. 4625: PRO11970
FIG. 4626: DNA330626, 1398905.1, 225638_at
FIG. 4627: PRO85800
FIG. 4628: DNA331634, CTSC, 225647_s_at
FIG. 4629: PRO86631
FIG. 4630A-B: DNA288261, NP_037414.2,
225655_at
FIG. 4631: PRO70021
FIG. 4632: DNA329408, NP_056235.2, 225676_s_at
FIG. 4633: PRO38893
FIG. 4634A-B: DNA330627, 987725.3, 225679_at
FIG. 4635: PRO85801
FIG. 4636: DNA329409, BC017248, 225682_s_at
FIG. 4637: PRO84981
FIG. 4638: DNA325272, NP_054891.1, 225683_x_at
FIG. 4639: PRO81822
FIG. 4640: DNA328012, BC017873, 225686_at
FIG. 4641: PRO83930
FIG. 4642: DNA328013, AAH01068.1, 225687_at
FIG. 4643: PRO83931
FIG. 4644A-C: DNA330628, 1400234.13, 225690_at
FIG. 4645: PRO85802
FIG. 4646A-B: DNA330629, BAA74856.2,
225692_at
FIG. 4647: PRO50227
FIG. 4648: DNA273623, AY037153, 225693_s_at
FIG. 4649: PRO61596
FIG. 4650: DNA330630, TIGA1, 225698_at
FIG. 4651: PRO85803
FIG. 4652A-B: DNA331635, BAB13371.1,
225704_at
FIG. 4653: PRO86632
FIG. 4654: DNA331636, 221395.1, 225716_at
FIG. 4655: PRO86633
FIG. 4656: DNA330633, BC003515, 225723_at
FIG. 4657A-B: DNA330634, 243208.1, 225725_at
FIG. 4658: PRO85806
FIG. 4659A-B: DNA330635, 233691.4, 225736_at
FIG. 4660: PRO85807
FIG. 4661: DNA324266, NP_056268.1, 225741_at
FIG. 4662: PRO80949
FIG. 4663: DNA323970, MGC21854, 225763_at
FIG. 4664: PRO80699
FIG. 4665: DNA331637, 7693984.1, 225768_at
FIG. 4666: PRO86634
FIG. 4667: DNA330636, NP_201575.2, 225794_s_at
FIG. 4668: PRO85808
FIG. 4669: DNA330636, LOC91689, 225795_at
FIG. 4670: PRO85808
FIG. 4671: DNA329414, MGC4677, 225799_at
FIG. 4672: PRO84986
FIG. 4673: DNA330637, NP_478136.1, 225803_at
FIG. 4674: PRO85809
FIG. 4675A-C: DNA330638, CAB63749.1,
225814_at
FIG. 4676: PRO85810
FIG. 4677: DNA330639, 420605.8, 225834_at
FIG. 4678: PRO85811
FIG. 4679: DNA329417, 411336.1, 225842_at
FIG. 4680: PRO84989
FIG. 4681: DNA287622, AF041429, 225849_s_at
FIG. 4682: DNA329418, BC018969, 225850_at
FIG. 4683: PRO19906
FIG. 4684: DNA287370, BAB14983.1, 225866_at
FIG. 4685: PRO69630
FIG. 4686A-B: DNA331638, 1097910.3, 225886_at
FIG. 4687: PRO86635
FIG. 4688A-B: DNA331639, 1391157.25, 225888_at
FIG. 4689: PRO86636
FIG. 4690: DNA330642, NP_115494.1, 225898_at
FIG. 4691: PRO85814
FIG. 4692A-B: DNA331640, 481415.9, 225927_at
FIG. 4693: PRO86637
FIG. 4694A-B: DNA255887, BAB13380.1,
225929_s_at
FIG. 4695: PRO50940
FIG. 4696A-B: DNA255887, AB046774,
225931_s_at
FIG. 4697A-B: DNA330644, 236657.4, 225935_at
FIG. 4698: PRO85816
FIG. 4699: DNA331641, AK027752, 225959_s_at
FIG. 4700: PRO86638
FIG. 4701A-B: DNA329360, AF378524, 225962_at
FIG. 4702: PRO84939
FIG. 4703: DNA329420, BC018014, 225970_at
FIG. 4704A-B: DNA330645, 350385.2, 225973_at
FIG. 4705: PRO85817
FIG. 4706A-B: DNA329421, 343552.1, 225974_at
FIG. 4707: PRO84992
FIG. 4708A-B: DNA331642, BAB15719.1,
225979_at
FIG. 4709: PRO86639
FIG. 4710: DNA330647, AK002174, 226001_at
FIG. 4711: PRO85819
FIG. 4712: DNA330648, 1399123.1, 226005_at
FIG. 4713: PRO85820
FIG. 4714: DNA330649, AK056957, 226008_at
FIG. 4715: PRO85821
FIG. 4716A-B: DNA331643, 246054.6, 226021_at
FIG. 4717: PRO86640
FIG. 4718: DNA331644, 027830.2, 226034_at
FIG. 4719: PRO86641
FIG. 4720: DNA328021, BC004538, 226038_at
FIG. 4721: DNA273736, DNA273736, 226040_at
FIG. 4722: DNA330652, CLONE24945, 226055_at
FIG. 4723: PRO85824
FIG. 4724: DNA330653, 7687670.2, 226068_at
FIG. 4725: PRO85825
FIG. 4726: DNA304795, AK056513, 226077_at
FIG. 4727: PRO71207
FIG. 4728A-B: DNA331645, AAD09327.1,
226082_s_at
FIG. 4729: PRO86642
FIG. 4730: DNA287271, NP_116188.2, 226088_at
FIG. 4731: PRO69542
FIG. 4732: DNA330655, AF114264, 226103_at
FIG. 4733: PRO85827
FIG. 4734A-B: DNA330656, AK023825, 226109_at
FIG. 4735: PRO85828
FIG. 4736: DNA329425, BC008294, 226117_at
FIG. 4737: DNA330657, 198409.1, 226140_s_at
FIG. 4738: PRO85829
FIG. 4739: DNA330658, 204262.3, 226157_at
FIG. 4740: PRO85830
FIG. 4741: DNA330659, AF289605, 226175_at
FIG. 4742: PRO85831
FIG. 4743A-B: DNA330660, 979126.7, 226178_at
FIG. 4744: PRO85832
FIG. 4745A-B: DNA259025, DNA259025,
226180_at
FIG. 4746: PRO52958
FIG. 4747: DNA56350, DNA56350, 226181_at
FIG. 4748: PRO956
FIG. 4749: DNA330661, BAB47431.1, 226194_at
FIG. 4750: PRO85833
FIG. 4751A-B: DNA329428, 1446144.8, 226218_at
FIG. 4752: PRO84999
FIG. 4753: DNA195822, DNA195822, 226241_s_at
FIG. 4754A-B: DNA330662, 334156.1, 226252_at
FIG. 4755: PRO85834
FIG. 4756: DNA331646, 956845.3, 226261_at
FIG. 4757: PRO86643
FIG. 4758A-B: DNA330664, 400637.4, 226265_at
FIG. 4759: PRO85836
FIG. 4760A-B: DNA330665, 233070.3, 226270_at
FIG. 4761: PRO85837
FIG. 4762: DNA330666, 199829.14, 226272_at
FIG. 4763: PRO85838
FIG. 4764: DNA193896, DNA193896, 226276_at
FIG. 4765: PRO23314
FIG. 4766: DNA330667, AF301222, 226287_at
FIG. 4767: DNA330668, BC010176, 226308_at
FIG. 4768: PRO85840
FIG. 4769: DNA328028, NP_005773.1, 226319_s_at
FIG. 4770: PRO83945
FIG. 4771: DNA328028, ALY, 226320_at
FIG. 4772: PRO83945
FIG. 4773: DNA330669, 236903.4, 226321_at
FIG. 4774: PRO85841
FIG. 4775: DNA330670, BC018453, 226329_s_at
FIG. 4776: PRO85842
FIG. 4777A-B: DNA330671, 228447.18, 226342_at
FIG. 4778: PRO85843
FIG. 4779: DNA330672, 255309.4, 226347_at
FIG. 4780: PRO85844
FIG. 4781: DNA330673, 236879.2, 226348_at
FIG. 4782: PRO85845
FIG. 4783: DNA329430, NP_116191.2, 226353_at
FIG. 4784: PRO38524
FIG. 4785: DNA331647, 236137.11, 226354_at
FIG. 4786: PRO86644
FIG. 4787A-B: DNA330675, 177663.2, 226368_at
FIG. 4788: PRO85847
FIG. 4789: DNA330676, CAA11393.1, 226388_at
FIG. 4790: PRO85848
FIG. 4791: DNA330677, 1384190.6, 226390_at
FIG. 4792: PRO85849
FIG. 4793: DNA151740, DNA151740, 226419_s_at
FIG. 4794: PRO12029
FIG. 4795: DNA329433, NP_115937.1, 226442_at
FIG. 4796: PRO85003
FIG. 4797: DNA330678, 401430.1, 226444_at
FIG. 4798: PRO85850
FIG. 4799: DNA287657, BC009447, 226448_at
FIG. 4800: PRO69688
FIG. 4801: DNA330679, BC013040, 226456_at
FIG. 4802A-B: DNA330680, BC022792, 226477_at
FIG. 4803: PRO85852
FIG. 4804: DNA326066, NP_291022.1, 226488_at
FIG. 4805: PRO82501
FIG. 4806A-B: DNA330681, 971066.5, 226503_at
FIG. 4807: PRO85853
FIG. 4808: DNA330682, HSM801031, 226510_at
FIG. 4809: DNA304794, NP_115521.2, 226541_at
FIG. 4810: PRO71206
FIG. 4811: DNA330683, 1446727.8, 226546_at
FIG. 4812: PRO85854
FIG. 4813: DNA330684, 984114.1, 226548_at
FIG. 4814: PRO85855
FIG. 4815A-B: DNA328031, 331264.1, 226587_at
FIG. 4816: PRO83948
FIG. 4817: DNA330685, BAB13430.1, 226588_at
FIG. 4818: PRO85856
FIG. 4819A-B: DNA330686, 1502531.18,
226602_s_at
FIG. 4820: PRO85857
FIG. 4821: DNA328033, 1446419.1, 226625_at
FIG. 4822: PRO83949
FIG. 4823: DNA330687, 215158.5, 226650_at
FIG. 4824: PRO85858
FIG. 4825: DNA258913, DNA258913, 226661_at
FIG. 4826: PRO52846
FIG. 4827A-C: DNA328462, HSA303079,
226694_at
FIG. 4828: PRO84288
FIG. 4829: DNA328037, BC016969, 226702_at
FIG. 4830: DNA330688, 240121.1, 226725_at
FIG. 4831: PRO85859
FIG. 4832A-C: DNA330689, 978733.6, 226732_at
FIG. 4833: PRO85860
FIG. 4834: DNA257914, DNA257914, 226743_at
FIG. 4835: PRO52447
FIG. 4836: DNA330690, 245065.1, 226745_at
FIG. 4837: PRO85861
FIG. 4838: DNA330691, BC022075, 226748_at
FIG. 4839: PRO85862
FIG. 4840: DNA329435, 347092.10, 226750_at
FIG. 4841: PRO85005
FIG. 4842: DNA331648, 243999.3, 226757_at
FIG. 4843: PRO86645
FIG. 4844: DNA330692, 1446140.1, 226758_at
FIG. 4845: PRO85863
FIG. 4846A-B: DNA330331, AB032963, 226771_at
FIG. 4847: DNA330693, HSBRN1H12, 226773_at
FIG. 4848A-B: DNA330694, 481455.4, 226810_at
FIG. 4849: PRO85865
FIG. 4850: DNA330695, 404167.9, 226818_at
FIG. 4851: PRO85866
FIG. 4852A-C: DNA330696, 404167.10, 226841_at
FIG. 4853: PRO85867
FIG. 4854: DNA330697, BC011808, 226858_at
FIG. 4855: PRO85868
FIG. 4856A-B: DNA329436, 236863.1, 226869_at
FIG. 4857: PRO85006
FIG. 4858: DNA330698, BC020852, 226896_at
FIG. 4859: PRO85869
FIG. 4860: DNA329437, 156503.10, 226901_at
FIG. 4861: PRO85007
FIG. 4862: DNA330699, BC014203, 226905_at
FIG. 4863: DNA330564, ARHGAP9, 226906_s_at
FIG. 4864: PRO85746
FIG. 4865: DNA327917, BC000798, 226915_s_at
FIG. 4866: PRO83852
FIG. 4867A-C: DNA331649, 201042.4, 226921_at
FIG. 4868: PRO86646
FIG. 4869: DNA328044, 039170.3, 226936_at
FIG. 4870: PRO83958
FIG. 4871: DNA151713, DNA151713, 226943_at
FIG. 4872: PRO12003
FIG. 4873: DNA330701, NP_115652.1, 226945_at
FIG. 4874: PRO85872
FIG. 4875: DNA330702, 023085.2, 226965_at
FIG. 4876: PRO85873
FIG. 4877: DNA330703, 201413.1, 226970_at
FIG. 4878: PRO85874
FIG. 4879: DNA154627, DNA154627, 226976_at
FIG. 4880: DNA330704, BC019075, 226980_at
FIG. 4881: PRO85875
FIG. 4882A-B: DNA331650, HSA314788,
226998_at
FIG. 4883: PRO85008
FIG. 4884: DNA329439, HSM802614, 227014_at
FIG. 4885A-B: DNA330705, 198782.1, 227020_at
FIG. 4886: PRO85876
FIG. 4887A-B: DNA330706, AF445027, 227027_at
FIG. 4888: PRO85877
FIG. 4889: DNA330707, 028375.3, 227044_at
FIG. 4890: PRO85878
FIG. 4891: DNA330708, 1101317.1, 227066_at
FIG. 4892: PRO85879
FIG. 4893: DNA329440, 7691797.1, 227068_at
FIG. 4894: PRO85009
FIG. 4895: DNA330709, 7692923.1, 227117_at
FIG. 4896: PRO85880
FIG. 4897: DNA323785, NP_116261.1, 227134_at
FIG. 4898: PRO80537
FIG. 4899: DNA330710, 331040.11, 227135_at
FIG. 4900: PRO85881
FIG. 4901A-B: DNA330711, 425448.18, 227150_at
FIG. 4902: PRO85882
FIG. 4903: DNA330712, 1452648.12, 227167_s_at
FIG. 4904: PRO85883
FIG. 4905: DNA328281, BC000282, 227172_at
FIG. 4906: DNA330713, 334485.4, 227187_at
FIG. 4907: PRO85884
FIG. 4908: DNA330714, 034544.1, 227198_at
FIG. 4909: PRO85885
FIG. 4910: DNA330715, BC022374, 227211_at
FIG. 4911: PRO85886
FIG. 4912A-B: DNA330620, HSM800990,
227212_s_at
FIG. 4913: DNA330716, BC021675, 227236_at
FIG. 4914: PRO85887
FIG. 4915: DNA251633, AK023151, 227245_at
FIG. 4916: PRO47694
FIG. 4917: DNA327206, AY037161, 227262_at
FIG. 4918: PRO271
FIG. 4919A-B: DNA329442, AH007300S2,
227265_at
FIG. 4920A-B: DNA331651, 099572.12,
227266_s_at
FIG. 4921: PRO86647
FIG. 4922: DNA330717, 232831.10, 227290_at
FIG. 4923: PRO85888
FIG. 4924: DNA329445, 001839.3, 227291_s_at
FIG. 4925: PRO85013
FIG. 4926: DNA330718, 025465.3, 227295_at
FIG. 4927: PRO85889
FIG. 4928: DNA330719, 7697121.1, 227307_at
FIG. 4929: PRO85890
FIG. 4930: DNA330720, 186766.12, 227337_at
FIG. 4931: PRO85891
FIG. 4932: DNA35664, DNA35664, 227345_at
FIG. 4933: PRO34697
FIG. 4934A-B: DNA330721, 198680.1, 227350_at
FIG. 4935: PRO85892
FIG. 4936: DNA226872, NP_001955.1, 227404_s_at
FIG. 4937: PRO37335
FIG. 4938A-B: DNA330722, AB058729, 227418_at
FIG. 4939: DNA330723, AB040960, 227438_at
FIG. 4940: DNA329447, BC016981, 227449_at
FIG. 4941: PRO85015
FIG. 4942: DNA330724, AK056677, 227450_at
FIG. 4943: PRO1575
FIG. 4944A-B: DNA328054, 233014.1, 227458_at
FIG. 4945: PRO83968
FIG. 4946A-B: DNA258781, DNA258781,
227466_at
FIG. 4947: PRO52715
FIG. 4948: DNA329448, BC012948, 227477_at
FIG. 4949: PRO85016
FIG. 4950: DNA329053, LOC51105, 227523_s_at
FIG. 4951: PRO84715
FIG. 4952: DNA330725, 337360.7, 227545_at
FIG. 4953: PRO85894
FIG. 4954: DNA330726, BC014967, 227558_at
FIG. 4955: PRO85895
FIG. 4956A-B: DNA331652, 1447357.3, 227572_at
FIG. 4957: PRO86648
FIG. 4958: DNA330728, HSM801012, 227580_s_at
FIG. 4959: PRO85897
FIG. 4960: DNA330729, 031130.2, 227600_at
FIG. 4961: PRO85898
FIG. 4962A-B: DNA287193, AB037794,
227606_s_at
FIG. 4963: DNA330730, BC010846, 227607_at
FIG. 4964: PRO85899
FIG. 4965: DNA257714, NP_150280.1, 227609_at
FIG. 4966: PRO52268
FIG. 4967: DNA330731, BC012337, 227614_at
FIG. 4968: DNA196237, DNA196237, 227616_at
FIG. 4969A-B: DNA330426, AF085233, 227627_at
FIG. 4970: PRO85631
FIG. 4971A-B: DNA330733, BAA92631.1,
227653_at
FIG. 4972: PRO85902
FIG. 4973: DNA329449, 979180.1, 227682_at
FIG. 4974: PRO85017
FIG. 4975: DNA330734, BC008322, 227686_at
FIG. 4976: PRO85903
FIG. 4977: DNA273987, DNA273987, 227708_at
FIG. 4978: DNA330735, 1400830.3, 227722_at
FIG. 4979: PRO85904
FIG. 4980: DNA329450, BC017226, 227726_at
FIG. 4981: PRO85018
FIG. 4982A-B: DNA330736, BAA86532.1,
227732_at
FIG. 4983: PRO85905
FIG. 4984A-B: DNA330737, 331100.8, 227766_at
FIG. 4985: PRO85906
FIG. 4986: DNA331653, 212641.1, 227792_at
FIG. 4987: PRO86649
FIG. 4988: DNA151733, DNA151733, 227807_at
FIG. 4989: PRO12022
FIG. 4990A-B: DNA330739, AK000004, 227811_at
FIG. 4991: DNA329454, BC022534, 227856_at
FIG. 4992: PRO85022
FIG. 4993: DNA260485, DNA260485, 227867_at
FIG. 4994: PRO54411
FIG. 4995: DNA327214, AK056512, 227873_at
FIG. 4996: PRO83483
FIG. 4997: DNA151503, DNA151503, 227877_at
FIG. 4998: PRO11849
FIG. 4999: DNA329481, NP_057234.2, 227915_at
FIG. 5000: PRO60949
FIG. 5001: DNA329456, AF151860, 227916_x_at
FIG. 5002: PRO85023
FIG. 5003A-B: DNA330740, AY028320S2,
227928_at
FIG. 5004: DNA151580, DNA151580, 227930_at
FIG. 5005: PRO11901
FIG. 5006: DNA330741, 350868.1, 227952_at
FIG. 5007: PRO85909
FIG. 5008A-B: DNA331654, 476805.1, 228006_at
FIG. 5009: PRO86650
FIG. 5010: DNA330539, ZNRD1, 228009_x_at
FIG. 5011: PRO85724
FIG. 5012: DNA150660, NP_057151.1, 228019_s_at
FIG. 5013: PRO12397
FIG. 5014A-B: DNA328432, NP_005768.1,
228030_at
FIG. 5015: PRO61793
FIG. 5016: DNA331655, 1449874.3, 228053_s_at
FIG. 5017: PRO86651
FIG. 5018: DNA330743, AK054689, 228062_at
FIG. 5019: PRO85911
FIG. 5020: DNA331656, 244771.1, 228063_s_at
FIG. 5021: PRO86652
FIG. 5022: DNA331657, BLR1, 228065_at
FIG. 5023: PRO23970
FIG. 5024: DNA329459, 230998.1, 228066_at
FIG. 5025: PRO85026
FIG. 5026: DNA330745, BC011716, 228069_at
FIG. 5027: PRO85913
FIG. 5028: DNA196216, DNA196216, 228071_at
FIG. 5029: DNA329460, BC017117, 228092_at
FIG. 5030: PRO85027
FIG. 5031: DNA330746, 346395.7, 228097_at
FIG. 5032: PRO85914
FIG. 5033: DNA330436, AF187016, 228098_s_at
FIG. 5034: PRO85639
FIG. 5035A-C: DNA331658, 200650.1, 228109_at
FIG. 5036: PRO86653
FIG. 5037: DNA329461, BC016615, 228113_at
FIG. 5038: PRO85028
FIG. 5039: DNA330748, 224725.3, 228159_at
FIG. 5040: PRO85916
FIG. 5041: DNA330749, 337382.1, 228174_at
FIG. 5042: PRO85917
FIG. 5043: DNA330750, 984920.1, 228180_at
FIG. 5044: PRO85918
FIG. 5045: DNA153924, DNA153924, 228188_at
FIG. 5046: DNA330751, 334282.2, 228189_at
FIG. 5047: PRO85919
FIG. 5048: DNA330752, 7694335.3, 228191_at
FIG. 5049: PRO85920
FIG. 5050A-B: DNA331659, 198497.1, 228201_at
FIG. 5051: PRO86654
FIG. 5052A-C: DNA328072, AB051556, 228230_at
FIG. 5053: DNA330754, 349978.1, 228242_at
FIG. 5054: PRO85922
FIG. 5055: DNA328663, CGI-142, 228266_s_at
FIG. 5056: PRO36183
FIG. 5057: DNA260948, DNA260948, 228273_at
FIG. 5058: PRO54700
FIG. 5059: DNA330755, BC020784, 228280_at
FIG. 5060: PRO85923
FIG. 5061: DNA331660, 230589.4, 228281_at
FIG. 5062: PRO86655
FIG. 5063A-B: DNA330757, AB046790, 228323_at
FIG. 5064: DNA304814, BC016879, 228330_at
FIG. 5065: PRO52650
FIG. 5066: DNA194202, DNA194202, 228370_at
FIG. 5067: PRO23594
FIG. 5068: DNA330758, 238545.7, 228381_at
FIG. 5069: PRO85925
FIG. 5070: DNA330759, 337444.1, 228390_at
FIG. 5071: PRO85926
FIG. 5072A-B: DNA330760, 330900.8, 228401_at
FIG. 5073: PRO85927
FIG. 5074: DNA228118, DNA228118, 228456_s_at
FIG. 5075: DNA297188, NP_116233.1, 228468_at
FIG. 5076: PRO70805
FIG. 5077A-C: DNA331661, 388991.1, 228487_s_at
FIG. 5078: PRO86656
FIG. 5079: DNA330762, BC010269, 228499_at
FIG. 5080: PRO80989
FIG. 5081: DNA195938, DNA195938, 228531_at
FIG. 5082: DNA329463, 412954.5, 228532_at
FIG. 5083: PRO85030
FIG. 5084: DNA330763, 1306177.32, 228549_at
FIG. 5085: PRO85929
FIG. 5086: DNA331662, 1450017.11, 228559_at
FIG. 5087: PRO86657
FIG. 5088A-C: DNA331663, 475198.1, 228562_at
FIG. 5089: PRO86658
FIG. 5090: DNA330766, 977419.7, 228597_at
FIG. 5091: PRO85932
FIG. 5092A-B: DNA331664, 201954.14, 228603_at
FIG. 5093: PRO86659
FIG. 5094: DNA328079, 239903.1, 228617_at
FIG. 5095: PRO83991
FIG. 5096: DNA330768, NP_003681.1, 228620_at
FIG. 5097: PRO60565
FIG. 5098A-B: DNA271477, NP_055774.1,
228641_at
FIG. 5099: PRO59770
FIG. 5100: DNA330769, 230457.1, 228664_at
FIG. 5101: PRO85934
FIG. 5102: DNA330770, 1447329.13, 228702_at
FIG. 5103: PRO85935
FIG. 5104: DNA330771, 1447928.4, 228710_at
FIG. 5105: PRO85936
FIG. 5106: DNA330772, 286623.2, 228729_at
FIG. 5107: PRO85937
FIG. 5108: DNA330773, 027401.1, 228758_at
FIG. 5109: PRO85938
FIG. 5110: DNA330774, 024160.1, 228760_at
FIG. 5111: PRO85939
FIG. 5112: DNA273232, DNA273232, 228785_at
FIG. 5113: DNA330775, 407523.3, 228806_at
FIG. 5114: PRO85940
FIG. 5115: DNA330776, NP_005740.1, 228834_at
FIG. 5116: PRO58014
FIG. 5117: DNA256483, HSM802155, 228859_at
FIG. 5118: PRO51520
FIG. 5119: DNA331665, 330848.1, 228869_at
FIG. 5120: PRO86660
FIG. 5121: DNA330778, 998621.10, 228891_at
FIG. 5122: PRO85942
FIG. 5123: DNA328084, 236591.7, 228905_at
FIG. 5124: PRO83996
FIG. 5125: DNA330779, 244243.1, 228953_at
FIG. 5126: PRO85943
FIG. 5127: DNA330780, 335374.1, 228955_at
FIG. 5128: PRO85944
FIG. 5129: DNA330781, 289775.9, 228960_at
FIG. 5130: PRO85945
FIG. 5131A-B: DNA331666, 7684887.1, 228964_at
FIG. 5132: PRO86661
FIG. 5133: DNA330783, 239601.22, 228987_at
FIG. 5134: PRO85947
FIG. 5135: DNA330784, 233595.21, 228990_at
FIG. 5136: PRO85948
FIG. 5137: DNA330785, 475283.24, 228999_at
FIG. 5138: PRO85949
FIG. 5139: DNA330786, 233085.1, 229029_at
FIG. 5140: PRO85950
FIG. 5141: DNA330787, 349981.7, 229040_at
FIG. 5142: PRO85951
FIG. 5143: DNA330788, AF305195, 229060_at
FIG. 5144: PRO85952
FIG. 5145: DNA330789, 199829.13, 229064_s_at
FIG. 5146: PRO85953
FIG. 5147: DNA330790, NP_116133.1, 229070_at
FIG. 5148: PRO85954
FIG. 5149: DNA330791, 7697349.2, 229072_at
FIG. 5150: PRO85955
FIG. 5151: DNA330792, 983946.2, 229097_at
FIG. 5152: PRO85956
FIG. 5153: DNA155281, DNA155281, 229111_at
FIG. 5154: DNA330793, 215114.2, 229145_at
FIG. 5155: PRO85957
FIG. 5156: DNA330794, 481414.8, 229202_at
FIG. 5157: PRO85958
FIG. 5158: DNA330795, BC017339, 229253_at
FIG. 5159: PRO85959
FIG. 5160: DNA265865, DNA265865, 229274_at
FIG. 5161: DNA151375, DNA151375, 229327_s_at
FIG. 5162: PRO11752
FIG. 5163: DNA328919, FLJ22690, 229367_s_at
FIG. 5164: PRO84637
FIG. 5165: DNA257575, DNA257575, 229374_at
FIG. 5166: DNA268708, DNA268708, 229391_s_at
FIG. 5167A-C: DNA331667, 198342.3, 229394_s_at
FIG. 5168: PRO86662
FIG. 5169: DNA287421, 234832.1, 229437_at
FIG. 5170: PRO69678
FIG. 5171: DNA330797, 211332.1, 229442_at
FIG. 5172: PRO85961
FIG. 5173: DNA328090, 007911.2, 229450_at
FIG. 5174: PRO84001
FIG. 5175: DNA330798, 984597.1, 229483_at
FIG. 5176: PRO85962
FIG. 5177: DNA330799, 481875.1, 229551_x_at
FIG. 5178: PRO85963
FIG. 5179: DNA330800, AK056271, 229595_at
FIG. 5180: PRO85964
FIG. 5181: DNA330801, 199864.1, 229610_at
FIG. 5182: PRO85965
FIG. 5183: DNA327205, NP_443174.1, 229625_at
FIG. 5184: PRO83478
FIG. 5185A-B: DNA226321, NP_006021.1,
229636_at
FIG. 5186: PRO36784
FIG. 5187A-B: DNA330802, 7694410.1, 229686_at
FIG. 5188: PRO85966
FIG. 5189: DNA331668, 403448.4, 229699_at
FIG. 5190: PRO86663
FIG. 5191A-C: DNA330804, NP_055847.1,
229704_at
FIG. 5192: PRO85968
FIG. 5193: DNA331669, 1466538.1, 229718_at
FIG. 5194: PRO86664
FIG. 5195A-B: DNA227985, CBX6, 229733_s_at
FIG. 5196: PRO38448
FIG. 5197: DNA330806, 200298.1, 229809_at
FIG. 5198: PRO85970
FIG. 5199: DNA330807, 334422.1, 229814_at
FIG. 5200: PRO85971
FIG. 5201: DNA328092, NP_002598.2, 229830_at
FIG. 5202: PRO84003
FIG. 5203: DNA330808, 1397087.3, 229838_at
FIG. 5204: PRO85972
FIG. 5205: DNA328972, BC009950, 229872_s_at
FIG. 5206A-C: DNA330810, AF330041, 229881_at
FIG. 5207: PRO85974
FIG. 5208: DNA287290, AK001793, 229980_s_at
FIG. 5209: PRO69560
FIG. 5210: DNA330811, 1382987.2, 230000_at
FIG. 5211: PRO85975
FIG. 5212A-B: DNA330812, 000264.19, 230021_at
FIG. 5213: PRO85976
FIG. 5214: DNA330813, 246201.1, 230036_at
FIG. 5215: PRO85977
FIG. 5216: DNA258657, DNA258657, 230060_at
FIG. 5217: PRO52596
FIG. 5218: DNA330814, 309641.1, 230097_at
FIG. 5219: PRO85978
FIG. 5220: DNA329467, 029236.1, 230110_at
FIG. 5221: PRO85033
FIG. 5222: DNA330815, AK057940, 230165_at
FIG. 5223: PRO85979
FIG. 5224: DNA329468, BC011589, 230170_at
FIG. 5225: PRO88
FIG. 5226: DNA330816, 980409.1, 230192_at
FIG. 5227: PRO85980
FIG. 5228A-B: DNA194784, DNA194784,
230218_at
FIG. 5229: PRO24061
FIG. 5230: DNA331670, 373719.30, 230257_s_at
FIG. 5231: PRO86665
FIG. 5232A-C: DNA330817, AB020335, 230265_at
FIG. 5233: PRO85981
FIG. 5234: DNA330818, 212282.1, 230304_at
FIG. 5235: PRO85982
FIG. 5236: DNA330819, 982802.1, 230337_at
FIG. 5237: PRO85983
FIG. 5238: DNA330820, 230585.2, 230345_at
FIG. 5239: PRO85984
FIG. 5240: DNA329470, NP_002756.1, 230352_at
FIG. 5241: PRO85035
FIG. 5242: DNA331671, 277648.15, 230375_at
FIG. 5243: PRO86666
FIG. 5244: DNA331672, 332195.1, 230391_at
FIG. 5245: PRO86667
FIG. 5246: DNA257756, DNA257756, 230405_at
FIG. 5247: DNA330823, 010867.1, 230449_x_at
FIG. 5248: PRO85987
FIG. 5249A-B: DNA331673, 333480.5, 230489_at
FIG. 5250: PRO86668
FIG. 5251A-B: DNA330825, 406864.4, 230526_at
FIG. 5252: PRO85989
FIG. 5253: DNA331674, 059446.1, 230529_at
FIG. 5254: PRO86669
FIG. 5255: DNA330827, NP_079521.1, 230536_at
FIG. 5256: PRO85991
FIG. 5257: DNA330828, 233615.1, 230566_at
FIG. 5258: PRO85992
FIG. 5259: DNA330829, 007717.1, 230580_at
FIG. 5260: PRO85993
FIG. 5261: DNA257789, NP_116219.1, 230656_s_at
FIG. 5262: PRO52338
FIG. 5263: DNA330830, 216899.1, 230703_at
FIG. 5264: PRO85994
FIG. 5265A-B: DNA328499, SORL1, 230707_at
FIG. 5266: PRO84321
FIG. 5267A-B: DNA328099, 335889.1, 230779_at
FIG. 5268: PRO84009
FIG. 5269: DNA194391, HSM800477, 230848_s_at
FIG. 5270: DNA330831, 208876.1, 230913_at
FIG. 5271: PRO85995
FIG. 5272: DNA330832, 253831.5, 230930_at
FIG. 5273: PRO85996
FIG. 5274: DNA304827, AF293462, 230966_at
FIG. 5275: PRO1265
FIG. 5276: DNA330833, 984179.1, 230970_at
FIG. 5277: PRO85997
FIG. 5278: DNA331675, BC017477, 231094_s_at
FIG. 5279: PRO86670
FIG. 5280: DNA331676, 980781.1, 231109_at
FIG. 5281: PRO86671
FIG. 5282: DNA329473, 370473.13, 231124_x_at
FIG. 5283: PRO85038
FIG. 5284: DNA330835, 399441.1, 231166_at
FIG. 5285: PRO85999
FIG. 5286A-B: DNA330836, 242968.17, 231169_at
FIG. 5287: PRO86000
FIG. 5288: DNA330837, 429490.1, 231182_at
FIG. 5289: PRO86001
FIG. 5290: DNA150808, HUMGBP1, 231577_s_at
FIG. 5291: PRO12478
FIG. 5292: DNA155700, DNA155700, 231579_s_at
FIG. 5293: DNA330838, NP_037460.2, 231715_s_at
FIG. 5294: PRO80743
FIG. 5295: DNA330839, NP_060908.1, 231769_at
FIG. 5296: PRO86002
FIG. 5297: DNA330840, BC015355, 231772_x_at
FIG. 5298: PRO86003
FIG. 5299: DNA208647, DNA208647, 231775_at
FIG. 5300: PRO1206
FIG. 5301: DNA330841, 983019.1, 231776_at
FIG. 5302: PRO86004
FIG. 5303: DNA329474, AK001874, 231784_s_at
FIG. 5304: PRO38893
FIG. 5305: DNA330842, 242234.14, 231793_s_at
FIG. 5306: PRO86005
FIG. 5307: DNA329312, AF414120, 231794_at
FIG. 5308: PRO84901
FIG. 5309: DNA330843, 201388.1, 231832_at
FIG. 5310: PRO86006
FIG. 5311A-B: DNA330844, 243553.2, 231852_at
FIG. 5312: PRO86007
FIG. 5313: DNA330845, BC009777, 231863_at
FIG. 5314: PRO86008
FIG. 5315A-B: DNA330846, BC005847, 231876_at
FIG. 5316: DNA331677, 981573.1, 231890_at
FIG. 5317: PRO86672
FIG. 5318: DNA330848, 1447268.2, 231904_at
FIG. 5319: PRO86011
FIG. 5320: DNA330849, EFG2, 231918_s_at
FIG. 5321: PRO86012
FIG. 5322A-B: DNA256267, BAB13444.1,
231956_at
FIG. 5323: PRO51311
FIG. 5324A-B: DNA271768, AB037834, 231996_at
FIG. 5325A-C: DNA330850, 152462.1, 232044_at
FIG. 5326: PRO86013
FIG. 5327: DNA330851, 337679.3, 232081_at
FIG. 5328: PRO86014
FIG. 5329: DNA330852, 1383611.1, 232138_at
FIG. 5330: PRO86015
FIG. 5331: DNA330853, 255956.19, 232141_at
FIG. 5332: PRO86016
FIG. 5333: DNA328113, 218535.1, 232150_at
FIG. 5334: PRO84020
FIG. 5335: DNA330854, AK023113, 232155_at,
FIG. 5336: PRO86017
FIG. 5337: DNA331678, ABIN-2, 232160_s_at
FIG. 5338: PRO86673
FIG. 5339A-E: DNA331679, NP_112598.1,
232164_s_at
FIG. 5340: PRO86674
FIG. 5341: DNA330856, HSM802268, 232165_at
FIG. 5342: DNA330857, 271071.1, 232175_at
FIG. 5343: PRO86020
FIG. 5344: DNA330858, 252659.1, 232213_at
FIG. 5345: PRO86021
FIG. 5346: DNA330859, 016890.1, 232216_at
FIG. 5347: PRO86022
FIG. 5348: DNA331680, 393520.1, 232238_at
FIG. 5349: PRO86675
FIG. 5350: DNA330861, AK000490, 232278_s_at
FIG. 5351: PRO86024
FIG. 5352: DNA287658, 199168.2, 232291_at
FIG. 5353: PRO69902
FIG. 5354: DNA331681, 339154.9, 232304_at
FIG. 5355: PRO86676
FIG. 5356: DNA330863, 295041.1, 232365_at
FIG. 5357: PRO86026
FIG. 5358: DNA331682, 1384413.5, 232369_at
FIG. 5359: PRO86677
FIG. 5360: DNA287182, 424693.25, 232375_at
FIG. 5361: PRO69470
FIG. 5362: DNA330865, 066613.1, 232412_at
FIG. 5363: PRO86028
FIG. 5364: DNA331683, 422960.1, 232504_at
FIG. 5365: PRO86678
FIG. 5366: DNA330867, 333565.1, 232527_at
FIG. 5367: PRO86030
FIG. 5368: DNA331684, AF161339, 232543_x_at
FIG. 5369: DNA330868, 337037.1, 232584_at
FIG. 5370: PRO86031
FIG. 5371: DNA330869, 406591.1, 232687_at
FIG. 5372: PRO86032
FIG. 5373: DNA330870, 227719.1, 232883_at
FIG. 5374: PRO86033
FIG. 5375: DNA330871, 419923.1, 233019_at
FIG. 5376: PRO86034
FIG. 5377: DNA287404, AK026486, 233085_s_at
FIG. 5378: PRO69661
FIG. 5379: DNA330872, 056107.1, 233127_at
FIG. 5380: PRO86035
FIG. 5381A-B: DNA329422, BAA92605.1,
233208_x_at
FIG. 5382: PRO84993
FIG. 5383A-B: DNA330873, AB040885, 233458_at
FIG. 5384: DNA330874, NP_057528.1, 233461_x_at
FIG. 5385: PRO86037
FIG. 5386: DNA331423, AF176071, 233467_s_at
FIG. 5387: DNA330875, 006221.2, 233506_at
FIG. 5388: PRO86038
FIG. 5389: DNA330876, AK055587, 233528_s_at
FIG. 5390: PRO86039
FIG. 5391: DNA328812, AB033087, 233575_s_at
FIG. 5392: DNA330877, NP_055075.1, 233588_x_at
FIG. 5393: PRO86040
FIG. 5394A-C: DNA330638, HSM801490,
233632_s_at
FIG. 5395: DNA329287, NP_057484.2, 233746_x_at
FIG. 5396: PRO84879
FIG. 5397: DNA329481, ASB2, 233857_s_at
FIG. 5398: PRO60949
FIG. 5399: DNA326800, XRN2, 233878_s_at
FIG. 5400: PRO83133
FIG. 5401: DNA330547, MOV10, 233917_s_at
FIG. 5402: PRO85731
FIG. 5403: DNA330878, NP_079111.1, 233937_at
FIG. 5404: PRO86041
FIG. 5405: DNA329571, HSPC195, 233955_x_at
FIG. 5406: PRO51662
FIG. 5407: DNA329332, BC001262, 233970_s_at
FIG. 5408: PRO84916
FIG. 5409: DNA331685, AK026111, 233986_s_at
FIG. 5410: PRO86680
FIG. 5411: DNA331686, HSA271091, 234000_s_at
FIG. 5412: PRO86681
FIG. 5413: DNA331687, HUMVA25A, 234013_at
FIG. 5414: PRO86682
FIG. 5415: DNA330880, NP_150283.1, 234284_at
FIG. 5416: PRO86043
FIG. 5417: DNA330881, CRACC, 234306_s_at
FIG. 5418: PRO1138
FIG. 5419: DNA329312, CTLA4, 234362_s_at
FIG. 5420: PRO84901
FIG. 5421: DNA329483, NP_443104.1, 234408_at
FIG. 5422: PRO20110
FIG. 5423: DNA287425, NP_060979.1, 234464_s_at
FIG. 5424: PRO69682
FIG. 5425: DNA330387, FBXO5, 234863_x_at
FIG. 5426: PRO85596
FIG. 5427: DNA304813, NP_277053.1, 234973_at
FIG. 5428: PRO71222
FIG. 5429: DNA330882, 406739.1, 234974_at
FIG. 5430: PRO86044
FIG. 5431: DNA330883, 1384547.1, 234986_at
FIG. 5432: PRO86045
FIG. 5433A-B: DNA330884, 267153.16, 234987_at
FIG. 5434: PRO86046
FIG. 5435: DNA257389, NP_116248.1, 234993_at
FIG. 5436: PRO51974
FIG. 5437: DNA330885, AK055618, 235022_at
FIG. 5438: PRO86047
FIG. 5439: DNA331688, 404157.1, 235052_at
FIG. 5440: PRO86683
FIG. 5441: DNA331689, 996962.6, 235056_at
FIG. 5442: PRO86684
FIG. 5443: DNA328143, AK054678, 235061_at
FIG. 5444: PRO84048
FIG. 5445: DNA330888, 7687712.2, 235088_at
FIG. 5447: DNA330889, AK055762, 235096_at
FIG. 5448: PRO86050
FIG. 5449: DNA193891, DNA193891, 235099_at
FIG. 5450: PRO23309
FIG. 5451A-B: DNA330890, AB058722, 235106_at
FIG. 5452: DNA330891, AK027315, 235113_at
FIG. 5453: PRO86052
FIG. 5454: DNA328 146, BC019239, 235117_at
FIG. 5455: PRO84051
FIG. 5456: DNA330892, 198067.4, 235136_at
FIG. 5457: PRO86053
FIG. 5458: DNA330893, 337392.1, 235157_at
FIG. 5459: PRO86054
FIG. 5460: DNA329486, 1058246.1, 235175_at
FIG. 5461: PRO85047
FIG. 5462: DNA330894, AF455817, 235177_at
FIG. 5463: PRO86055
FIG. 5464: DNA331690, 200228.1, 235199_at
FIG. 5465: PRO86685
FIG. 5466: DNA330896, 250896.1, 235213_at
FIG. 5467: PRO86057
FIG. 5468: DNA329488, 1501300.6, 235244_at
FIG. 5469: PRO85049
FIG. 5470A-C: DNA330897, 332999.23, 235252_at
FIG. 5471: PRO86058
FIG. 5472: DNA324093, BC019263, 235256_s_at
FIG. 5473: PRO80802
FIG. 5474: DNA260946, NP_115741.1, 235266_at
FIG. 5475: PRO54699
FIG. 5476A-C: DNA329379, 010205.2, 235287_at
FIG. 5477: PRO84957
FIG. 5478: DNA330898, 227608.1, 235299_at
FIG. 5479: PRO86059
FIG. 5480A-B: DNA330899, 7690822.1, 235306_at
FIG. 5481: PRO86060
FIG. 5482A-B: DNA330900, 199492.10,
235331_x_at
FIG. 5483: PRO86061
FIG. 5484: DNA330901, 400258.1, 235360_at
FIG. 5485: PRO86062
FIG. 5486: DNA330902, 481462.4, 235389_at
FIG. 5487: PRO86063
FIG. 5488: DNA331691, 405045.1, 235412_at
FIG. 5489: PRO86686
FIG. 5490: DNA330904, 1446121.1, 235415_at
FIG. 5491: PRO86065
FIG. 5492: DNA331692, 979330.2, 235425_at
FIG. 5493: PRO86687
FIG. 5494: DNA257872, DNA257872, 235457_at
FIG. 5495: DNA330906, NP_116171.2, 235458_at
FIG. 5496: PRO86067
FIG. 5497: DNA257302, DNA257302, 235463_s_at
FIG. 5498: DNA330907, 7692322.1, 235469_at
FIG. 5499: PRO86068
FIG. 5500: DNA331693, 203586.1, 235508_at
FIG. 5501: PRO86688
FIG. 5502: DNA330909, 229234.17, 235523_at
FIG. 5503: PRO86070
FIG. 5504: DNA304793, NP_443173.1, 235574_at
FIG. 5505: PRO71205
FIG. 5506: DNA330910, 032253.1, 235581_at
FIG. 5507: PRO86071
FIG. 5508: DNA330911, 1446080.1, 235607_at
FIG. 5509: PRO86072
FIG. 5510: DNA330912, 984873.1, 235609_at
FIG. 5511: PRO86073
FIG. 5512: DNA331694, 222666.9, 235643_at
FIG. 5513: PRO86689
FIG. 5514: DNA331695, 350462.1, 235652_at
FIG. 5515: PRO86690
FIG. 5516: DNA330915, 238456.7, 235662_at
FIG. 5517: PRO86076
FIG. 5518: DNA330916, 234580.1, 235670_at
FIG. 5519: PRO86077
FIG. 5520: DNA330917, 238496.1, 235696_at
FIG. 5521: PRO86078
FIG. 5522: DNA330918, 250552.1, 235699_at
FIG. 5523: PRO86079
FIG. 5524: DNA330919, 423261.6, 235739_at
FIG. 5525: PRO86080
FIG. 5526: DNA330920, 249518.17, 235783_at
FIG. 5527: PRO86081
FIG. 5528: DNA330921, 246858.18, 235816_s_at
FIG. 5529: PRO86082
FIG. 5530: DNA330922, 1447139.1, 235907_at
FIG. 5531: PRO86083
FIG. 5532: DNA330923, 981520.1, 235940_at
FIG. 5533: PRO86084
FIG. 5534: DNA330924, 237828.3, 235984_at
FIG. 5535: PRO86085
FIG. 5536: DNA330925, 257787.1, 235985_at
FIG. 5537: PRO86086
FIG. 5538: DNA330926, 1446421.2, 236079_at
FIG. 5539: PRO86087
FIG. 5540: DNA330927, 1499766.1, 236156_at
FIG. 5541: PRO86088
FIG. 5542A-E: DNA328165, 327340.35, 236172_at
FIG. 5543: PRO38220
FIG. 5544: DNA330928, 227714.1, 236180_at
FIG. 5545: PRO86089
FIG. 5546: DNA329489, 338163.1, 236280_at
FIG. 5547: PRO85050
FIG. 5548: DNA257767, DNA257767, 236285_at
FIG. 5549: DNA288255, 236339.1, 236295_s_at
FIG. 5550: PRO70016
FIG. 5551: DNA331696, 215451.1, 236338_at
FIG. 5552: PRO86691
FIG. 5553: DNA329490, 267918.1, 236347_at
FIG. 5554: PRO85051
FIG. 5555: DNA330930, 407665.1, 236379_at
FIG. 5556: PRO86091
FIG. 5557: DNA331697, 342862.1, 236419_at
FIG. 5558: PRO86692
FIG. 5559: DNA330932, 231907.4, 236470_at
FIG. 5560: PRO86093
FIG. 5561: DNA330933, 407881.1, 236506_at
FIG. 5562: PRO86094
FIG. 5563: DNA330934, 406491.1, 236595_at
FIG. 5564: PRO86095
FIG. 5565: DNA330935, 229915.1, 236610_at
FIG. 5566: PRO86096
FIG. 5567A-C: DNA330936, 351043.1, 236641_at
FIG. 5568: PRO86097
FIG. 5569: DNA330937, 205124.1, 236645_at
FIG. 5570: PRO86098
FIG. 5571: DNA330938, 7688127.1, 236668_at
FIG. 5572: PRO86099
FIG. 5573: DNA259749, DNA259749, 236782_at
FIG. 5574: DNA329491, 211743.1, 236787_at
FIG. 5575: PRO85052
FIG. 5576: DNA330939, 214517.1, 236796_at
FIG. 5577: PRO86100
FIG. 5578: DNA330940, 211136.19, 236832_at
FIG. 5579: PRO86101
FIG. 5580: DNA330941, 399601.2, 236836_at
FIG. 5581: PRO86102
FIG. 5582: DNA330942, 337215.1, 236907_at
FIG. 5583: PRO86103
FIG. 5584: DNA330943, 1042935.2, 237009_at
FIG. 5585: PRO86104
FIG. 5586: DNA330944, 218030.2, 237180_at
FIG. 5587: PRO86105
FIG. 5588: DNA330945, 334209.1, 237181_at
FIG. 5589: PRO86106
FIG. 5590A-B: DNA226536, TFRC, 237215_s_at
FIG. 5591: PRO36999
FIG. 5592: DNA330946, 023719.1, 237626_at
FIG. 5593: PRO86107
FIG. 5594: DNA331698, 341647.1, 237741_at
FIG. 5595: PRO86693
FIG. 5596: DNA330948, 305319.1, 237746_at
FIG. 5597: PRO86109
FIG. 5598: DNA330949, 089765.7, 237759_at
FIG. 5599: PRO86110
FIG. 5600: DNA331699, 983684.2, 237953_at
FIG. 5601: PRO86694
FIG. 5602: DNA330951, 253376.3, 238012_at
FIG. 5603: PRO86112
FIG. 5604A-B: DNA330952, 333610.10,
238021_s_at
FIG. 5605: PRO86113
FIG. 5606: DNA330953, BC019600, 238063_at
FIG. 5607: DNA331700, 983399.1, 238082_at
FIG. 5608: PRO86695
FIG. 5609: DNA330955, 311471.1, 238303_at
FIG. 5610: PRO86115
FIG. 5611: DNA330956, 329762.1, 238311_at
FIG. 5612: PRO86116
FIG. 5613: DNA329493, 337072.5, 238423_at
FIG. 5614: PRO85054
FIG. 5615: DNA108695, DNA108695, 238508_at
FIG. 5616: PRO9743
FIG. 5617: DNA330957, 003538.1, 238509_at
FIG. 5618: PRO86117
FIG. 5619: DNA330958, 370339.1, 238541_at
FIG. 5620: PRO86118
FIG. 5621: DNA330959, 358161.17, 238545_at
FIG. 5622: PRO86119
FIG. 5623: DNA260158, DNA260158, 2238551_at
FIG. 5624: DNA329495, 1447201.1, 238581_at
FIG. 5625: PRO85056
FIG. 5626: DNA329496, AK056126, 238600_at
FIG. 5627: PRO85057
FIG. 5628: DNA329497, 232064.1, 238619_at
FIG. 5629: PRO85058
FIG. 5630: DNA330960, 001782.1, 238633_at
FIG. 5631: PRO86120
FIG. 5632: DNA330961, 903323.1, 238651_at
FIG. 5633: PRO86121
FIG. 5634A-B: DNA329499, 332504.1, 238778_at
FIG. 5635: PRO85060
FIG. 5636: DNA330962, 336371.2, 238893_at
FIG. 5637: PRO86122
FIG. 5638A-B: DNA330963, 241110.10, 238910_at
FIG. 5639: PRO86123
FIG. 5640: DNA331701, 337114.1, 238913_at
FIG. 5641: PRO86696
FIG. 5642: DNA330965, NP_443111.2, 238960_s_at
FIG. 5643: PRO86125
FIG. 5644: DNA330966, 213271.1, 238987_at
FIG. 5645: PRO86126
FIG. 5646: DNA330967, 1499563.1, 238996_x_at
FIG. 5647: PRO86127
FIG. 5648: DNA330968, 005876.1, 239002_at
FIG. 5649: PRO86128
FIG. 5650: DNA328194, 998827.1, 239049_at
FIG. 5651: PRO84097
FIG. 5652: DNA331702, 406864.3, 239062_at
FIG. 5653: PRO86697
FIG. 5654: DNA330970, 026912.1, 239081_at
FIG. 5655: PRO86130
FIG. 5656: DNA330971, 413731.1, 239096_at
FIG. 5657: PRO86131
FIG. 5658A-B: DNA330972, 141588.42, 239133_at
FIG. 5659: PRO86132
FIG. 5660: DNA330973, NP_003328.1, 239163_at
FIG. 5661: PRO10751
FIG. 5662: DNA330974, 348211.8, 239219_at
FIG. 5663: PRO86133
FIG. 5664: DNA330975, 207267.3, 239278_at
FIG. 5665: PRO86134
FIG. 5666: DNA330976, 023223.1, 239328_at
FIG. 5667: PRO86135
FIG. 5668: DNA329501, 205323.1, 239331_at
FIG. 5669: PRO85062
FIG. 5670: DNA330977, 996962.2, 239364_at
FIG. 5671: PRO86136
FIG. 5672: DNA330978, 039840.1, 239376_at
FIG. 5673: PRO86137
FIG. 5674: DNA330979, 407730.7, 239388_at
FIG. 5675: PRO86138
FIG. 5676: DNA330980, 1134871.2, 239401_at
FIG. 5677: PRO86139
FIG. 5678: DNA330981, 406409.1, 239404_at
FIG. 5679: PRO86140
FIG. 5680: DNA330982, 980479.1, 239413_at
FIG. 5681: PRO86141
FIG. 5682: DNA328200, 405394.1, 239442_at
FIG. 5683: PRO84103
FIG. 5684: DNA330983, 305289.1, 239448_at
FIG. 5685: PRO86142
FIG. 5686: DNA330984, 015432.1, 239476_at
FIG. 5687: PRO86143
FIG. 5688: DNA330985, 317098.1, 239494_at
FIG. 5689: PRO86144
FIG. 5690: DNA330986, 215812.1, 239533_at
FIG. 5691: PRO86145
FIG. 5692: DNA330987, 116344.1, 239655_at
FIG. 5693: PRO86146
FIG. 5694: DNA330988, 333476.1, 239680_at
FIG. 5695: PRO86147
FIG. 5696: DNA330989, 298825.1, 239695_at
FIG. 5697: PRO86148
FIG. 5698: DNA330990, 004652.1, 239721_at
FIG. 5699: PRO86149
FIG. 5700: DNA330991, 017874.1, 239757_at
FIG. 5701: PRO86150
FIG. 5702: DNA330992, AK027783, 239771_at
FIG. 5703: PRO86151
FIG. 5704: DNA330993, 1439890.1, 239803_at
FIG. 5705: PRO86152
FIG. 5706: DNA330994, NP_115730.1, 239824_s_at
FIG. 5707: PRO86153
FIG. 5708A-C: DNA330995, 233142.9, 239897_at
FIG. 5709: PRO84857
FIG. 5710: DNA258952, DNA258952, 239901_at
FIG. 5711: DNA257698, DNA257698, 240070_at
FIG. 5712: DNA328206, 1384214.3, 240277_at
FIG. 5713: PRO84109
FIG. 5714: DNA330996, 144353.1, 240347_at
FIG. 5715: PRO86154
FIG. 5716: DNA331703, 314831.10, 240452_at
FIG. 5717: PRO86698
FIG. 5718: DNA330998, 979930.1, 240665_at
FIG. 5719: PRO86156
FIG. 5720: DNA330999, 1454193.1, 240830_at
FIG. 5721: PRO86157
FIG. 5722: DNA331000, 7693121.3, 240890_at
FIG. 5723: PRO86158
FIG. 5724: DNA331704, CARS, 240983_s_at
FIG. 5725: PRO86699
FIG. 5726: DNA329504, 197187.1, 241365_at
FIG. 5727: PRO85065
FIG. 5728: DNA331001, 1499887.1, 241370_at
FIG. 5729: PRO86159
FIG. 5730: DNA331002, 231340.1, 241435_at
FIG. 5731: PRO86160
FIG. 5732: DNA331003, 391185.30, 241495_at
FIG. 5733: PRO86161
FIG. 5734: DNA331004, 314498.1, 241505_at
FIG. 5735: PRO86162
FIG. 5736: DNA331005, 197725.1, 241722_x_at
FIG. 5737: PRO86163
FIG. 5738: DNA329505, BC017102, 241734_at
FIG. 5739: DNA331006, 193718.1, 241740_at
FIG. 5740: PRO86164
FIG. 5741: DNA331007, 405858.1, 241756_at
FIG. 5742: PRO86165
FIG. 5743: DNA331705, 428179.1, 241775_at
FIG. 5744: PRO86700
FIG. 5745: DNA195721, DNA195721, 241819_at
FIG. 5746: DNA331009, 222011.1, 241824_at
FIG. 5747: PRO86167
FIG. 5748: DNA331010, 218800.1, 241843_at
FIG. 5749: PRO86168
FIG. 5750: DNA331011, 979953.1, 241859_at
FIG. 5751: PRO86169
FIG. 5752: DNA331012, 030070.1, 241869_at
FIG. 5753: PRO86170
FIG. 5754: DNA331013, 406509.1, 241924_at
FIG. 5755: PRO86171
FIG. 5756: DNA329506, NP_387510.1, 241937_s_at
FIG. 5757: PRO85067
FIG. 5758: DNA331014, 1447958.2, 241985_at
FIG. 5759: PRO86172
FIG. 5760: DNA331015, 109159.1, 242031_at
FIG. 5761: PRO86173
FIG. 5762: DNA331016, 229438.1, 242051_at
FIG. 5763: PRO86174
FIG. 5764: DNA328213, 419856.5, 242059_at
FIG. 5765: PRO84116
FIG. 5766: DNA331017, 409906.7, 242060_x_at
FIG. 5767: PRO86175
FIG. 5768: DNA331018, 355930.1, 242110_at
FIG. 5769: PRO86176
FIG. 5770: DNA331019, 234788.2, 242245_at
FIG. 5771: PRO86177
FIG. 5772: DNA331020, 403459.1, 242261_at
FIG. 5773: PRO86178
FIG. 5774: DNA331021, 017309.1, 242268_at
FIG. 5775: PRO86179
FIG. 5776: DNA331022, BC009627, 242304_at
FIG. 5777: DNA331023, 119753.1, 242362_at
FIG. 5778: PRO86181
FIG. 5779: DNA331024, 028992.1, 242388_x_at
FIG. 5780: PRO86182
FIG. 5781: DNA328220, 239839.1, 242405_at
FIG. 5782: PRO84123
FIG. 5783: DNA331025, 127891.1, 242457_at
FIG. 5784: PRO86183
FIG. 5785: DNA328221, 221374.1, 242471_at
FIG. 5786: PRO84124
FIG. 5787: DNA257874, DNA257874, 242517_at
FIG. 5788: DNA331026, 014632.1, 242518_at
FIG. 5789: PRO86184
FIG. 5790: DNA331027, 053796.1, 242560_at
FIG. 5791: PRO86185
FIG. 5792: DNA331028, 7693434.1, 242606_at
FIG. 5793: PRO86186
FIG. 5794: DNA331706, 351474.1, 242617_at
FIG. 5795: PRO86701
FIG. 5796: DNA331707, 330870.5, 242625_at
FIG. 5797: PRO86702
FIG. 5798: DNA331030, 407930.2, 242648_at
FIG. 5799: PRO86188
FIG. 5800: DNA331031, 405967.1, 242669_at
FIG. 5801: PRO86189
FIG. 5802A-C: DNA331708, NP_006258.2,
242712_x_at
FIG. 5803: PRO86703
FIG. 5804A-C: DNA331033, AF330045, 242722_at
FIG. 5805: PRO86191
FIG. 5806: DNA331034, 7689086.1, 242735_x_at
FIG. 5807: PRO86192
FIG. 5808: DNA331035, 210512.1, 242783_at
FIG. 5809: PRO86193
FIG. 5810: DNA331036, 360991.1, 242836_at
FIG. 5811: PRO86194
FIG. 5812: DNA328224, 028975.1, 242859_at
FIG. 5813: PRO84127
FIG. 5814: DNA331037, 206873.1, 242890_at
FIG. 5815: PRO86195
FIG. 5816: DNA331709, 017276.1, 242903_at
FIG. 5817: PRO86704
FIG. 5818: DNA331710, 227540.15, 242960_at
FIG. 5819: PRO86705
FIG. 5820: DNA331711, 427600.1, 243006_at
FIG. 5821: PRO86706
FIG. 5822: DNA331041, 982079.2, 243030_at
FIG. 5823: PRO86199
FIG. 5824: DNA331042, 019764.1, 243037_at
FIG. 5825: PRO86200
FIG. 5826: DNA331043, 005042.1, 243134_at
FIG. 5827: PRO86201
FIG. 5828: DNA331044, 226264.10, 243154_at
FIG. 5829: PRO86202
FIG. 5830: DNA331045, 066434.1, 243222_at
FIG. 5831: PRO86203
FIG. 5832: DNA331712, 005752.1, 243271_at
FIG. 5833: PRO86707
FIG. 5834: DNA331047, BC020624, 243362_s_at
FIG. 5835: DNA331048, 7688599.1, 243366_s_at
FIG. 5836: PRO86206
FIG. 5837: DNA331049, 402027.4, 243395_at
FIG. 5838: PRO86207
FIG. 5839: DNA331713, 982999.2, 243423_at
FIG. 5840: PRO86708
FIG. 5841: DNA331051, 306804.1, 243469_at
FIG. 5842: PRO86209
FIG. 5843: DNA331714, 332965.1, 243496_at
FIG. 5844: PRO86709
FIG. 5845: DNA331053, 243689.1, 243509_at
FIG. 5846: PRO86211
FIG. 5847: DNA331715, 7683458.1, 243514_at
FIG. 5848: PRO86710
FIG. 5849: DNA331055, 1512996.3, 243561_at
FIG. 5850: PRO86213
FIG. 5851: DNA258957, DNA258957, 243631_at
FIG. 5852: DNA331056, 218946.1, 243759_at
FIG. 5853: PRO86214
FIG. 5854: DNA194184, DNA194184, 243764_at
FIG. 5855: PRO23576
FIG. 5856: DNA331057, 031316.1, 243888_at
FIG. 5857: PRO86215
FIG. 5858: DNA331058, 400813.1, 243918_at
FIG. 5859: PRO86216
FIG. 5860: DNA331059, 035870.32, 243934_at
FIG. 5861: PRO86217
FIG. 5862: DNA210271, DNA210271, 243999_at
FIG. 5863: PRO33803
FIG. 5864A-B: DNA331060, 406931.1, 244008_at
FIG. 5865: PRO86218
FIG. 5866: DNA331061, 198683.4, 244026_at
FIG. 5867: PRO86219
FIG. 5868: DNA331062, BC021973, 244052_at
FIG. 5869: PRO23771
FIG. 5870: DNA331716, 212607.1, 244267_at
FIG. 5871: PRO86711
FIG. 5872: DNA331064, 006039.1, 244313_at
FIG. 5873: PRO86221
FIG. 5874: DNA108738, DNA108738, 244321_at
FIG. 5875: PRO9822
FIG. 5876: DNA331065, 341348.1, 244382_at
FIG. 5877: PRO86222
FIG. 5878: DNA331066, 207228.1, 244443_at
FIG. 5879: PRO86223
FIG. 5880: DNA328239, 331922.4, 244450_at
FIG. 5881: PRO84142
FIG. 5882: DNA331067, 164869.1, 244599_at
FIG. 5883: PRO86224
FIG. 5884: DNA331068, 337465.1, 244677_at
FIG. 5885: PRO86225
FIG. 5886: DNA329512, 336575.1, 244780_at
FIG. 5887: PRO85073
FIG. 5888: DNA331069, 008651.1, 244798_at
FIG. 5889: PRO86226
FIG. 5890: DNA331070, 393412.1, 244801_at
FIG. 5891: PRO86227
FIG. 5892: DNA331071, 343563.1, 244869_at
FIG. 5893: PRO86228
FIG. 5894A-B: DNA254566, BAA11502.1,
D80007_at
FIG. 5895: PRO49669
FIG. 5896: DNA328961, BC011049, DNA36995_at
FIG. 5897: PRO84667
FIG. 5898A-B: DNA331072, AB046821,
DNA53991_at
FIG. 5899: DNA327200, KSP37, DNA59602_at
FIG. 5900: PRO1065
FIG. 5901: DNA327205, GBP5, DNA61875_at
FIG. 5902: PRO83478
FIG. 5903: DNA331717, BC020203, DNA71289_at
FIG. 5904: PRO86712
FIG. 5905: DNA331718, AK024409, DNA92232_at
FIG. 5906: PRO86713
FIG. 5907: DNA96866, DNA96866, DNA96866_at
FIG. 5908: PRO6015
FIG. 5909: DNA331073, BC011775, DNA101926_at
FIG. 5910: PRO86229
FIG. 5911: DNA108670, DNA108670,
DNA108670_at
FIG. 5912: PRO7171
FIG. 5913: DNA304467, BC004535, DNA108688_at
FIG. 5914: PRO71043
FIG. 5915A-B: DNA108728, DNA108728,
DNA108728_at
FIG. 5916: PRO9741
FIG. 5917: DNA329215, ICOS, DNA108917_at
FIG. 5918: PRO7424
FIG. 5919: DNA331719, BC002424, DNA143288_at
FIG. 5920: PRO12705
FIG. 5921A-B: DNA150956, HUMORFKG1P,
DNA150956_at
FIG. 5922: DNA330417, APOL6, DNA164989_at
FIG. 5923: PRO21341
FIG. 5924: DNA329483, AF384857, DNA166819_at
FIG. 5925: PRO20110
FIG. 5926: DNA26842, DNA26842, P_Z64949_at
FIG. 5927: PRO180
FIG. 5928: DNA304468, NP_077300.1, P_Z93700_at
FIG. 5929: PRO71044
FIG. 5930: DNA39423, DNA39423, P_X52252_at
FIG. 5931: PRO271
FIG. 5932: DNA330262, GW112, P_Z64962_at
FIG. 5933: PRO85493
FIG. 5934: DNA331074, AF252257, P_A37030_at
FIG. 5935: DNA60764, DNA60764, P_A46906_at
FIG. 5936: PRO1265
FIG. 5937: DNA331720, AF289594, P_A37063_at
FIG. 5938: PRO86714
FIG. 5939: DNA331721, BC017876, P_A37079_at
FIG. 5940: PRO71045
FIG. 5941: DNA76401, DNA76401, P_A37126_at
FIG. 5942: PRO1575
FIG. 5943: DNA304475, NP_116246.1, P_A37128_at
FIG. 5944: PRO71049
FIG. 5945: DNA66480, HSAPO1, NM_000043_at
FIG. 5946: PRO1207
FIG. 5947: DNA88195, CD3G, NM_000073_at
FIG. 5948: PRO2693
FIG. 5949: DNA325712, CDK4, NM_000075_at
FIG. 5950: PRO82194
FIG. 5951: DNA329934, BC013083, NM_000099_at
FIG. 5952: PRO2721
FIG. 5953A-B: DNA331722, HUMFVA,
NM_000130_at
FIG. 5954: PRO36374
FIG. 5955: DNA331723, U66095, NM_000161_at
FIG. 5956: PRO86715
FIG. 5957: DNA227668, HUMGLYKINB,
NM_000167_at
FIG. 5958: PRO38131
FIG. 5959A-D: DNA331724, HSGLA,
NM_000169_at
FIG. 5960: DNA331725, BC006342, NM_000175_at
FIG. 5961: DNA150823, NP_000185.1,
NM_000194_at
FIG. 5962: PRO12810
FIG. 5963: DNA331726, HUMICAMA1A,
NM_000201_at
FIG. 5964: PRO86716
FIG. 5965A-B: DNA88419, HSINTA6R,
NM_000210_at
FIG. 5966: PRO2339
FIG. 5967: DNA88428, HUMLAP, NM_000211_at
FIG. 5968: PRO2787
FIG. 5969: DNA226014, NP_000230.1,
NM_000239_at
FIG. 5970: PRO36477
FIG. 5971: DNA97287, NP_000240.1,
NM_000249_at
FIG. 5972: PRO3634
FIG. 5973: DNA88554, NP_000241.1,
NM_000250_at
FIG. 5974: PRO2839
FIG. 5975: DNA331727, BC008015, NM_000269_at
FIG. 5976: PRO37534
FIG. 5977A-E: DNA331728, PTEN4, NM_000314_at
FIG. 5978: DNA83020, NP_000349.1,
NM_000358_at
FIG. 5979: PRO2561
FIG. 5980: DNA227081, EGR2, NM_000399_at
FIG. 5981: PRO37544
FIG. 5982: DNA76512, HSIL2REC, NM_000417_at
FIG. 5983: PRO2020
FIG. 5984: DNA76514, HSIL4R, NM_000418_at
FIG. 5985: PRO2540
FIG. 5986: DNA329522, NP_000433.2,
NM_000442_at
FIG. 5987: PRO85080
FIG. 5988: DNA188732, NP_000475.1,
NM_000484_at
FIG. 5989: PRO25302
FIG. 5990: DNA331729, AF281258, NM_000517_at
FIG. 5991: DNA331730, BC014514, NM_000527_at
FIG. 5992: PRO2915
FIG. 5993: DNA331731, HSASM2MR,
NM_000543_at
FIG. 5994: DNA76516, IL6R, NM_000565_at
FIG. 5995: PRO2022
FIG. 5996: DNA36718, HUMIL10, NM_000572_at
FIG. 5997: PRO73
FIG. 5998: DNA324158, NP_000567.1,
NM_000576_at
FIG. 5999: PRO65
FIG. 6000A-B: DNA331732, HSCCR5AB2,
NM_000579_at
FIG. 6001: PRO25194
FIG. 6002: DNA290585, NP_000573.1,
NM_000582_f_at
FIG. 6003: PRO70536
FIG. 6004: DNA216500, NP_000575.1,
NM_000584_at
FIG. 6005: PRO34252
FIG. 6006: DNA36712, HUMIL3, NM_000588_at
FIG. 6007: PRO67
FIG. 6008A-B: DNA331733, AF361105,
NM_000590_at
FIG. 6009: DNA331734, BC014081, NM_000593_at
FIG. 6010: PRO36996
FIG. 6011A-B: DNA331735, AY066019,
NM_000594_at
FIG. 6012A-B: DNA331736, AY070490,
NM_000595_at
FIG. 6013: DNA331737, BC009902, NM_000597_at
FIG. 6014: PRO2587
FIG. 6015: DNA217246, NP_000591.1,
NM_000600_at
FIG. 6016: PRO34288
FIG. 6017: DNA331075, NP_000601.2,
NM_000610_at
FIG. 6018: PRO86231
FIG. 6019A-C: DNA331738, AF375790,
NM_000619_at
FIG. 6020A-B: DNA220752, ITGAM,
NM_000632_at
FIG. 6021: PRO34730
FIG. 6022A-B: DNA97288, HUMBCL2C,
NM_000633_at
FIG. 6023: PRO3635
FIG. 6024: DNA331739, A12178, NM_000636_at
FIG. 6025: PRO86720
FIG. 6026: DNA331740, HUMHPC, NM_000639_at
FIG. 6027: PRO1208
FIG. 6028: DNA329000, HSU03905, NM_000647_at
FIG. 6029: PRO84690
FIG. 6030: DNA328253, NP_004029.1,
NM_000699_at
FIG. 6031: PRO84149
FIG. 6032: DNA89242, ANXA1, NM_000700_at
FIG. 6033: PRO2907
FIG. 6034: DNA88194, CD3E, NM_000733_at
FIG. 6035: PRO2220
FIG. 6036: DNA329975, PRO2325, NM_000791_at
FIG. 6037: DNA331741, BC003097, NM_000873_at
FIG. 6038: PRO86721
FIG. 6039: DNA331076, HSIFNABR,
NM_000874_at
FIG. 6040: PRO86232
FIG. 6041A-B: DNA83101, NP_000868.1,
NM_000877_at
FIG. 6042: PRO2590
FIG. 6043A-B: DNA76508, A07795, NM_000878_at
FIG. 6044: PRO2538
FIG. 6045: DNA36714, NP_000870.1,
NM_000879_at
FIG. 6046: PRO69
FIG. 6047A-B: DNA88417, HSINTAL4,
NM_000885_at
FIG. 6048: PRO2337
FIG. 6049: DNA88433, HUMINTB7A,
NM_000889_at
FIG. 6050: PRO2346
FIG. 6051: DNA226053, NP_000908.1,
NM_000917_at
FIG. 6052: PRO36516
FIG. 6053A-B: DNA331742, BC018127,
NM_000919_at
FIG. 6054: PRO86722
FIG. 6055: DNA227709, PTGER2, NM_000956_at
FIG. 6056: PRO38172
FIG. 6057: DNA226195, NP_000949.1,
NM_000958_at
FIG. 6058: PRO36658
FIG. 6059: DNA327639, TCN1, NM_001062_at
FIG. 6060: PRO83640
FIG. 6061A-B: DNA150748, ADCY7,
NM_001114_at
FIG. 6062: PRO12446
FIG. 6063: DNA171404, HSU45878, NM_001165_at
FIG. 6064: PRO20132
FIG. 6065: DNA331743, AAA19687.1,
NM_001168_at
FIG. 6066: PRO12242
FIG. 6067A-B: DNA325972, BC018739,
NM_001211_at
FIG. 6068: PRO82417
FIG. 6069: DNA287267, CCNA2, NM_001237_at
FIG. 6070: PRO37015
FIG. 6071: DNA196674, D86042, NM_001243_at
FIG. 6072: PRO2938
FIG. 6073: DNA325568, BC017575, NM_001274_at
FIG. 6074: PRO12187
FIG. 6075: DNA226177, CCR1, NM_001295_at
FIG. 6076: PRO36640
FIG. 6077: DNA331744, CTSW, NM_001335_at
FIG. 6078: PRO1574
FIG. 6079: DNA93466, HUMEDG, NM_001400_at
FIG. 6080: PRO4936
FIG. 6081: DNA331745, HSU77085, NM_001423_at
FIG. 6082: PRO12467
FIG. 6083A-C: DNA151167, HSABP280,
NM_001456_at
FIG. 6084: PRO12867
FIG. 6085A-C: DNA331746, AF043045,
NM_001457_at
FIG. 6086: PRO86723
FIG. 6087: DNA188346, FLT3LG, NM_001459_at
FIG. 6088: PRO21766
FIG. 6089: DNA227173, HSU93049, NM_001465_at
FIG. 6090: PRO37636
FIG. 6091A-B: DNA331747, GABBR1,
NM_001470_at
FIG. 6092: PRO86724
FIG. 6093A-B: DNA76503, IL10RA, NM_001558_at
FIG. 6094: PRO2536
FIG. 6095A-B: DNA227750, IL12RB2,
NM_001559_at
FIG. 6096: PRO38213
FIG. 6097: DNA76556, HSU03397, NM_001561_at
FIG. 6098: PRO2023
FIG. 6099: DNA82362, CXCL10, NM_001565_at
FIG. 6100: PRO1718
FIG. 6101: DNA227013, NP_001560.1,
NM_001569_at
FIG. 6102: PRO37476
FIG. 6103: DNA331748, BC009799, NM_001657_at
FIG. 6104: PRO46
FIG. 6105: DNA150716, HSZNFNPRA,
NM_001706_at
FIG. 6106: PRO12790
FIG. 6107: DNA331077, HUMBGPAB,
NM_001712_at
FIG. 6108: PRO86233
FIG. 6109: DNA150718, NP_001727.1,
NM_001736_at
FIG. 6110: PRO12435
FIG. 6111A-B: DNA226387, HSCYCLF,
NM_001761_at
FIG. 6112: PRO36850
FIG. 6113: DNA329002, CCT6A, NM_001762_at
FIG. 6114: PRO4912
FIG. 6115: DNA226380, HSCD37, NM_001774_at
FIG. 6116: PRO4695
FIG. 6117: DNA331749, D84277, NM_001775_at
FIG. 6118: PRO86725
FIG. 6119: DNA88199, HUMMEMGL1,
NM_001778_at
FIG. 6120: PRO2696
FIG. 6121: DNA226436, CD69, NM_001781_at
FIG. 6122: PRO36899
FIG. 6123: DNA331750, A23013, NM_001803_at
FIG. 6124: PRO2496
FIG. 6125: DNA151798, NP_001797.1,
NM_001806_at
FIG. 6126: PRO12186
FIG. 6127: DNA227232, SLC31A1, NM_001859_at
FIG. 6128: PRO37695
FIG. 6129: DNA331751, S68134, NM_001881_at
FIG. 6130: PRO86726
FIG. 6131: DNA331078, NP_001894.1,
NM_001903_at
FIG. 6132: PRO86234
FIG. 6133: DNA331752, BC010240, NM_001908_at
FIG. 6134: PRO86727
FIG. 6135: DNA225810, HSCATHL, NM_001912_at
FIG. 6136: PRO36273
FIG. 6137: DNA83048, DEFA4, NM_001925_at
FIG. 6138: PRO2057
FIG. 6139: DNA88215, NP_001919.1,
NM_001928_at
FIG. 6140: PRO2703
FIG. 6141: DNA196562, HSPCHDP7,
NM_001935_at
FIG. 6142: PRO25042
FIG. 6143: DNA226871, NP_001942.1,
NM_001951_at
FIG. 6144: PRO37334
FIG. 6145: DNA227332, NP_001943.1,
NM_001952_at
FIG. 6146: PRO37795
FIG. 6147: DNA225661, ECGF1, NM_001953_at
FIG. 6148: PRO36124
FIG. 6149: DNA273174, HSEF1DELA,
NM_00196_at
FIG. 6150: PRO61211
FIG. 6151: DNA150779, HUMETR103,
NM_001964_at
FIG. 6152: PRO12798
FIG. 6153: DNA331753, HUMENOG,
NM_001975_at
FIG. 6154: PRO38010
FIG. 6155: DNA331754, BC002464, NM_001992_at
FIG. 6156: PRO86728
FIG. 6157: DNA331755, D83920, NM_002003_at
FIG. 6158: PRO86729
FIG. 6159: DNA226881, HUMERGBFLI,
NM_002017_at
FIG. 6160: PRO37344
FIG. 6161: DNA88332, FVT1, NM_002035_at
FIG. 6162: PRO2753
FIG. 6163: DNA225979, G1P3, NM_002038_at
FIG. 6164: PRO36442
FIG. 6165: DNA331756, BC002666, NM_002053_at
FIG. 6166: PRO12478
FIG. 6167: DNA88374, GZMK, NM_002104_at
FIG. 6168: PRO2768
FIG. 6169: DNA228014, ICAM3, NM_002162_at
FIG. 6170: PRO38477
FIG. 6171: DNA331757, A17548, NM_002167_at
FIG. 6172: PRO86730
FIG. 6173: DNA76517, IL7R, NM_002185_at
FIG. 6174: PRO2541
FIG. 6175: DNA188271, NP_002179.1,
NM_002188_at
FIG. 6176: PRO21795
FIG. 6177: DNA226396, IL15RA, NM_002189_at
FIG. 6178: PRO36859
FIG. 6179: DNA227014, NP_002190.1,
NM_002199_at
FIG. 6180: PRO37477
FIG. 6181A-B: DNA88427, HSFNRB,
NM_002211_at
FIG. 6182: PRO2786
FIG. 6183: DNA103215, NP_002210.1,
NM_002219_at
FIG. 6184: PRO4545
FIG. 6185: DNA331758, S82269, NM_002222_at
FIG. 6186: PRO86731
FIG. 6187: DNA331759, BC002646, NM_002228_at
FIG. 6188: PRO4671
FIG. 6189: DNA331760, BC009466, NM_002229_at
FIG. 6190: PRO4650
FIG. 6191A-B: DNA331761, AF305731S5,
NM_002250_at
FIG. 6192: DNA150971, KLRB1, NM_002258_at
FIG. 6193: PRO12564
FIG. 6194: DNA326343, BC003572, NM_002265_at
FIG. 6195: PRO82739
FIG. 6196: DNA288243, LAG3, NM_002286_at
FIG. 6197: PRO36451
FIG. 6198A-B: DNA188301, LIF, NM_002309_at
FIG. 6199: PRO21834
FIG. 6200A-B: DNA331762, HUMLYTOXBB,
NM_002341_at
FIG. 6201: DNA88666, NP_002334.1,
NM_002343_at
FIG. 6202: PRO2892
FIG. 6203: DNA227150, LY6E, NM_002346_at
FIG. 6204: PRO37613
FIG. 6205: DNA327255, BC001061, NM_002394_at
FIG. 6206: PRO57298
FIG. 6207: DNA150937, HSU94352, NM_002405_at
FIG. 6208: PRO11598
FIG. 6209: DNA82376, CXCL9, NM_002416_at
FIG. 6210: PRO1723
FIG. 6211: DNA103283, MNDA, NM_002432_at
FIG. 6212: PRO4613
FIG. 6213: DNA103525, NP_002457.1,
NM_002466_at
FIG. 6214: PRO4852
FIG. 6215A-B: DNA331763, AF058696,
NM_002485_at
FIG. 6216: PRO36001
FIG. 6217: DNA103382, HSU49395, NM_002561_at
FIG. 6218: PRO4711
FIG. 6219A-B: DNA88331, HSFUR, NM_002569_at
FIG. 6220: PRO2752
FIG. 6221: DNA103488, PCNA, NM_002592_at
FIG. 6222: PRO4815
FIG. 6223: DNA328587, NP_002612.1,
NM_002621_at
FIG. 6224: PRO2854
FIG. 6225: DNA331764, NP_071438.1,
NM_002624_at
FIG. 6226: PRO86732
FIG. 6227: DNA227067, HSPKCB1A,
NM_002738_at
FIG. 6228: PRO37530
FIG. 6229: DNA227090, NP_002750.1,
NM_002759_at
FIG. 6230: PRO37553
FIG. 6231: DNA88626, HUMSAPABCD,
NM_002778_at
FIG. 6232: PRO2875
FIG. 6233: DNA329098, BC007897, NM_002808_at
FIG. 6234: PRO84749
FIG. 6235: DNA326853, NP_002818.1,
NM_002827_at
FIG. 6236: PRO38066
FIG. 6237: DNA88607, NP_002892.1,
NM_002901_at
FIG. 6238: PRO2863
FIG. 6239: DNA331765, AF294009, NM_002934_at
FIG. 6240: PRO2444
FIG. 6241: DNA331766, AF043339, NM_002983_at
FIG. 6242: DNA51778, HSHC21, NM_002984_at
FIG. 6243: PRO80
FIG. 6244: DNA330124, CCL22, NM_002990_at
FIG. 6245: PRO34107
FIG. 6246: DNA227788, NP_002995.1,
NM_003004_at
FIG. 6247: PRO38251
FIG. 6248: DNA329005, IISU [symbol] , NM_003037_at
FIG. 6249: PRO12612
FIG. 6250: DNA196489, HUMMCT, NM_003051_at
FIG. 6251: PRO24980
FIG. 6252A-B: DNA103542, HSLR11,
NM_003105_at
FIG. 6253: PRO4869
FIG. 6254: DNA331767, D78130, NM_003129_at
FIG. 6255: PRO37946
FIG. 6256: DNA328259, AF029311, NM_003150_at
FIG. 6257: DNA227447, HSTCF1C, NM_003202_at
FIG. 6258: PRO37910
FIG. 6259A-B: DNA226536, HSTRR,
NM_003234_at
FIG. 6260: PRO36999
FIG. 6261A-B: DNA83176, TGFBR3,
NM_003243_at
FIG. 6262: PRO2620
FIG. 6263: DNA103532, TM7SF1, NM_003272_at
FIG. 6264: PRO4859
FIG. 6265A-B: DNA103585, HUMTOPI,
NM_003286_at
FIG. 6266: PRO4909
FIG. 6267: DNA331768, BC007935, NM_003316_at
FIG. 6268: PRO22907
FIG. 6269: DNA331769, AF065241, NM_003329_at
FIG. 6270A-B: DNA331770, AF019563,
NM_003332_at
FIG. 6271: DNA331771, HSU76367, NM_003355_at
FIG. 6272: PRO86733
FIG. 6273: DNA151906, HSUNG, NM_003362_f_at
FIG. 6274: PRO12214
FIG. 6275: DNA103380, HUMVDAC1X,
NM_003374_at
FIG. 6276: PRO4710
FIG. 6277: DNA225992, NP_003374.1,
NM_003383_at
FIG. 6278: PRO36455
FIG. 6279: DNA227330, NP_003443.1,
NM_003452_at
FIG. 6280: PRO37793
FIG. 6281: DNA93449, AF025375, NM_003467_at
FIG. 6282: PRO4516
FIG. 6283: DNA331772, BC010022, NM_003504_at
FIG. 6284: PRO71058
FIG. 6285: DNA331773, AF123318, NM_003550_at
FIG. 6286: PRO86734
FIG. 6287: DNA331079, AF036342, NM_003650_at
FIG. 6288: PRO1191
FIG. 6289: DNA328260, AF305428, NM_003661_at
FIG. 6290: PRO84152
FIG. 6291: DNA151802, AB004066, NM_003670_at
FIG. 6292: PRO12890
FIG. 6293: DNA227213, NP_003671.1,
NM_003680_at
FIG. 6294: PRO37676
FIG. 6295: DNA331774, AK001769, NM_003730_at
FIG. 6296: PRO86735
FIG. 6297: DNA150433, AB005043, NM_003745_at
FIG. 6298: PRO12771
FIG. 6299: DNA328377, NP_003759.1,
NM_003768_at
FIG. 6300: PRO84232
FIG. 6301: DNA194746, HSM800355,
NM_003798_at
FIG. 6302: DNA196431, AF064090, NM_003807_at
FIG. 6303: PRO5810
FIG. 6304: DNA61870, HSU57059, NM_003810_at
FIG. 6305: PRO1096
FIG. 6306A-B: DNA200236, NP_003807.1,
NM_003816_at
FIG. 6307: PRO34137
FIG. 6308: DNA331775, BC000334, NM_003824_at
FIG. 6309: PRO4801
FIG. 6310: DNA331080, NP_003835.2,
NM_003844_at
FIG. 6311: PRO86235
FIG. 6312: DNA225550, IL18RAP, NM_003853_at
FIG. 6313: PRO36013
FIG. 6314: DNA103451, IL18R1, NM_003855_at
FIG. 6315: PRO4778
FIG. 6316: DNA151011, AF037989, NM_003877_at
FIG. 6317: PRO12839
FIG. 6318: DNA331776, IER3, NM_003897_at
FIG. 6319: PRO84760
FIG. 6320A-B: DNA150765, SLC7A6,
NM_003983_at
FIG. 6321: PRO12458
FIG. 6322: DNA88308, HUMFCREA,
NM_004106_at
FIG. 6323: PRO2739
FIG. 6324A-B: DNA331777, AF200219S2,
NM_004107_at
FIG. 6325: DNA227133, GBP2, NM_004120_at
FIG. 6326: PRO37596
FIG. 6327: DNA83091, HUMSP13E, NM_004131_at
FIG. 6328: PRO2081
FIG. 6329A-B: DNA151108, SREBF1,
NM_004176_at
FIG. 6330: PRO12105
FIG. 6331: DNA218676, AF125304, NM_004195_at
FIG. 6332: PRO34454
FIG. 6333: DNA103394, HSU81800, NM_004207_at
FIG. 6334: PRO4722
FIG. 6335: DNA329533, BC018782, NM_004221_at
FIG. 6336: PRO85085
FIG. 6337: DNA331778, AK027513, NM_004265_at
FIG. 6338: PRO86736
FIG. 6339: DNA151142, NP_004321.1,
NM_004330_at
FIG. 6340: PRO12110
FIG. 6341: DNA227303, NP_004322.1,
NM_004331_at
FIG. 6342: PRO37766
FIG. 6343: DNA287240, BST2, NM_004335_at
FIG. 6344: PRO29371
FIG. 6345: DNA225910, NP_004336.1,
NM_004345_at
FIG. 6346: PRO36373
FIG. 6347: DNA331779, CASP3, NM_004346_at
FIG. 6348: PRO12832
FIG. 6349A-B: DNA326191, NP_004351.1,
NM_004360_at
FIG. 6350: PRO2672
FIG. 6351A-C: DNA150729, HSU47741,
NM_004380_at
FIG. 6352: PRO12147
FIG. 6353A-B: DNA151420, S40832,
NM_004430_at
FIG. 6354: PRO12876
FIG. 6355A-B: DNA218283, EPHB6,
NM_004445_at
FIG. 6356: PRO34335
FIG. 6357: DNA331780, BC003110, NM_004512_at
FIG. 6358: PRO4843
FIG. 6359: DNA150935, NP_004547.1,
NM_004556_at
FIG. 6360: PRO12155
FIG. 6361A-B: DNA151831, NP_004564.1,
NM_004573_at
FIG. 6362: PRO12198
FIG. 6363: DNA328262, HSU57094, NM_004580_at
FIG. 6364: PRO84153
FIG. 6365: DNA331781, HSU77035, NM_004591_at
FIG. 6366: PRO1724
FIG. 6367: DNA331782, HUMVAIPR,
NM_004624_at
FIG. 6368: DNA329984, WRB, NM_004627_at
FIG. 6369: PRO11656
FIG. 6370: DNA329119, NP_004633.1,
NM_004642_at
FIG. 6371: PRO4550
FIG. 6372: DNA328578, NP_004656.2,
NM_004665_at
FIG. 6373: PRO7426
FIG. 6374: DNA331783, BC011726, NM_004706_at
FIG. 6375: PRO86737
FIG. 6376: DNA218284, AF053004, NM_004843_at
FIG. 6377: PRO34336
FIG. 6378: DNA151017, AB005047, NM_004844_at
FIG. 6379: PRO12841
FIG. 6380A-B: DNA150447, AB011098,
NM_004863_at
FIG. 6381: PRO12256
FIG. 6382: DNA88295, HUMERP72H,
NM_004911_at
FIG. 6383: PRO2733
FIG. 6384: DNA331784, AB001325, NM_004925_at
FIG. 6385: PRO38028
FIG. 6386A-B: DNA331785, DSC1, NM_004948_at
FIG. 6387: PRO36355
FIG. 6388: DNA227563, NP_004946.1,
NM_004955_at
FIG. 6389: PRO38026
FIG. 6390: DNA331786, HUMSTPK13,
NM_005030_at
FIG. 6391: PRO86738
FIG. 6392: DNA329011, BCL3, NM_005178_at
FIG. 6393: PRO4785
FIG. 6394: DNA331787, AF213050, NM_005192_at
FIG. 6395: PRO86739
FIG. 6396: DNA103330, HUMPOPSTK,
NM_005204_at
FIG. 6397: PRO4660
FIG. 6398: DNA331788, HUMIGCTL3,
NM_005214_at
FIG. 6399: DNA325060, NP_004075.1,
NM_005217_at
FIG. 6400: PRO2570
FIG. 6401: DNA331789, HSCFOS, NM_005252_at
FIG. 6402: DNA304668, HSPA1A, NM_005346_at
FIG. 6403: PRO71095
FIG. 6404: DNA331790, HUMCMYBA,
NM_005375_at
FIG. 6405: DNA227376, NP_005393.1,
NM_005402_at
FIG. 6406: PRO37839
FIG. 6407: DNA331791, BC005292, NM_005409_at
FIG. 6408: PRO19838
FIG. 6409: DNA329319, TOSO, NM_005449_at
FIG. 6410: PRO1607
FIG. 6411A-B: DNA189702, AF047348,
NM_005503_at
FIG. 6412: PRO22775
FIG. 6413: DNA150989, HSP27, NM_005532_at
FIG. 6414: PRO12569
FIG. 6415A-C: DNA331792, HUMOP18A,
NM_005563_at
FIG. 6416: DNA97285, LDHA, NM_005566_at
FIG. 6417: PRO3632
FIG. 6418: DNA225675, LMAN1, NM_005570_at
FIG. 6419: PRO36138
FIG. 6420: DNA331793, AF148645, NM_005614_at
FIG. 6421: PRO37938
FIG. 6422: DNA331794, BC001263, NM_005627_at
FIG. 6423: PRO86741
FIG. 6424: DNA226500, NP_005619.1,
NM_005628_at
FIG. 6425: PRO36963
FIG. 6426A-B: DNA227206, NP_005648.1,
NM_005657_at
FIG. 6427: PRO37669
FIG. 6428: DNA323937, NP_005689.2,
NM_005698_at
FIG. 6429: PRO80670
FIG. 6430: DNA331081, NP_005714.2,
NM_005723_at
FIG. 6431: PRO4845
FIG. 6432: DNA304459, PPIF, NM_005729_at
FIG. 6433: PRO37073
FIG. 6434A-B: DNA331082, AF057299,
NM_005732_at
FIG. 6435: PRO86236
FIG. 6436: DNA88541, PBEF, NM_005746_at
FIG. 6437: PRO2834
FIG. 6438: DNA329014, EBI3, NM_005755_at
FIG. 6439: PRO9998
FIG. 6440: DNA93548, NP_005758.1,
NM_005767_at
FIG. 6441: PRO4929
FIG. 6442: DNA331083, NP_005759.2,
NM_005768_at
FIG. 6443: PRO86237
FIG. 6444: DNA193866, AF081675, NM_005810_at
FIG. 6445: PRO23288
FIG. 6446: DNA75525, GPA33, NM_005814_at
FIG. 6447: PRO2524
FIG. 6448A-B: DNA88650, TACTILE,
NM_005816_at
FIG. 6449: PRO2460
FIG. 6450: DNA150959, NP_005813.1,
NM_005822_at
FIG. 6451: PRO11599
FIG. 6452: DNA329538, BC001731, NM_005898_at
FIG. 6453: PRO85088
FIG. 6454: DNA324110, MDH1, NM_005917_at
FIG. 6455: PRO4918
FIG. 6456: DNA328266, NP_005993.1,
NM_006002_at
FIG. 6457: PRO12125
FIG. 6458: DNA150941, NP_006012.1,
NM_006021_at
FIG. 6459: PRO12548
FIG. 6460: DNA227138, NP_006045.1,
NM_006054_at
FIG. 6461: PRO37601
FIG. 6462: DNA88614, HSRING6, NM_006120_at
FIG. 6463: PRO2867
FIG. 6464: DNA331795, NP_006129.2,
NM_006138_at
FIG. 6465: PRO81984
FIG. 6466: DNA331796, HUMCD284,
NM_006139_at
FIG. 6467: DNA330114, GPR19, NM_006143_at
FIG. 6468: PRO4946
FIG. 6469: DNA88372, HUMHFSP, NM_006144_at
FIG. 6470: PRO2312
FIG. 6471: DNA103526, HSU10485, NM_006152_at
FIG. 6472: PRO4853
FIG. 6473: DNA331797, BC020544, NM_006159_at
FIG. 6474: PRO2520
FIG. 6475: DNA151049, S74017, NM_006164_at
FIG. 6476: PRO12170
FIG. 6477A-B: DNA151841, HUMA20,
NM_006290_at
FIG. 6478: PRO12904
FIG. 6479: DNA331798, TSG101, NM_006292_at
FIG. 6480: PRO86742
FIG. 6481: DNA83109, HUMIIP, NM_006332_at
FIG. 6482: PRO2592
FIG. 6483: DNA331799, AY034481, NM_006372_at
FIG. 6484: PRO83688
FIG. 6485: DNA329540, UBD, NM_006398_at
FIG. 6486: PRO85090
FIG. 6487: DNA331800, BC007107, NM_006406_at
FIG. 6488: PRO12111
FIG. 6489: DNA331801, BC012589, NM_006419_at
FIG. 6490: PRO21708
FIG. 6491: DNA227795, CCT7, NM_006429_at
FIG. 6492: PRO38258
FIG. 6493: DNA329225, BC005926, NM_006495_at
FIG. 6494: PRO84833
FIG. 6495: DNA327702, AF074002, NM_006499_at
FIG. 6496: PRO83684
FIG. 6497: DNA151804, RELB, NM_006509_at
FIG. 6498: PRO12188
FIG. 6499A-B: DNA331802, AF012108,
NM_006534_at
FIG. 6500: PRO86743
FIG. 6501: DNA93439, HSY13248, NM_006564_at
FIG. 6502: PRO4515
FIG. 6503: DNA227751, NP_006557.1,
NM_006566_at
FIG. 6504: PRO38214
FIG. 6505: DNA227126, NP_006559.1,
NM_006568_at
FIG. 6506: PRO37589
FIG. 6507: DNA331803, AF116456, NM_006573_at
FIG. 6508: PRO738
FIG. 6509: DNA331804, BC001572, NM_006579_at
FIG. 6510: PRO12082
FIG. 6511: DNA324740, NP_006577.1,
NM_006586_at
FIG. 6512: PRO81365
FIG. 6513: DNA331805, HSM801976,
NM_006620_at
FIG. 6514: PRO86744
FIG. 6515: DNA328544, HSFIBLP, NM_006682_at
FIG. 6516: PRO84347
FIG. 6517: DNA227035, HUMHUMCM5,
NM_006739_at
FIG. 6518: PRO37498
FIG. 6519: DNA227512, NP_006736.1,
NM_006745_at
FIG. 6520: PRO37975
FIG. 6521A-B: DNA331806, AB005666,
NM_006747_at
FIG. 6522: PRO86745
FIG. 6523: DNA227416, NP_006745.1,
NM_006754_at
FIG. 6524: PRO37879
FIG. 6525: DNA331807, HSU30498, NM_006762_at
FIG. 6526: PRO86746
FIG. 6527: DNA227190, NP_006830.1,
NM_006839_at
FIG. 6528: PRO37653
FIG. 6529: DNA150812, RTVP1, NM_006851_at
FIG. 6530: PRO12481
FIG. 6531: DNA331808, HSU82278, NM_006866_at
FIG. 6532: PRO86747
FIG. 6533: DNA103221, NP_006866.1,
NM_006875_at
FIG. 6534: PRO4551
FIG. 6535: DNA328271, ZWINT, NM_007057_at
FIG. 6536: PRO81868
FIG. 6537: DNA331809, NP_009046.1,
NM_007115_at
FIG. 6538: PRO86748
FIG. 6539: DNA103587, HSMRL3R, NM_007208_at
FIG. 6540: PRO4911
FIG. 6541: DNA330180, TRC8, NM_007218_at
FIG. 6542: PRO85428
FIG. 6543: DNA331810, HSU64805, NM_007295_at
FIG. 6544: PRO23937
FIG. 6545: DNA331086, AB027467, NM_012112_at
FIG. 6546: PRO86239
FIG. 6547A-B: DNA226290, HSU28811,
NM_012201_at
FIG. 6548: PRO36753
FIG. 6549: DNA227143, NP_036400.1,
NM_012268_at
FIG. 6550: PRO37606
FIG. 6551A-B: DNA150955, NP_036420.1,
NM_012288_at
FIG. 6552: PRO12559
FIG. 6553: DNA331811, AF083247, NM_012328_at
FIG. 6554: PRO1471
FIG. 6555A-B: DNA227255, STAG3,
NM_012447_at
FIG. 6556: PRO37718
FIG. 6557: DNA304476, NP_036585.1,
NM_012453_at
FIG. 6558: PRO1125
FIG. 6559: DNA88510, HSNKG5, NM_012483_at
FIG. 6560: PRO2822
FIG. 6561: DNA103418, AF032862, NM_012484_at
FIG. 6562: PRO4746
FIG. 6563: DNA88189, HUMCD24B,
NM_013230_at
FIG. 6564: PRO2690
FIG. 6565: DNA331812, BC019883, NM_013269_at
FIG. 6566: PRO86749
FIG. 6567: DNA103481, HUMAUANTIG,
NM_013285_at
FIG. 6568: PRO4808
FIG. 6569: DNA196426, H963, NM_013308_at
FIG. 6570: PRO24924
FIG. 6571A-B: DNA329017, AF035947,
NM_013324_at
FIG. 6572: PRO84692
FIG. 6573: DNA150648, HIG2, NM_013332_at
FIG. 6574: PRO11576
FIG. 6575A-B: DNA331813, AF213467,
NM_013448_at
FIG. 6576: PRO86750
FIG. 6577: DNA304461, HSPC067, NM_014158_at
FIG. 6578: PRO71039
FIG. 6579: DNA331814, BC009642, NM_014164_at
FIG. 6580: PRO86751
FIG. 6581: DNA330374, ORMDL2, NM_014182_at
FIG. 6582: PRO23321
FIG. 6583: DNA88203, CD5, NM_014207_at
FIG. 6584: PRO2698
FIG. 6585A-B: DNA331815, AF135372,
NM_014232_at
FIG. 6586: DNA331816, BC003067, NM_014330_at
FIG. 6587: PRO12543
FIG. 6588: DNA331817, NP_055154.2,
NM_014339_at
FIG. 6589: PRO86240
FIG. 6590: DNA227233, NP_055157.1,
NM_014342_at
FIG. 6591: PRO37696
FIG. 6592: DNA227351, AF191020, NM_014367_at
FIG. 6593: PRO37814
FIG. 6594: DNA331088, NP_055252.2,
NM_014437_at
FIG. 6595: PRO80674
FIG. 6596: DNA330084, SIT, NM_014450_at
FIG. 6597: PRO9895
FIG. 6598: DNA324198, NP_055400.1,
NM_014585_at
FIG. 6599: PRO37675
FIG. 6600A-B: DNA151879, NP_055463.1,
NM_014648_at
FIG. 6601: PRO12743
FIG. 6602: DNA194805, NP_055500.1,
NM_014685_at
FIG. 6603: PRO24075
FIG. 6604A-B: DNA150467, AB018335,
NM_014698_at
FIG. 6605: PRO12272
FIG. 6606A-B: DNA194778, KIAA0152,
NM_014730_at
FIG. 6607: PRO24056
FIG. 6608A-B: DNA277809, KIAA0275,
NM_14767_at
FIG. 6609: PRO64556
FIG. 6610A-B: DNA227353, SEC24D,
NM_014822_at
FIG. 6611: PRO37816
FIG. 6612: DNA93507, NP_055694.1,
NM_014879_at
FIG. 6613: PRO4948
FIG. 6614A-B: DNA150954, KIAA0022,
NM_014880_at
FIG. 6615: PRO12558
FIG. 6616A-B: DNA227293, DNA227293,
NM_014883_at
FIG. 6617: PRO37756
FIG. 6618: DNA150805, FAM3C, NM_014888_at
FIG. 6619: PRO11583
FIG. 6620A-B: DNA194837, NP_055714.1,
NM_014899_at
FIG. 6621: PRO24100
FIG. 6622A-B: DNA304464, CHSY1,
NM_014918_at
FIG. 6623: PRO71042
FIG. 6624: DNA330103, MD-2, NM_015364_at
FIG. 6625: PRO19671
FIG. 6626: DNA150872, NP_56202.1,
NM_015387_at
FIG. 6627: PRO12814
FIG. 6628: DNA328590, BC001232, NM_015864_at
FIG. 6629: PRO84375
FIG. 6630: DNA196569, NP_056957.1,
NM_015873_at
FIG. 6631: PRO19859
FIG. 6632: DNA150865, LOC51596, NM_015921_at
FIG. 6633: PRO11587
FIG. 6634: DNA150832, NP_057019.2,
NM_015935_at
FIG. 6635: PRO12491
FIG. 6636: DNA331089, NP_057143.1,
NM_016059_at
FIG. 6637: PRO4984
FIG. 6638: DNA331818, AF151899, NM_016072_at
FIG. 6639: PRO793
FIG. 6640: DNA328663, AK001280, NM_016073_at
FIG. 6641: PRO36183
FIG. 6642: DNA331819, BC006807, NM_016077_at
FIG. 6643: PRO38080
FIG. 6644: DNA150661, LOC51030, NM_016078_at
FIG. 6645: PRO12398
FIG. 6646: DNA329292, AF085360, NM_016101_at
FIG. 6647: PRO84882
FIG. 6648: DNA329923, HSPC035, NM_016127_at
FIG. 6649: PRO85237
FIG. 6650: DNA304832, NP_057327.1,
NM_016243_at
FIG. 6651: PRO71239
FIG. 6652: DNA328831, AF126780, NM_016245_at
FIG. 6653: PRO233
FIG. 6654: DNA328513, AF151895, NM_016283_at
FIG. 6655: PRO37815
FIG. 6656: DNA304781, LOC51184, NM_016301_at
FIG. 6657: PRO71191
FIG. 6658: DNA331820, BC001144, NM_016306_at
FIG. 6659: PRO1080
FIG. 6660: DNA331821, AK023410, NM_016354_at
FIG. 6661: PRO86752
FIG. 6662: DNA330390, AF178985, NM_016546_at
FIG. 6663: PRO85599
FIG. 6664: DNA331822, AF318357, NM_016553_at
FIG. 6665: PRO86753
FIG. 6666: DNA227298, NP_057649.1,
NM_016565_at
FIG. 6667: PRO37761
FIG. 6668: DNA327869, NRN1, NM_016588_at
FIG. 6669: PRO1898
FIG. 6670: DNA331823, AK027682, NM_017424_at
FIG. 6671: PRO86754
FIG. 6672: DNA225694, FLJ20005, NM_017617_at
FIG. 6673: PRO36157
FIG. 6674: DNA326385, NP_060117.2,
NM_017647_at
FIG. 6675: PRO82778
FIG. 6676: DNA287206, FLJ20073, NM_017654_at
FIG. 6677: PRO69488
FIG. 6678: DNA227294, FLJ20303, NM_017755_at
FIG. 6679: PRO37757
FIG. 6680: DNA226646, NP_060352.1,
NM_017882_at
FIG. 6681: PRO37109
FIG. 6682: DNA331824, BC010907, NM_017906_at
FIG. 6683: PRO86755
FIG. 6684: DNA330537, HELLS, NM_018063_at
FIG. 6685: PRO81892
FIG. 6686: DNA328628, BC011983, NM_018072_at
FIG. 6687: PRO84406
FIG. 6688: DNA328841, BC003082, NM_018087_at
FIG. 6689: PRO84575

[symbol]

FIG. 6730: DNA327199, DJ971N18.2,
NM_021156_at
FIG. 6731: PRO83475
FIG. 6732: DNA227276, NP_005702.1,
NM_021618_at
FIG. 6733: PRO37739
FIG. 6734A-B: DNA331832, AF051850,
NM_021738_at
FIG. 6735: PRO86758
FIG. 6736: DNA331833, AF269133, NM_021798_at
FIG. 6737: PRO86759

[symbol]

HUMKG1BB_at
FIG. 6776: PRO86762
FIG. 6777A-B: DNA331842, BC004375,
AF261758_at
FIG. 6778: PRO38492
FIG. 6779: DNA331095, NP_005216.1, HUME2F_at
FIG. 6780: PRO86245
FIG. 6781: DNA331843, AF202723, AB014568_at
FIG. 6782: DNA159542, DNA159542,
HUMMAC30X_at
FIG. 6783: DNA331844, BC009267,
HUMLAMBBA_at
FIG. 6784: PRO82888
FIG. 6785: DNA331096, S75881, P_V84330_at
FIG. 6786: PRO86246
FIG. 6787: DNA287239, AF212242, AK024843_at
FIG. 6788: PRO38497
FIG. 6789: DNA154390, DNA154390,
HUMP13KIN_at
FIG. 6790: DNA151247, DNA151247, P_V43601_at
FIG. 6791: PRO11643
FIG. 6792: DNA329950, MGC5576, P_V43613_at
FIG. 6793: PRO11558
FIG. 6794: DNA161927, DNA161927, P_Z29229_at
FIG. 6795: DNA155316, DNA155316, P_A09058_at
FIG. 6796: DNA329026, AF230200, AK021966_at
FIG. 6797A-B: DNA228052, DNA228052,
AB006624_at
FIG. 6798: PRO38515
FIG. 6799: DNA161913, DNA161913,
HSM800208_at
FIG. 6800: DNA331845, AK027432,
HSM800284_at
FIG. 6801: PRO86763
FIG. 6802: DNA329430, SPPL2A, AX027882_at
FIG. 6803: PRO38524
FIG. 6804: DNA151422, DNA151422, P_X04312_at
FIG. 6805: PRO11792
FIG. 6806: DNA228066, NP_079431.1,
AK021910_at
FIG. 6807: PRO38529
FIG. 6808A-C: DNA330360, FYCO1, AK023397_at
FIG. 6809: PRO85576
FIG. 6810: DNA287185, DNA287185, P_V84564_at
FIG. 6811: PRO37492
FIG. 6812: DNA331846, AF272741,
HUMTCBYY_at
FIG. 6813: DNA331097, AK027322, AX041977_at
FIG. 6814: PRO86247
FIG. 6815: DNA151756, DNA151756, P_X84947_at
FIG. 6816: PRO12037
FIG. 6817: DNA151761, DNA151761, P_X84970_at
FIG. 6818: PRO12039
FIG. 6819: DNA331847, BC008330, AK026632_at
FIG. 6820: PRO38556
FIG. 6821: DNA326258, MGC2941, AK026537_at
FIG. 6822: PRO82665
FIG. 6823A-B: DNA287330, AB032991,
AB032991_at
FIG. 6824: DNA331848, 1510819.1, P_X99863_at
FIG. 6825: PRO86764
FIG. 6826: DNA331849, HSINSP4BP,
HSINSP4BP_at
FIG. 6827: PRO66285
FIG. 6828A-B: DNA331850, HSA237724,
HSA237724_at
FIG. 6829: DNA328049, 981676.1, HSM800856_at
FIG. 6830: PRO83963
FIG. 6831: DNA331851, AK027334, P_A51904_at
FIG. 6832: PRO23392
FIG. 6833: DNA193996, DNA193996, P_A40502_at
FIG. 6834: PRO23400
FIG. 6835: DNA194019, DNA194019, AK000004_at
FIG. 6836: PRO23421
FIG. 6837: DNA194063, DNA194063, P_V84608_at
FIG. 6838: PRO23460
FIG. 6839: DNA83046, NP_000565.1, P_X30170_at
FIG. 6840: PRO2569
FIG. 6841: DNA331852, 985629.1, P_Z59467_at
FIG. 6842: PRO86765
FIG. 6843: DNA195915, DNA195915, P_X85020_at
FIG. 6844: DNA331853, BC001305, AK027031_at
FIG. 6845: PRO23769
FIG. 6846A-B: DNA328720, NP_078800.2,
P_X35729_at
FIG. 6847: PRO84476
FIG. 6848: DNA194679, BAA05062.1,
HUMORFT_at
FIG. 6849: PRO23989
FIG. 6850: DNA331854, AF244129, AF244129_at
FIG. 6851: PRO86766
FIG. 6852: DNA194766, DJ434O14.3,
HS434O143_at
FIG. 6853: PRO24046
FIG. 6854: DNA331855, BLP1, P_Z98236_at
FIG. 6855: PRO85742
FIG. 6856: DNA330358, BC008904, AX011617_at
FIG. 6857: PRO85574
FIG. 6858: DNA330380, FLJ12436, AK022498_at
FIG. 6859: PRO85592
FIG. 6860: DNA328288, NP_073591.1,
AK022938_at
FIG. 6861: PRO69876
FIG. 6862: DNA196036, DNA196036,
AI471699_RC_at
FIG. 6863: DNA331098, AY052405, AX047348_at
FIG. 6864: PRO86248
FIG. 6865A-B: DNA331099, AB058685,
AX048187_at
FIG. 6866: DNA331100, BC021238, P_X84987_at
FIG. 6867: PRO86249
FIG. 6868: DNA331101, NP_114143.1, 250446.2_at
FIG. 6869: PRO86250
FIG. 6870: DNA331856, BC022522, 237658.8_at
FIG. 6871: PRO71209
FIG. 6872: DNA106360, DNA106360, 164869.1_at
FIG. 6873: DNA155526, DNA155526, 251178.1_at
FIG. 6874: DNA331102, NP_116052.1, 481267.1_at
FIG. 6875: PRO86251
FIG. 6876: DNA196289, DNA196289, 230230.2_at
FIG. 6877: DNA323696, BC015160, 428335.22_at
FIG. 6878: DNA326749, NP_116101.1,
DNA167237_at
FIG. 6879: PRO23238
FIG. 6880: DNA210391, DNA210391, P_X85039_at
FIG. 6881: PRO34886
FIG. 6882: DNA331103, NP_009125.1,
NM_007194_at
FIG. 6883: PRO34956
FIG. 6884: DNA331857, SIRPB2, NM_018556_at
FIG. 6885: PRO86767
FIG. 6886: DNA254406, NP_060854.1,
NM_018384_at
FIG. 6887: PRO49516
FIG. 6888A-B: DNA331858, ABCA7,
NM_019112_at
FIG. 6889: PRO86768
FIG. 6890: DNA255704, NP_057570.1,
NM_016486_at
FIG. 6891: PRO50764
FIG. 6892: DNA331859, AF267245, NM_016523_at
FIG. 6893: PRO86769
FIG. 6894: DNA254470, HSU11050, NM_002497_at
FIG. 6895: PRO49578
FIG. 6896A-B: DNA256461, HSAJ6266,
NM_007086_at
FIG. 6897: PRO51498
FIG. 6898: DNA330480, FLJ10808, NM_018227_at
FIG. 6899: PRO85677
FIG. 6900: DNA328669, NP_005882.1,
NM_005891_at
FIG. 6901: PRO84441
FIG. 6902: DNA254777, CORO1C, NM_014325_at
FIG. 6903: PRO49875
FIG. 6904A-B: DNA329991, TIMELESS,
NM_003920_at
FIG. 6905: PRO85284
FIG. 6906: DNA255161, IFRG28, NM_022147_at
FIG. 6907: PRO50241
FIG. 6908: DNA327812, IFI44, NM_006417_at
FIG. 6909: PRO83773
FIG. 6910: DNA304716, CDKN1A, NM_000389_at
FIG. 6911: PRO71142
FIG. 6912: DNA328431, HSCKSHS1,
NM_001826_at
FIG. 6913: PRO45093
FIG. 6914: DNA269926, HSCDC2R, NM_001786_at
FIG. 6915: PRO58324
FIG. 6916: DNA331104, NP_066280.1,
NM_021000_f_at
FIG. 6917: PRO86252
FIG. 6918A-B: DNA274893, NP_006282.1,
NM_006291_at
FIG. 6919: PRO62634
FIG. 6920: DNA271455, LOC51339, NM_016651_at
FIG. 6921: PRO59751
FIG. 6922: DNA329172, GFI1, NM_005263_at
FIG. 6923: PRO84796
FIG. 6924: DNA331860, BC010940, NM_004833_at
FIG. 6925: PRO86770
FIG. 6926: DNA329274, AF187064, NM_014380_at
FIG. 6927: PRO84870
FIG. 6928A-B: DNA328535, NP_009147.2,
NM_007216_at
FIG. 6929: PRO60044
FIG. 6930: DNA331861, MAP2K6, NM_002758_at
FIG. 6931: PRO86771
FIG. 6932: DNA331105, NP_009012.1,
NM_007081_at
FIG. 6933: PRO86253
FIG. 6934: DNA256257, LAMP3, NM_014398_at
FIG. 6935: PRO51301
FIG. 6936: DNA256033, NP_060164.1,
NM_017694_at
FIG. 6937: PRO51081
FIG. 6938A-B: DNA331106, NP_065107.1,
NM_020374_at
FIG. 6939: PRO86254
FIG. 6940A-B: DNA254789, LOC51696,
NM_016217_at
FIG. 6941: PRO49887
FIG. 6942A-B: DNA254376, AB023180,
NM_014963_at
FIG. 6943: PRO49486
FIG. 6944: DNA254129, ARMET, NM_006010_at
FIG. 6945: PRO49244
FIG. 6946: DNA331862, AX008892, NM_005484_at
FIG. 6947: PRO86772
FIG. 6948: DNA256407, HSA249248,
NM_014373_at
FIG. 6949: PRO51448
FIG. 6950A-C: DNA256495, HSU33841,
NM_000051_at
FIG. 6951: PRO51531
FIG. 6952: DNA330384, FLJ20647, NM_017918_at
FIG. 6953: PRO51129
FIG. 6954: DNA331863, AK000318, NM_017760_at
FIG. 6955: PRO86773
FIG. 6956: DNA256533, NP_006105.1,
NM_006114_at
FIG. 6957: PRO51565
FIG. 6958A-B: DNA287273, AF092563,
NM_006444_at
FIG. 6959: PRO69545
FIG. 6960: DNA256295, DNA256295,
NM_002319_at
FIG. 6961: PRO51339
FIG. 6962A-C: DNA331864, HSA303086,
NM_002266_at
FIG. 6963: DNA254350, AF002697, NM_004052_at
FIG. 6964: PRO49461
FIG. 6965: DNA255010, NP_061869.1,
NM_018996_at
FIG. 6966: PRO50099
FIG. 6967: DNA329900, HUMA1SBU,
NM_002914_at
FIG. 6968: PRO81549
FIG. 6969: DNA323838, CDKN2C, NM_001262_at
FIG. 6970: PRO59546
FIG. 6971: DNA271093, CNK, NM_004073_at
FIG. 6972: PRO59417
FIG. 6973: DNA331108, NP_005265.1,
NM_005274_at
FIG. 6974: PRO10780
FIG. 6975: DNA290234, RGS2, NM_002923_at
FIG. 6976: PRO70333
FIG. 6977: DNA275015, HSU31383, NM_004125_at
FIG. 6978: PRO62743
FIG. 6979: DNA256854, HSU76638, NM_000465_at
FIG. 6980: PRO51785
FIG. 6981: DNA331865, IRF7, NM_004031_at
FIG. 6982: PRO86774
FIG. 6983: DNA255271, EMR2, NM_013447_at
FIG. 6984: PRO50348
FIG. 6985: DNA331866, AB020970, NM_022154_at
FIG. 6986: DNA331867, AF058762, NM_003857_at
FIG. 6987A-B: DNA331109, NP_005155.1,
NM_005164_at
FIG. 6988: PRO50662
FIG. 6989: DNA331110, NP_057563.3,
NM_016479_at
FIG. 6990: PRO86256
FIG. 6991: DNA254276, HSPC154, NM_014177_at
FIG. 6992: PRO49387
FIG. 6993: DNA287241, LAP3, NM_015907_at
FIG. 6994: PRO69516
FIG. 6995A-B: DNA331111, NP_004229.1,
NM_004238_at
FIG. 6996: PRO86257
FIG. 6997: DNA255261, NP_060262.1,
NM_017792_at
FIG. 6998: PRO50338
FIG. 6999A-B: DNA331868, HSM802180,
NM_017631_at
FIG. 7000: DNA331869, NP_067024.1,
NM_021201_at
FIG. 7001: PRO50191
FIG. 7002A-B: DNA255846, NP_057424.1,
NM_016340_at
FIG. 7003: PRO50900
FIG. 7004: DNA331870, AK001274, NM_017613_at
FIG. 7005: PRO86776
FIG. 7006: DNA287221, LOC51191, NM_016323_at
FIG. 7007: PRO69500
FIG. 7008: DNA331871, BC017842, NM_004851_at
FIG. 7009: PRO86777
FIG. 7010: DNA260982, NP_060819.1,
NM_018349_at
FIG. 7011: PRO54728
FIG. 7012: DNA329033, NP_005375.1,
NM_005384_at
FIG. 7013: PRO84700
FIG. 7014: DNA271095, AF091433, NM_004702_at
FIG. 7015: PRO59418
FIG. 7016: DNA297387, NP_003494.1,
NM_003503_at
FIG. 7017: PRO58394
FIG. 7018: DNA331872, AF099644, NM_001255_at
FIG. 7019: PRO86778
FIG. 7020: DNA331873, PTPN7, NM_002832_at
FIG. 7021: PRO69609
FIG. 7022: DNA269750, NP_002919.1,
NM_002928_at
FIG. 7023: PRO58159
FIG. 7024: DNA268036, AB023416, NM_013258_at
FIG. 7025: PRO57311
FIG. 7026: DNA270522, NP_006013.1,
NM_006022_at
FIG. 7027: PRO58899
FIG. 7028: DNA330057, MT1G, NM_005950_at
FIG. 7029: PRO85337
FIG. 7030A-B: DNA331113, NP_005914.1,
NM_005923_at
FIG. 7031: PRO60244
FIG. 7032: DNA331874, BC002847, NM_016103_at
FIG. 7033: PRO84581
FIG. 7034: DNA269791, NP_001168.1,
NM_001177_at
FIG. 7035: PRO58197
FIG. 7036: DNA331114, AF291719, NM_007182_at
FIG. 7037: PRO86258
FIG. 7038: DNA329580, HSU78170, NM_005825_at
FIG. 7039: PRO85114
FIG. 7040: DNA281436, NP_003286.1,
NM_017627_at
FIG. 7041: PRO66275
FIG. 7042: DNA331875, CDC25B, NM_021874_at
FIG. 7043: PRO83123
FIG. 7044: DNA331876, BC005912, NM_002001_at
FIG. 7045: PRO2280
FIG. 7046: DNA256737, FLJ20406, NM_017806_at
FIG. 7047: PRO51671
FIG. 7048: DNA255432, NP_060283.1,
NM_017813_at
FIG. 7049: PRO50499
FIG. 7050A-B: DNA254262, NP_055197.1,
NM_014382_at
FIG. 7051: PRO49373
FIG. 7052: DNA331877, HUMHMGAB,
NM_000859_at
FIG. 7053: DNA328901, BC002748, NM_017866_at
FIG. 7054: PRO84622
FIG. 7055: DNA254416, NP_060915.1,
NM_018445_at
FIG. 7056: PRO49526
FIG. 7057: DNA331115, AF221521, NM_020524_at
FIG. 7058: PRO86259
FIG. 7059: DNA255326, AF055993, NM_003864_at
FIG. 7060: PRO50396
FIG. 7061A-C: DNA328498, AF285167,
NM_005502_at
FIG. 7062: PRO84320
FIG. 7063: DNA331878, AF246240, NM_018480_at
FIG. 7064: PRO86779
FIG. 7065: DNA331879, AK021999, NM_022765_at
FIG. 7066: PRO86780
FIG. 7067: DNA255135, AB016068, NM_005857_at
FIG. 7068: PRO50216
FIG. 7069: DNA331116, NP_060656.1,
NM_018186_at
FIG. 7070: PRO86260
FIG. 7071: DNA237817, HSU33286, NM_001316_at
FIG. 7072: PRO38923
FIG. 7073A-B: DNA329904, AF203032,
NM_021076_at
FIG. 7074: PRO85221
FIG. 7075: DNA329583, AD24, NM_022451_at
FIG. 7076: PRO85117
FIG. 7077: DNA331117, NP_065170.1,
NM_020437_at
FIG. 7078: PRO86261
FIG. 7079: DNA254710, FLJ20637, NM_017912_at
FIG. 7080: PRO49810
FIG. 7081: DNA331880, HSIFI56R, NM_001548_at
FIG. 7082: PRO59911
FIG. 7083A-B: DNA270323, HSU34605,
NM_012420_at
FIG. 7084: PRO58710
FIG. 7085: DNA287224, ISG15, NM_005101_at
FIG. 7086: PRO69503
FIG. 7087: DNA269922, HSISG20GN,
NM_002201_at
FIG. 7088: PRO58320
FIG. 7089: DNA331118, NP_201569.1,
NM_003672_at
FIG. 7090: PRO86262
FIG. 7091: DNA272655, HSCKSHS2,
NM_001827_at
FIG. 7092: PRO60781
FIG. 7093A-B: DNA329160, NP_002821.1,
NM_002830_at
FIG. 7094: PRO84789
FIG. 7095: DNA270415, GNA15, NM_002068_at
FIG. 7096: PRO58796
FIG. 7097: DNA331881, AK023223, NM_016131_at
FIG. 7098: PRO10928
FIG. 7099: DNA270059, NP_003920.1,
NM_003929_at
FIG. 7100: PRO58452
FIG. 7101: DNA273487, RAB33A, NM_004794_at
FIG. 7102: PRO61470
FIG. 7103: DNA326306, NP_066960.1,
NM_021137_at
FIG. 7104: PRO62566
FIG. 7105: DNA287378, AF244135, NM_018428_at
FIG. 7106: PRO69637
FIG. 7107: DNA327879, MDA5, NM_022168_at
FIG. 7108: PRO83818
FIG. 7109A-B: DNA327674, NP_002739.1,
NM_002748_at
FIG. 7110: PRO83661
FIG. 7111: DNA331882, AB030251, NM_013277_at
FIG. 7112: PRO86781
FIG. 7113: DNA254518, LOC51713, NM_016270_at
FIG. 7114: PRO49625
FIG. 7115: DNA256561, CRTAM, NM_019604_at
FIG. 7116: PRO51592
FIG. 7117: DNA331883, AF096290, NM_003645_at
FIG. 7118: PRO51139
FIG. 7119: DNA255215, AF207600, NM_018638_at
FIG. 7120: PRO50294
FIG. 7121A-B: DNA256807, FAM8A1,
NM_016255_at
FIG. 7122: PRO51738
FIG. 7123: DNA260974, TRIM22, NM_006074_at
FIG. 7124: PRO54720
FIG. 7125: DNA330443, PRO2037, NM_018616_at
FIG. 7126: PRO2037
FIG. 7127: DNA331119, NP_005433.2,
NM_005442_at
FIG. 7128: PRO50745
FIG. 7129: DNA254274, NP_073573.1,
NM_022736_at
FIG. 7130: PRO49385
FIG. 7131: DNA255088, HUMTK, NM_003258_at
FIG. 7132: PRO50174
FIG. 7133: DNA255113, FLJ22693, NM_022750_at
FIG. 7134: PRO50195
FIG. 7135: DNA331884, BC008870, NM_017606_at
FIG. 7136: PRO49604
FIG. 7137: DNA331885, MRPL35, NM_016622_at
FIG. 7138: PRO86782
FIG. 7139: DNA272245, NP_055301.1,
NM_0144861_f_at
FIG. 7140: PRO60507
FIG. 7141A-D: DNA331886, AF051160,
NM_003463_at
FIG. 7142: DNA330877, HKE2, NM_014260_at
FIG. 7143: PRO86040
FIG. 7144: DNA295327, IL21, NM_021803_at
FIG. 7145: PRO70773
FIG. 7146: DNA287178, HSU52513, NM_001549_at
FIG. 7147: PRO69467
FIG. 7148: DNA327661, HUMIFI16A,
NM_005531_at
FIG. 7149: PRO83652
FIG. 7150A-B: DNA329036, HSU63738,
NM_002460_at
FIG. 7151: PRO84703
FIG. 7152: DNA273523, NP_002154.1,
NM_002163_at
FIG. 7153: PRO61504
FIG. 7154: DNA331887, AF002822, NM_004701_at
FIG. 7155: PRO82442
FIG. 7156: DNA331888, AF022109, NM_001254_at
FIG. 7157: PRO60595
FIG. 7158: DNA273535, AB011421, NM_004226_at
FIG. 7159: PRO61515
FIG. 7160: DNA275012, NMI, NM_004688_at
FIG. 7161: PRO62740
FIG. 7162: DNA331120, NP_008976.1,
NM_007045_at
FIG. 7163: PRO86263
FIG. 7164: DNA331889, AF182076, NM_015710_at
FIG. 7165: PRO84173
FIG. 7166: DNA331890, AF095287,
NM_004219_f_at
FIG. 7167: PRO81319
FIG. 7168: DNA331121, AF175306, NM_014288_at
FIG. 7169: PRO86264
FIG. 7170: DNA327858, AF120334, NM_012341_at
FIG. 7171: PRO83800
FIG. 7172: DNA331122, NR_005728.2,
NM_005737_at
FIG. 7173: PRO86265
FIG. 7174: DNA289528, ARL3, NM_004311_at
FIG. 7175: PRO70286
FIG. 7176: DNA270526, HUMLYGDI,
NM_001175_at
FIG. 7177: PRO58903
FIG. 7178: DNA271931, NP_005745.1,
NM_005754_at
FIG. 7179: PRO60207
FIG. 7180: DNA329123, RANBP1, NM_002882_at
FIG. 7181: PRO84765
FIG. 7182A-B: DNA331891, HSM800983,
NM_014922_at
FIG. 7183: DNA331892, BC019255, NM_006452_at
FIG. 7184: PRO84240
FIG. 7185: DNA329587, AF192466, NM_012124_at
FIG. 7186: PRO85121
FIG. 7187A-B: DNA329248, A2B002359,
AB002359_at
FIG. 7188: DNA254668, AB002437, AB002437_at
FIG. 7189: DNA256233, DNA256233,
AB017268_f_at
FIG. 7190: PRO51278
FIG. 7191A-B: DNA255448, BAA92554.1,
AB037737_at
FIG. 7192: PRO50515
FIG. 7193A-B: DNA255619, AF054589,
AF054589_at
FIG. 7194: PRO50682
FIG. 7195: DNA331123, AF062649, AF062649_f_at
FIG. 7196: PRO86266
FIG. 7197A-B: DNA331893, AB058697,
AK001581_at
FIG. 7198: DNA331894, HSM802273, AB032963_at
FIG. 7199: DNA331895, HUMTLEIV, AB033087_at
FIG. 7200: PRO86785
FIG. 7201A-B: DNA329039, DORFIN,
AK027070_at
FIG. 7202: PRO84706
FIG. 7203: DNA255040, CAB55998.1,
HSM801103_at
FIG. 7204: PRO50128
FIG. 7205: DNA328509, NP_006739.1,
HSU44403_at
FIG. 7206: PRO57996
FIG. 7207: DNA254338, HUMPLT, HUMPLT_at
FIG. 7208: PRO49449
FIG. 7209: DNA331896, AF067008, NM_001363_at
FIG. 7210: PRO49881
FIG. 7211: DNA331897, BC008843, AB007915_at
FIG. 7212: PRO86786
FIG. 7213: DNA331124, NP_079430.1,
AB018353_at
FIG. 7214: PRO86267
FIG. 7215A-B: DNA330736, AB033044,
AB033044_at
FIG. 7216A-B: DNA331125, AB037815,
AB037815_at
FIG. 7217A-B: DNA331898, AF058925,
AF058925_at
FIG. 7218: PRO86787
FIG. 7219: DNA331126, AF078867, AF078866_at
FIG. 7220: PRO86269
FIG. 7221: DNA254836, BAA91233.1,
AK000529_at
FIG. 7222: PRO49931
FIG. 7223: DNA88277, NP_006721.1, AK027197_at
FIG. 7224: PRO2724
FIG. 7225: DNA331899, 1399286.1,
AW290940_RC_at
FIG. 7226: PRO86788
FIG. 7227: DNA256872, HSM801990,
HSM801990_at
FIG. 7228A-B: DNA254192, HUMKIAAK,
HUMKIAAK_at
FIG. 7229: DNA331900, BIN2, NM_016293_at
FIG. 7230: PRO86789
FIG. 7231A-B: DNA256731, BAA83028.1,
AB028999_at
FIG. 7232: PRO51665
FIG. 7233: DNA331901, HSM801036, AB029015_at
FIG. 7234A-B: DNA331127, BAA86477.1,
AB032989_at
FIG. 7235: PRO86270
FIG. 7236A-B: DNA254672, BAA92652.1,
AB037835_at
FIG. 7237: PRO49773
FIG. 7238A-C: DNA331128, NP_065892.1,
AB040884_at
FIG. 7239: PRO84841
FIG. 7240: DNA269976, AAC14260.1,
AF039023_at
FIG. 7241: PRO58372
FIG. 7242: DNA331129, HSA227869,
HSA227869_r_at
FIG. 7243: DNA256422, HSA227900,
HSA227900_at
FIG. 7244: DNA331902, BC014522,
HSSOM172M_at
FIG. 7245: PRO86790
FIG. 7246: DNA329040, BC001356, HSU72882_at
FIG. 7247: PRO84707
FIG. 7248: DNA331130, AAK50430.1,
HUMTI227HC_at
FIG. 7249: PRO86272
FIG. 7250A-B: DNA331131, HSA223948,
AY013288_at
FIG. 7251: DNA326056, NP_072088.1,
AY007810_at
FIG. 7252: PRO82491
FIG. 7253: DNA329041, HSM800399, AF132199_at
FIG. 7254: DNA255780, AK022209, AK022209_at
FIG. 7255: PRO50835
FIG. 7256: DNA254922, AK022604, AK022604_at
FIG. 7257: PRO50012
FIG. 7258: DNA330432, FLJ23235, AK026888_at
FIG. 7259: PRO85636
FIG. 7260A-B: DNA256299, AB051489,
AB051489_at
FIG. 7261: DNA331903, BC015380, HSM801707_at
FIG. 7262: DNA255626, HSM802849,
HSM802849_at
FIG. 7263: PRO50690
FIG. 7264: DNA331132, NP_115524.1,
HSM801796_at
FIG. 7265: PRO86273
FIG. 7266: DNA255964, NP_079113.1,
AK025125_at
FIG. 7267: PRO51015
FIG. 7268: DNA255465, AK024313, AK024313_at
FIG. 7269: PRO50532
FIG. 7270: DNA329597, AK022178, AK022178_at
FIG. 7271: PRO85129
FIG. 7272: DNA254228, NP_079236.1,
AK021791_at
FIG. 7273: PRO49340
FIG. 7274: DNA331904, AK023431, AF298880_at
FIG. 7275: PRO86791
FIG. 7276: DNA329078, AF214006, HSM801679_at
FIG. 7277: PRO23253
FIG. 7278: DNA256784, FLJ22104, AK025757_at
FIG. 7279: PRO51716
FIG. 7280: DNA331905, AK001823,
HSM801648_at
FIG. 7281: PRO86792
FIG. 7282: DNA329044, NP_064562.1,
AK025265_at
FIG. 7283: PRO84709
FIG. 7284: DNA331906, HSA227916,
NM_001530_at
FIG. 7285: DNA330023, GADD45A, NM_001924_at
FIG. 7286: PRO85308
FIG. 7287A-B: DNA272191, RSN, NM_002956_at
FIG. 7288: PRO60456
FIG. 7289: DNA328418, HUMG0S24A,
NM_003407_at
FIG. 7290: PRO84261
FIG. 7291: DNA331133, HSU63830, NM_004180_at
FIG. 7292: PRO86274
FIG. 7293: DNA271310, DUSP8, NM_004420_at
FIG. 7294: PRO59617
FIG. 7295: DNA331907, AKAP7, NM_004842_at
FIG. 7296: PRO63228
FIG. 7297: DNA287203, NP_006182.1,
NM_006191_at
FIG. 7298: PRO69487
FIG. 7299: DNA274783, HSU26424, NM_006281_at
FIG. 7300: PRO62549
FIG. 7301A-B: DNA255281, NP_006380.1,
NM_006389_at
FIG. 7302: PRO50357
FIG. 7303: DNA328712, NP_006501.1,
NM_006510_at
FIG. 7304: PRO84469
FIG. 7305: DNA331908, AF161440, NM_012111_at
FIG. 7306: DNA330065, STK18, NM_014264_at
FIG. 7307: PRO85345
FIG. 7308: DNA152148, DNA152148,
HSP1CDC21_at
FIG. 7309: PRO10290
FIG. 7310: DNA329925, HSBP1, NM_001537_at
FIG. 7311: PRO85239
FIG. 7312: DNA331909, HSCFANT, NM_002964_at
FIG. 7313: PRO86795
FIG. 7314: DNA329139, NP_003893.2,
NM_003902_at
FIG. 7315: PRO84774
FIG. 7316: DNA331910, HSSEC232, NM_006363_at
FIG. 7317: PRO86796
FIG. 7318: DNA329047, BATF, NM_006399_at
FIG. 7319: PRO58425
FIG. 7320: DNA274167, AF026166, NM_006431_at
FIG. 7321: PRO62097
FIG. 7322: DNA254572, NP_006576.1,
NM_006585_at
FIG. 7323: PRO49675
FIG. 7324A-B: DNA331911, AB003334,
NM_006644_at
FIG. 7325: PRO86797
FIG. 7326: DNA331912, BC009405, NM_013411_at
FIG. 7327: PRO86798
FIG. 7328: DNA255289, MELK, NM_014791_at
FIG. 7329: PRO50363
FIG. 7330A-B: DNA331913, BAB21784.1,
NM_015383_at
FIG. 7331: PRO86799
FIG. 7332: DNA329148, LOC51042, NM_015871_at
FIG. 7333: PRO84782
FIG. 7334: DNA326221, AF125098, NM_016095_at
FIG. 7335: PRO82634
FIG. 7336: DNA331914, BC009398,
HUMP1CDC47_at
FIG. 7337: PRO86800
FIG. 7338A-B: DNA328312, HUMAREB6,
HUMAREB6_at
FIG. 7339: PRO84180
FIG. 7340: DNA325941, HSPCA, HSHSP90R_at
FIG. 7341: PRO82388
FIG. 7342: DNA328483, VIT1, NM_000179_at
FIG. 7343: PRO84309
FIG. 7344: DNA271847, HUMDNAJHOM,
NM_001539_at
FIG. 7345: PRO60127
FIG. 7346: DNA331915, BC001786, NM_002014_at
FIG. 7347: PRO59262
FIG. 7348: DNA331916, HUMMIF, NM_002415_at
FIG. 7349: DNA331917, PHF1, NM_002636_at
FIG. 7350: PRO86802
FIG. 7351: DNA329604, SRP54, NM_003136_at
FIG. 7352: PRO85134
FIG. 7353A-B: DNA331134, NP_003381.1,
NM_003390_at
FIG. 7354: PRO86275
FIG. 7355A-B: DNA290265, ZNF91,
NM_003430_f_at
FIG. 7356: PRO70395
FIG. 7357A-C: DNA331918, AF009425,
NM_004338_at
FIG. 7358: PRO86803
FIG. 7359: DNA254582, NP_004626.1,
NM_004635_at
FIG. 7360: PRO49685
FIG. 7361A-B: DNA275334, NP_112162.1,
NM_004749_at
FIG. 7362: PRO63009
FIG. 7363: DNA254157, HSU13045, NM_005254_at
FIG. 7364: PRO49271
FIG. 7365A-B: DNA124122, RBL2, NM_005611_at
FIG. 7366: PRO6323
FIG. 7367: DNA330776, TOB1, NM_005749_at
FIG. 7368: PRO58014
FIG. 7369: DNA326980, AF140598, NM_014248_at
FIG. 7370: PRO83289
FIG. 7371: DNA271608, HUMRSC419,
NM_014670_at
FIG. 7372: PRO59895
FIG. 7373: DNA272928, HUMORFKG1F,
NM_014764_at
FIG. 7374: PRO61012
FIG. 7375: DNA290235, NP_057121.1,
NM_016037_at
FIG. 7376: PRO70335
FIG. 7377: DNA331135, HUMKG1DD,
HUMKG1DD_at
FIG. 7378A-B: DNA330119, AF226044,
HUMKIAAQ_at
FIG. 7379: PRO85381
FIG. 7380: DNA331137, HS24P52,
HUMHSP70H_at
FIG. 7381: PRO86278
FIG. 7382A-B: DNA269805, NP_001263.1,
NM_001272_at
FIG. 7383: PRO58209
FIG. 7384: DNA270689, HSGATA3R,
NM_002051_at
FIG. 7385: PRO59053
FIG. 7386: DNA331919, HUMCFA, NM_002965_at
FIG. 7387: PRO80648
FIG. 7388A-B: DNA304800, NP_004146.1,
NM_004155_at
FIG. 7389: PRO69458
FIG. 7390: DNA273418, AAG01157.1,
NM_004301_at
FIG. 7391: PRO61417
FIG. 7392: DNA330066, MLLT3, NM_004529_at
FIG. 7393: PRO85346
FIG. 7394: DNA270733, S46622, NM_005605_at
FIG. 7395: PRO59094
FIG. 7396: DNA331138, NP_005997.2,
NM_006006_at
FIG. 7397: PRO86279
FIG. 7398: DNA331139, NP_006865.1,
NM_006874_at
FIG. 7399: PRO81172
FIG. 7400: DNA331920, AF090950, NM_015675_at
FIG. 7401: PRO84384
FIG. 7402: DNA329050, MRPS17, NM_015969_at
FIG. 7403: PRO84712
FIG. 7404A-B: DNA329122, GS3955,
NM_021643_at
FIG. 7405: PRO84764
FIG. 7406: DNA331921, 244055.1, AF320911_at
FIG. 7407: PRO86804
FIG. 7408: DNA331922, AK026275, AK026275_at
FIG. 7409: PRO86805
FIG. 7410A-B: DNA254516, AF288399,
AF288399_at
FIG. 7411: PRO49623
FIG. 7412: DNA328313, NP_115579.1,
AK025076_at
FIG. 7413: PRO84181
FIG. 7414: DNA327865, NP_079105.1,
AK026315_at
FIG. 7415: PRO83806
FIG. 7416: DNA294813, NP_444283.1, P_T67134_at
FIG. 7417: PRO70763
FIG. 7418A-B: DNA254706, AB046851,
AB046851_at
FIG. 7419: DNA329052, NP_078801.1,
AK026237_at
FIG. 7420: PRO84714
FIG. 7421: DNA256890, BC008988, P_Z00467_at
FIG. 7422: PRO51824
FIG. 7423: DNA256291, FLJ21032, AK024685_f_at
FIG. 7424: PRO51335
FIG. 7425: DNA331923, HSUCP2X12, P_C69111_at
FIG. 7426: DNA213665, DNA213665, P_X30166_at
FIG. 7427: PRO35126
FIG. 7428: DNA331140, 332752.10, AK023798_at
FIG. 7429: PRO86280
FIG. 7430A-B: DNA331141, BAB13420.1,
AB046814_at
FIG. 7431: PRO86281
FIG. 7432: DNA331924, BC004932, AK024551_at
FIG. 7433: PRO21434
FIG. 7434A-B: DNA256267, AB046838,
AB046838_at
FIG. 7435: DNA327954, BAL, P_D00629_at
FIG. 7436: PRO83879
FIG. 7437: DNA255798, FLJ12377, AK022439_at
FIG. 7438: PRO50853
FIG. 7439: DNA330389, FLJ12888, AK022950_at
FIG. 7440: PRO85598
FIG. 7441: DNA330086, FLJ12973, AK023035_at
FIG. 7442: PRO85360
FIG. 7443: DNA331142, NP_116325.1, P_Z98137_at
FIG. 7444: PRO51781
FIG. 7445: DNA329384, BC008502, P_Z33372_at
FIG. 7446: PRO84960
FIG. 7447A-B: DNA331143, NP_149075.2,
AK022613_at
FIG. 7448: PRO86282
FIG. 7449: DNA331925, 424693.10, AK022231_at
FIG. 7450: PRO86806
FIG. 7451: DNA331144, NP_078834.1,
AK023982_at
FIG. 7452: PRO86283
FIG. 7453A-B: DNA331926, BAB13449.1,
AB046843_at
FIG. 7454: PRO51258
FIG. 7455: DNA255197, DNA255197, P_Z50392_at
FIG. 7456: PRO50276
FIG. 7457: DNA328010, NP_149016.1,
HSM801092_at
FIG. 7458: PRO83928
FIG. 7459: DNA262805, DNA262805,
HSM800425_at
FIG. 7460: DNA331146, 1400830.1,
HUMJNLTRA_at
FIG. 7461: PRO86284
FIG. 7462: DNA328317, cig5, AF026941_at
FIG. 7463: PRO69493
FIG. 7464: DNA331147, NP_079104.1,
AF131768_at
FIG. 7465: PRO86285
FIG. 7466: DNA255770, DNA255770, AK022106_at
FIG. 7467A-C: DNA254412, EVI5, AF008915_at
FIG. 7468: PRO49522
FIG. 7469: DNA331148, 978273.10, AK023244_at
FIG. 7470: PRO86286
FIG. 7471: DNA330532, AK026279, AK026279_at
FIG. 7472: PRO85719
FIG. 7473: DNA330388, FLJ23468, AK027121_at
FIG. 7474: PRO85597
FIG. 7475: DNA331927, AK026969, AK026969_at
FIG. 7476: PRO86807
FIG. 7477: DNA330447, FLJ22757, AK026410_at
FIG. 7478: PRO85648
FIG. 7479: DNA324984, FLJ12298, AK022360_at
FIG. 7480: PRO81578
FIG. 7481: DNA331149, 7697327.1, HSM802839_at
FIG. 7482: PRO86287
FIG. 7483A-B: DNA256267, DNA256267,
AK023113_at
FIG. 7484: PRO51311
FIG. 7485: DNA331150, BC017725, 1387341.2_at
FIG. 7486: PRO86288
FIG. 7487: DNA257606, DNA257606, 428093.1_at
FIG. 7488: DNA258375, AF283301, 413231.5_at
FIG. 7489: PRO52516
FIG. 7490: DNA331928, AK027419, 154551.10_at
FIG. 7491: PRO86808
FIG. 7492: DNA328319, BC019562, 411364.2_at
FIG. 7493: DNA290812, DNA290812,
220495.3_CON_at
FIG. 7494: PRO70559
FIG. 7495: DNA304799, BC022410, 337588.1_at
FIG. 7496: PRO52633
FIG. 7497: DNA257403, DNA257403, 012814.1_at
FIG. 7498: DNA304820, NP_115940.1, 317557.1_at
FIG. 7499: PRO47351
FIG. 7500: DNA331929, BC019246,
441855.8_CON_at
FIG. 7501: PRO83338
FIG. 7502: DNA260581, DNA260581, 127987.6_at
FIG. 7503: PRO54507
FIG. 7504: DNA257576, DNA257576, 334945.2_at
FIG. 7505: DNA304819, BC004398, 202113.2_at
FIG. 7506: DNA304794, FBXO30, 222128.1_at
FIG. 7507: PRO71206
FIG. 7508: DNA259323, DNA259323, 022997.1_at
FIG. 7509: PRO53256
FIG. 7510: DNA304796, MED8, 237428.13_at
FIG. 7511: PRO71208
FIG. 7512: DNA259615, DNA259615, 1000203.1_at
FIG. 7513: DNA304805, AK027628, 475113.7_at
FIG. 7514: PRO69531
FIG. 7515: DNA304793, GBP4, 206425.2_at
FIG. 7516: PRO71205
FIG. 7517: DNA331151, 018033.1,
018033.1_CON_at
FIG. 7518: PRO86289
FIG. 7519: DNA304068, AK057631, 1091656.1_at
FIG. 7520: PRO71035
FIG. 7521: DNA257714, EPSTI1, 337352.17_at
FIG. 7522: PRO52268
FIG. 7523: DNA304798, NP_443097.1, 246119.7_at
FIG. 7524: PRO71210
FIG. 7525: DNA258721, DNA258721, 197627.1_at
FIG. 7526A-B: DNA257461, NP_113607.1,
086533.1_at
FIG. 7527: PRO52040
FIG. 7528: DNA331152, 1042156.3, 1042156.3_at
FIG. 7529: PRO86290
FIG. 7530: DNA331153, 004052.1, 004052.1_at
FIG. 7531: PRO86291
FIG. 7532: DNA331930, AK054582, 978231.1_at
FIG. 7533: PRO86809
FIG. 7534: DNA259587, DNA259587, 220866.1_at
FIG. 7535: DNA106195, DNA106195, 359193.13_at
FIG. 7536: DNA331154, 212376.1, 212376.1_at
FIG. 7537: PRO86292
FIG. 7538: DNA331155, 112652.1, 112652.1_at
FIG. 7539: PRO86293
FIG. 7540: DNA304806, BC019022, 983343.1_at
FIG. 7541: PRO71215
FIG. 7542: DNA262708, DNA262708,
118516.1_RC_at
FIG. 7543: DNA259475, DNA259475, 239162.1_at
FIG. 7544: DNA269148, DNA269148, 411192.2_at
FIG. 7545: DNA304817, BC015532, 211436.3_at
FIG. 7546: PRO71224
FIG. 7547: DNA260313, DNA260313, 1098929.1_at
FIG. 7548: PRO54242
FIG. 7549A-B: DNA328325, NP_061142.1,
445188.4_at
FIG. 7550: PRO84190
FIG. 7551A-B: DNA304800, SERPINB9,
354740.1_at
FIG. 7552: PRO69458
FIG. 7553: DNA331156, 118180.1, 118180.1_at
FIG. 7554: PRO86294
FIG. 7555: DNA287659, AK027790, 406833.1_at
FIG. 7556: PRO69903
FIG. 7557: DNA331931, 092555.3, 092555.4_at
FIG. 7558: PRO86810
FIG. 7559: DNA331157, NP_439896.1, 022541.5_at
FIG. 7560: PRO86295
FIG. 7561: DNA260573, DNA260573, 899597.1_at
FIG. 7562: PRO54499
FIG. 7563: DNA260157, DNA260157, 236833.1_at
FIG. 7564: PRO54086
FIG. 7565: DNA174145, DNA174145, 100083.2_at
FIG. 7566: PRO35770
FIG. 7567: DNA260167, DNA260167, 264556.1_at
FIG. 7568A-B: DNA331932, 239260.1, 239260.1_at
FIG. 7569: PRO86811
FIG. 7570: DNA260031, DNA260031, 161526.1_at
FIG. 7571: DNA258907, DNA258907, 347940.2_at
FIG. 7572: PRO52840
FIG. 7573: DNA257455, DNA257455, 977723.3_at
FIG. 7574: PRO52035
FIG. 7575: DNA304807, BC014978, 005415.2_at
FIG. 7576: PRO71216
FIG. 7577: DNA258864, DNA258864, 331965.1_at
FIG. 7578: DNA304811, 428051.2, 428051.2_at
FIG. 7579: PRO71220
FIG. 7580: DNA257389, FLJ14906, 987098.1_at
FIG. 7581: PRO51974
FIG. 7582: DNA331158, 130352.1, 130352.1_at
FIG. 7583: PRO86296
FIG. 7584: DNA258951, DNA258951, 222361.1_at
FIG. 7585: DNA331159, NP_077291.1,
411426.29_at
FIG. 7586: PRO86297
FIG. 7587: DNA257784, DNA257784, 481853.1_at
FIG. 7588: DNA331933, AF272148, 074299.1_at
FIG. 7589: PRO86812

### BRIEF DESCRIPTION OF THE DRAWINGS

[0061] In the list of figures for the present application, specific cDNA sequences which are differentially expressed in differentiated macrophages as compared to normal undifferentiated monocytes are individually identified with a specific alphanumerical designation. These cDNA sequences are differentially expressed in monocytes that are specifically treated as described in Example 1 below. If start and/or stop codons have been identified in a cDNA sequence shown in the attached figures, they are shown in bold and underlined font, and the encoded polypeptide is shown in the next consecutive figure.

[0062] The FIGS. 1-7589 show the nucleic acids of the invention and their encoded PRO polypeptides. Also included, for convenience is a List of Figures, which gives the figure number and the corresponding DNA or PRO number.

### DETAILED DESCRIPTION OF THE PREFERRED EMBODIMENTS

I. Definitions

[0063] The terms “PRO polypeptide” and “PRO” as used herein and when immediately followed by a numerical designation refer to various polypeptides, wherein the complete designation (i.e., PRO/number) refers to specific polypeptide sequences as described herein. The terms “PRO/number polypeptide” and “PRO/number” wherein the term “number” is provided as an actual numerical designation as used herein encompass native sequence polypeptides and polypeptide variants (which are further defined herein). The PRO polypeptides described herein may be isolated from a variety of sources, such as from human tissue types or from another source, or prepared by recombinant or synthetic methods. The term “PRO polypeptide” refers to each individual PRO/number polypeptide disclosed herein. All disclosures in this specification which refer to the “PRO polypeptide” refer to each of the polypeptides individually as well as jointly. For example, descriptions of the preparation of, purification of, derivation of, formation of antibodies to or against, administration of, compositions containing, treatment of a disease with, etc., pertain to each polypeptide of the invention individually. The term “PRO polypeptide” also includes variants of the PRO/number polypeptides disclosed herein.

[0064] A “native sequence PRO polypeptide” comprises a polypeptide having the same amino acid sequence as the corresponding PRO polypeptide derived from nature. Such native sequence PRO polypeptides can be isolated from nature or can be produced by recombinant or synthetic means. The term “native sequence PRO polypeptide” specifically encompasses naturally-occurring truncated or secreted forms of the specific PRO polypeptide (e.g., an extracellular domain sequence), naturally-occurring variant forms (e.g., alternatively spliced forms) and naturally-occurring allelic variants of the polypeptide. In various embodiments of the invention, the native sequence PRO polypeptides disclosed herein are mature or full-length native sequence polypeptides comprising the full-length amino acids sequences shown in the accompanying figures. Start and stop codons are shown in bold font and underlined in the figures. However, while the PRO polypeptide disclosed in the accompanying figures are shown to begin with methionine residues designated herein as amino acid position 1 in the figures, it is conceivable and possible that other methionine residues located either upstream or downstream from the amino acid position 1 in the figures may be employed as the starting amino acid residue for the PRO polypeptides.

[0065] The PRO polypeptide “extracellular domain” or “ECD” refers to a form of the PRO polypeptide which is essentially free of the transmembrane and cytoplasmic domains. Ordinarily, a PRO polypeptide ECD will have less than 1% of such transmembrane and/or cytoplasmic domains and preferably, will have less than 0.5% of such domains. It will be understood that any transmembrane domains identified for the PRO polypeptides of the present invention are identified pursuant to criteria routinely employed in the art for identifying that type of hydrophobic domain. The exact boundaries of a transmembrane domain may vary but most likely by no more than about 5 amino acids at either end of the domain as initially identified herein. Optionally, therefore, an extracellular domain of a PRO polypeptide may contain from about 5 or fewer amino acids on either side of the transmembrane domain/extracellular domain boundary as identified in the Examples or specification and such polypeptides, with or without the associated signal peptide, and nucleic acid encoding them, are contemplated by the present invention.

[0066] The approximate location of the “signal peptides” of the various PRO polypeptides disclosed herein are shown in the present specification and/or the accompanying figures. It is noted, however, that the C-terminal boundary of a signal peptide may vary, but most likely by no more than about 5 amino acids on either side of the signal peptide C-terminal boundary as initially identified herein, wherein the C-terminal boundary of the signal peptide may be identified pursuant to criteria routinely employed in the art for identifying that type of amino acid sequence element (e.g., Nielsen et al., Prot. Eng. 10:1-6 (1997) and von Heinje et al., Nucl. Acids. Res. 14:4683-4690 (1986)). Moreover, it is also recognized that, in some cases, cleavage of a signal sequence from a secreted polypeptide is not entirely uniform, resulting in more than one secreted species. These mature polypeptides, where the signal peptide is cleaved within no more than about 5 amino acids on either side of the C-terminal boundary of the signal peptide as identified herein, and the polynucleotides encoding them, are contemplated by the present invention.

[0067] “PRO polypeptide variant” means an active PRO polypeptide as defined above or below having at least about 80% amino acid sequence identity with a full-length native sequence PRO polypeptide sequence as disclosed herein, a PRO polypeptide sequence lacking the signal peptide as disclosed herein, an extracellular domain of a PRO polypeptide, with or without the signal peptide, as disclosed herein or any other fragment of a full-length PRO polypeptide sequence as disclosed herein. Such PRO polypeptide variants include, for instance, PRO polypeptides wherein one or more amino acid residues are added, or deleted, at the N- or C-terminus of the full-length native amino acid sequence. Ordinarily, a PRO polypeptide variant will have at least about 80% amino acid sequence identity, alternatively at least about 81% amino acid sequence identity, alternatively at least about 82% amino acid sequence identity, alternatively at least about 83% amino acid sequence identity, alternatively at least about 84% amino acid sequence identity, alternatively at least about 85% amino acid sequence identity, alternatively at least about 86% amino acid sequence identity, alternatively at least about 87% amino acid sequence identity, alternatively at least about 88% amino acid sequence identity, alternatively at least about 89% amino acid sequence identity, alternatively at least about 90% amino acid sequence identity, alternatively at least about 91% amino acid sequence identity, alternatively at least about 92% amino acid sequence identity, alternatively at least about 93% amino acid sequence identity, alternatively at least about 94% amino acid sequence identity, alternatively at least about 95% amino acid sequence identity, alternatively at least about 96% amino acid sequence identity, alternatively at least about 97% amino acid sequence identity, alternatively at least about 98% amino acid sequence identity and alternatively at least about 99% amino acid sequence identity to a full-length native sequence PRO polypeptide sequence as disclosed herein, a PRO polypeptide sequence lacking the signal peptide as disclosed herein, an extracellular domain of a PRO polypeptide, with or without the signal peptide, as disclosed herein or any other specifically defined fragment of a full-length PRO polypeptide sequence as disclosed herein. Ordinarily, PRO variant polypeptides are at least about 10 amino acids in length, alternatively at least about 20 amino acids in length, alternatively at least about 30 amino acids in length, alternatively at least about 40 amino acids in length, alternatively at least about 50 amino acids in length, alternatively at least about 60 amino acids in length, alternatively at least about 70 amino acids in length, alternatively at least about 80 amino acids in length, alternatively at least about 90 amino acids in length, alternatively at least about 100 amino acids in length, alternatively at least about 150 amino acids in length, alternatively at least about 200 amino acids in length, alternatively at least about 300 amino acids in length, or more.

[0068] “Percent (%) amino acid sequence identity” with respect to the PRO polypeptide sequences identified herein is defined as the percentage of amino acid residues in a candidate sequence that are identical with the amino acid residues in the specific PRO polypeptide sequence, after aligning the sequences and introducing gaps, if necessary, to achieve the maximum percent sequence identity, and not considering any conservative substitutions as part of the sequence identity. Alignment for purposes of determining percent amino acid sequence identity can be achieved in various ways that are within the skill in the art, for instance, using publicly available computer software such as BLAST, BLAST-2, ALIGN or Megalign (DNASTAR) software. Those skilled in the art can determine appropriate parameters for measuring alignment, including any algorithms needed to achieve maximal alignment over the full length of the sequences being compared. For purposes herein, however, % amino acid sequence identity values are generated using the sequence comparison computer program ALIGN-2, wherein the complete source code for the ALIGN-2 program is provided in Table 1 below. The ALIGN-2 sequence comparison computer program was authored by Genentech, Inc. and the source code shown in Table 1 below has been filed with user documentation in the U.S. Copyright Office, Washington D.C., 20559, where it is registered under U.S. Copyright Registration No. TXU510087. The ALIGN-2 program is publicly available through Genentech, Inc., South San Francisco, Calif. or may be compiled from the source code provided in Table 1 below. The ALIGN-2 program should be compiled for use on a UNIX operating system, preferably digital UNIX V4.0D. All sequence comparison parameters are set by the ALIGN-2 program and do not vary.

[0069] In situations where ALIGN-2 is employed for amino acid sequence comparisons, the % amino acid sequence identity of a given amino acid sequence A to, with, or against a given amino acid sequence B (which can alternatively be phrased as a given amino acid sequence A that has or comprises a certain % amino acid sequence identity to, with, or against a given amino acid sequence B) is calculated as follows:
100 times the fraction X/Y
where X is the number of amino acid residues scored as identical matches by the sequence alignment program ALIGN-2 in that program's alignment of A and B, and where Y is the total number of amino acid residues in B. It will be appreciated that where the length of amino acid sequence A is not equal to the length of amino acid sequence B, the % amino acid sequence identity of A to B will not equal the % amino acid sequence identity of B to A. As examples of % amino acid sequence identity calculations using this method, Tables 2 and 3 demonstrate how to calculate the % amino acid sequence identity of the amino acid sequence designated “Comparison Protein” to the amino acid sequence designated “PRO”, wherein “PRO” represents the amino acid sequence of a hypothetical PRO polypeptide of interest, “Comparison Protein” represents the amino acid sequence of a polypeptide against which the “PRO” polypeptide of interest is being compared, and “X, “Y” and “Z” each represent different hypothetical amino acid residues.

[0070] Unless specifically stated otherwise, all % amino acid sequence identity values used herein are obtained as described in the immediately preceding paragraph using the ALIGN-2 computer program. However, % amino acid sequence identity values may also be obtained as described below by using the WU-BLAST-2 computer program (Altschul et al., Methods in Enzymology 266:460-480 (1996)). Most of the WU-BLAST-2 search parameters are set to the default values. Those not set to default values, i.e., the adjustable parameters, are set with the following values: overlap span=1, overlap fraction=0.125, word threshold (T)=11, and scoring matrix=BLOSUM62. When WU-BLAST-2 is employed, a % amino acid sequence identity value is determined by dividing (a) the number of matching identical amino acid residues between the amino acid sequence of the PRO polypeptide of interest having a sequence derived from the native PRO polypeptide and the comparison amino acid sequence of interest (i.e., the sequence against which the PRO polypeptide of interest is being compared which may be a PRO variant polypeptide) as determined by WU-BLAST-2 by (b) the total number of amino acid residues of the PRO polypeptide of interest For example, in the statement “a polypeptide comprising an the amino acid sequence A which has or having at least 80% amino acid sequence identity to the amino acid sequence B”, the amino acid sequence A is the comparison amino acid sequence of interest and the amino acid sequence B is the amino acid sequence of the PRO polypeptide of interest.

[0071] Percent amino acid sequence identity may also be determined using the sequence comparison program NCBI-BLAST2 (Altschul et al., Nucleic Acids Res. 25:3389-3402 (1997)). The NCBI-BLAST2 sequence comparison program may be downloaded from http://www.ncbi.nlm.nih.gov or otherwise obtained from the National Institute of Health, Bethesda, Md. NCBI-BLAST2 uses several search parameters, wherein all of those search parameters are set to default values including, for example, unmask=yes, strand=all, expected occurrences=10, minimum low complexity length=15/5, multi-pass e-value=0.01, constant for multi-pass=25, dropoff for final gapped alignment=25 and scoring matrix=BLOSUM62.

[0072] In situations where NCBI-BLAST2 is employed for amino acid sequence comparisons, the % amino acid sequence identity of a given amino acid sequence A to, with, or against a given amino acid sequence B (which can alternatively be phrased as a given amino acid sequence A that has or comprises a certain % amino acid sequence identity to, with, or against a given amino acid sequence B) is calculated as follows:
100 times the fraction X/Y
where X is the number of amino acid residues scored as identical matches by the sequence alignment program NCBI-BLAST2 in that program's alignment of A and B, and where Y is the total number of amino acid residues in B. It will be appreciated that where the length of amino acid sequence A is not equal to the length of amino acid sequence B, the % amino acid sequence identity of A to B will not equal the % amino acid sequence identity of B to A.

[0073] “PRO variant polynucleotide” or “PRO variant nucleic acid sequence” means a nucleic acid molecule which encodes an active PRO polypeptide as defined below and which has at least about 80% nucleic acid sequence identity with a nucleotide acid sequence encoding a full-length native sequence PRO polypeptide sequence as disclosed herein, a full-length native sequence PRO polypeptide sequence lacking the signal peptide as disclosed herein, an extracellular domain of a PRO polypeptide, with or without the signal peptide, as disclosed herein or any other fragment of a full-length PRO polypeptide sequence as disclosed herein. Ordinarily, a PRO variant polynucleotide will have at least about 80% nucleic acid sequence identity, alternatively at least about 81% nucleic acid sequence identity, alternatively at least about 82% nucleic acid sequence identity, alternatively at least about 83% nucleic acid sequence identity, alternatively at least about 84% nucleic acid sequence identity, alternatively at least about 85% nucleic acid sequence identity, alternatively at least about 86% nucleic acid sequence identity, alternatively at least about 87% nucleic acid sequence identity, alternatively at least about 88% nucleic acid sequence identity, alternatively at least about 89% nucleic acid sequence identity, alternatively at least about 90% nucleic acid sequence identity, alternatively at least about 91% nucleic acid sequence identity, alternatively at least about 92% nucleic acid sequence identity, alternatively at least about 93% nucleic acid sequence identity, alternatively at least about 94% nucleic acid sequence identity, alternatively at least about 95% nucleic acid sequence identity, alternatively at least about 96% nucleic acid sequence identity, alternatively at least about 97% nucleic acid sequence identity, alternatively at least about 98% nucleic acid sequence identity and alternatively at least about 99% nucleic acid sequence identity with a nucleic acid sequence encoding a full-length native sequence PRO polypeptide sequence as disclosed herein, a full-length native sequence PRO polypeptide sequence lacking the signal peptide as disclosed herein, an extracellular domain of a PRO polypeptide, with or without the signal sequence, as disclosed herein or any other fragment of a full-length PRO polypeptide sequence as disclosed herein. Variants do not encompass the native nucleotide sequence.

[0074] Ordinarily, PRO variant polynucleotides are at least about 30 nucleotides in length, alternatively at least about 60 nucleotides in length, alternatively at least about 90 nucleotides in length, alternatively at least about 120 nucleotides in length, alternatively at least about 150 nucleotides in length, alternatively at least about 180 nucleotides in length, alternatively at least about 210 nucleotides in length, alternatively at least about 240 nucleotides in length, alternatively at least about 270 nucleotides in length, alternatively at least about 300 nucleotides in length, alternatively at least about 450 nucleotides in length, alternatively at least about 600 nucleotides in length, alternatively at least about 900 nucleotides in length, or more.

[0075] “Percent (%) nucleic acid sequence identity” with respect to PRO-encoding nucleic acid sequences identified herein is defined as the percentage of nucleotides in a candidate sequence that are identical with the nucleotides in the PRO nucleic acid sequence of interest, after aligning the sequences and introducing gaps, if necessary, to achieve the maximum percent sequence identity. Alignment for purposes of determining percent nucleic acid sequence identity can be achieved in various ways that are within the skill in the art, for instance, using publicly available computer software such as BLAST, BLAST-2, ALIGN or Megalign (DNASTAR) software. For purposes herein, however, % nucleic acid sequence identity values are generated using the sequence comparison computer program ALIGN-2, wherein the complete source code for the ALIGN-2 program is provided in Table 1 below. The ALIGN-2 sequence comparison computer program was authored by Genentech, Inc. and the source code shown in Table 1 below has been filed with user documentation in the U.S. Copyright Office, Washington D.C., 20559, where it is registered under U.S. Copyright Registration No. TXU510087. The ALIGN-2 program is publicly available through Genentech, Inc., South San Francisco, Calif. or may be compiled from the source code provided in Table 1 below. The ALIGN-2 program should be compiled for use on a UNIX operating system, preferably digital UNIX V4.0D. All sequence comparison parameters are set by the ALIGN-2 program and do not vary.

[0076] In situations where ALIGN-2 is employed for nucleic acid sequence comparisons, the % nucleic acid sequence identity of a given nucleic acid sequence C to, with, or against a given nucleic acid sequence D (which can alternatively be phrased as a given nucleic acid sequence C that has or comprises a certain % nucleic acid sequence identity to, with, or against a given nucleic acid sequence D) is calculated as follows:
100 times the fraction W/Z
where W is the number of nucleotides scored as identical matches by the sequence alignment program ALIGN-2 in that program's alignment of C and D, and where Z is the total number of nucleotides in D. It will be appreciated that where the length of nucleic acid sequence C is not equal to the length of nucleic acid sequence D, the % nucleic acid sequence identity of C to D will not equal the % nucleic acid sequence identity of D to C. As examples of % nucleic acid sequence identity calculations, Tables 4 and 5, demonstrate how to calculate the % nucleic acid sequence identity of the nucleic acid sequence designated “Comparison DNA” to the nucleic acid sequence designated “PRO-DNA”, wherein “PRO-DNA” represents a hypothetical PRO-encoding nucleic acid sequence of interest, “Comparison DNA” represents the nucleotide sequence of a nucleic acid molecule against which the “PRO-DNA” nucleic acid molecule of interest is being compared, and “N”, “L” and “V” each represent different hypothetical nucleotides.

[0077] Unless specifically stated otherwise, all % nucleic acid sequence identity values used herein are obtained as described in the immediately preceding paragraph using the ALIGN-2 computer program. However, % nucleic acid sequence identity values may also be obtained as described below by using the WU-BLAST-2 computer program (Altschul et al., Methods in Enzymology 266:460-480 (1996)). Most of the WU-BLAST-2 search parameters are set to the default values. Those not set to default values, i.e., the adjustable parameters, are set with the following values: overlap span=1, overlap fraction=0.125, word threshold (T)=11, and scoring matrix=BLOSUM62. When WU-BLAST-2 is employed, a % nucleic acid sequence identity value is determined by dividing (a) the number of matching identical nucleotides between the nucleic acid sequence of the PRO polypeptide-encoding nucleic acid molecule of interest having a sequence derived from the native sequence PRO polypeptide-encoding nucleic acid and the comparison nucleic acid molecule of interest (i.e., the sequence against which the PRO polypeptide-encoding nucleic acid molecule of interest is being compared which may be a variant PRO polynucleotide) as determined by WU-BLAST-2 by (b) the total number of nucleotides of the PRO polypeptide-encoding nucleic acid molecule of interest. For example, in the statement “an isolated nucleic acid molecule comprising a nucleic acid sequence A which has or having at least 80% nucleic acid sequence identity to the nucleic acid sequence B”, the nucleic acid sequence A is the comparison nucleic acid molecule of interest and the nucleic acid sequence B is the nucleic acid sequence of the PRO polypeptide-encoding nucleic acid molecule of interest.

[0078] Percent nucleic acid sequence identity may also be determined using the sequence comparison program NCBI-BLAST2 (Altschul et al., Nucleic Acids Res. 25:3389-3402 (1997)). The NCBI-BLAST2 sequence comparison program may be downloaded from http://www.ncbi.nlm.nih.gov or otherwise obtained from the National Institute of Health, Bethesda, Md. NCBI-BLAST2 uses several search parameters, wherein all of those search parameters are set to default values including, for example, unmask=yes, strand=all, expected occurrences=10, minimum low complexity length=15/5, multi-pass e-value=0.01, constant for multi-pass=25, dropoff for final gapped alignment=25 and scoring matrix=BLOSUM62.

[0079] In situations where NCBI-BLAST2 is employed for sequence comparisons, the % nucleic acid sequence identity of a given nucleic acid sequence C to, with, or against a given nucleic acid sequence D (which can alternatively be phrased as a given nucleic acid sequence C that has or comprises a certain % nucleic acid sequence identity to, with, or against a given nucleic acid sequence D) is calculated as follows:
100 times the fraction W/Z
where W is the number of nucleotides scored as identical matches by the sequence alignment program NCBI-BLAST2 in that program's alignment of C and D, and where Z is the total number of nucleotides in D. It will be appreciated that where the length of nucleic acid sequence C is not equal to the length of nucleic acid sequence D, the % nucleic acid sequence identity of C to D will not equal the % nucleic acid sequence identity of D to C.

[0080] In other embodiments, PRO variant polynucleotides are nucleic acid molecules that encode an active PRO polypeptide and which are capable of hybridizing, preferably under stringent hybridization and wash conditions, to nucleotide sequences encoding a full-length PRO polypeptide as disclosed herein. PRO variant polypeptides may be those that are encoded by a PRO variant polynucleotide.

[0081] “Isolated,” when used to describe the various polypeptides disclosed herein, means polypeptide that has been identified and separated and/or recovered from a component of its natural environment Contaminant components of its natural environment are materials that would typically interfere with diagnostic or therapeutic uses for the polypeptide, and may include enzymes, hormones, and other proteinaceous or non-proteinaceous solutes. In preferred embodiments, the polypeptide will be purified (1) to a degree sufficient to obtain at least 15 residues of N-terminal or internal amino acid sequence by use of a spinning cup sequenator, or (2) to homogeneity by SDS-PAGE under non-reducing or reducing conditions using Coomassie blue or, preferably, silver stain. Isolated polypeptide includes polypeptide in situ within recombinant cells, since at least one component of the PRO polypeptide natural environment will not be present Ordinarily, however, isolated polypeptide will be prepared by at least one purification step.

[0082] An “isolated” PRO polypeptide-encoding nucleic acid or other polypeptide-encoding nucleic acid is a nucleic acid molecule that is identified and separated from at least one contaminant nucleic acid molecule with which it is ordinarily associated in the natural source of the polypeptide-encoding nucleic acid. An isolated polypeptide-encoding nucleic acid molecule is other than in the form or setting in which it is found in nature. Isolated polypeptide-encoding nucleic acid molecules therefore are distinguished from the specific polypeptide-encoding nucleic acid molecule as it exists in natural cells. However, an isolated polypeptide-encoding nucleic acid molecule includes polypeptide-encoding nucleic acid molecules contained in cells that ordinarily express the polypeptide where, for example, the nucleic acid molecule is in a chromosomal location different from that of natural cells.

[0083] The term “control sequences” refers to DNA sequences necessary for the expression of an operably linked coding sequence in a particular host organism. The control sequences that are suitable for prokaryotes, for example, include a promoter, optionally an operator sequence, and a ribosome binding site. Eukaryotic cells are known to utilize promoters, polyadenylation signals, and enhancers.

[0084] Nucleic acid is “operably linked” when it is placed into a functional relationship with another nucleic acid sequence. For example, DNA for a presequence or secretory leader is operably linked to DNA for a polypeptide if it is expressed as a preprotein that participates in the secretion of the polypeptide; a promoter or enhancer is operably linked to a coding sequence if it affects the transcription of the sequence; or a ribosome binding site is operably linked to a coding sequence if it is positioned so as to facilitate translation. Generally, “operably linked” means that the DNA sequences being linked are contiguous, and, in the case of a secretory leader, contiguous and in reading phase. However, enhancers do not have to be contiguous. Linking is accomplished by ligation at convenient restriction sites. If such sites do not exist, the synthetic oligonucleotide adaptors or linkers are used in accordance with conventional practice.

[0085] The term “antibody” is used in the broadest sense and specifically covers, for example, single anti-PRO monoclonal antibodies (including agonist, antagonist, and neutralizing antibodies), anti-PRO antibody compositions with polyepitopic specificity, single chain anti-PRO antibodies, and fragments of anti-PRO antibodies (see below). The term “monoclonal antibody” as used herein refers to an antibody obtained from a population of substantially homogeneous antibodies, i.e., the individual antibodies comprising the population are identical except for possible naturally-occurring mutations that may be present in minor amounts.

[0086] “Stringency” of hybridization reactions is readily determinable by one of ordinary skill in the art, and generally is an empirical calculation dependent upon probe length, washing temperature, and salt concentration. In general, longer probes require higher temperatures for proper annealing, while shorter probes need lower temperatures. Hybridization generally depends on the ability of denatured DNA to reanneal when complementary strands are present in an environment below their melting temperature. The higher the degree of desired homology between the probe and hybridizable sequence, the higher the relative temperature which can be used. As a result, it follows that higher relative temperatures would tend to make the reaction conditions more stringent, while lower temperatures less so. For additional details and explanation of stringency of hybridization reactions, see Ausubel et al., Current Protocols in Molecular Biology, Wiley Interscience Publishers, (1995).

[0087] “Stringent conditions” or “high stringency conditions”, as defined herein, may be identified by those that: (1) employ low ionic strength and high temperature for washing, for example 0.015 M sodium chloride/0.0015 M sodium citrate/0.1% sodium dodecyl sulfate at 50° C.; (2) employ during hybridization a denaturing agent, such as formamide, for example, 50% (v/v) formamide with 0.1% bovine serum albumin/0.1% Ficoll/0.1% polyvinylpyrrolidone/50M sodium phosphate buffer at pH 6.5 with 750 mM sodium chloride, 75 mM sodium citrate at 42° C.; or (3) employ 50% formamide, 5×SSC (0.75 M NaCl, 0.075 M sodium citrate), 50 mM sodium phosphate (pH 6.8), 0.1% sodium pyrophosphate, 5× Denhardt's solution, sonicated salmon sperm DNA (50 μg/ml), 0.1% SDS, and 10% dextran sulfate at 42° C., with washes at 42° C. in 0.2×SSC (sodium chloride/sodium citrate) and 50% formamide at 55° C., followed by a high-stringency wash consisting of 0.1×SSC containing EDTA at 55° C.

[0088] “Moderately stringent conditions” may be identified as described by Sambrook et al., Molecular Cloning: A Laboratory Manual, New York: Cold Spring Harbor Press, 1989, and include the use of washing solution and hybridization conditions (e.g., temperature, ionic strength and % SDS) less stringent that those described above. An example of moderately stringent conditions is overnight incubation at 37° C. in a solution comprising: 20% formamide, 5×SSC (150 mM NaCl, 15 mM trisodium citrate), 50 mM sodium phosphate (pH 7.6), 5× Denhardt's solution, 10% dextran sulfate, and 20 mg/ml denatured sheared salmon sperm DNA, followed by washing the filters in 1×SSC at about 37-50° C. The skilled artisan will recognize how to adjust the temperature, ionic strength, etc. as necessary to accommodate factors such as probe length and the like.

[0089] The term “epitope tagged” when used herein refers to a chimeric polypeptide comprising a PRO polypeptide fused to a “tag polypeptide”. The tag polypeptide has enough residues to provide an epitope against which an antibody can be made, yet is short enough such that it does not interfere with activity of the polypeptide to which it is fused. The tag polypeptide preferably also is fairly unique so that the antibody does not substantially cross-react with other epitopes. Suitable tag polypeptides generally have at least six amino acid residues and usually between about 8 and 50 amino acid residues (preferably, between about 10 and 20 amino acid residues).

[0090] As used herein, the term “immunoadhesin” designates antibody-like molecules which combine the binding specificity of a heterologous protein (an “adhesin”) with the effector functions of immunoglobulin constant domains. Structurally, the immunoadhesins comprise a fusion of an amino acid sequence with the desired binding specificity which is other than the antigen recognition and binding site of an antibody (i.e., is “heterologous”), and an immunoglobulin constant domain sequence. The adhesin part of an immunoadhesin molecule typically is a contiguous amino acid sequence comprising at least the binding site of a receptor or a ligand. The immunoglobulin constant domain sequence in the immunoadhesin may be obtained from any immunoglobulin, such as IgG-1, IgG-2, IgG-3, or IgG-4 subtypes, IgA (including IgA-1 and IgA-2), IgE, IgD or IgM.

[0091] “Active” or “activity” for the purposes herein refers to form(s) of a PRO polypeptide which retain a biological and/or an immunological activity of native or naturally-occurring PRO, wherein “biological” activity refers to a biological function (either inhibitory or stimulatory) caused by a native or naturally-occurring PRO other than the ability to induce the production of an antibody against an antigenic epitope possessed by a native or naturally-occurring PRO and an “immunological” activity refers to the ability to induce the production of an antibody against an antigenic epitope possessed by a native or naturally-occurring PRO.

[0092] The term “antagonist” is used in the broadest sense, and includes any molecule that partially or fully blocks, inhibits, or neutralizes a biological activity of a native PRO polypeptide disclosed herein. In a similar manner, the term “agonist” is used in the broadest sense and includes any molecule that mimics a biological activity of a native PRO polypeptide disclosed herein. Suitable agonist or antagonist molecules specifically include agonist or antagonist antibodies or antibody fragments, fragments or amino acid sequence variants of native PRO polypeptides, peptides, antisense oligonucleotides, small organic molecules, etc. Methods for identifying agonists or antagonists of a PRO polypeptide may comprise contacting a PRO polypeptide with a candidate agonist or antagonist molecule and measuring a detectable change in one or more biological activities normally associated with the PRO polypeptide.

[0093] “Treatment” refers to both therapeutic treatment and prophylactic or preventative measures, wherein the object is to prevent or slow down (lessen) the targeted pathologic condition or disorder. Those in need of treatment include those already with the disorder as well as those prone to have the disorder or those in whom the disorder is to be prevented.

[0094] “Chronic” administration refers to administration of the agent(s) in a continuous mode as opposed to an acute mode, so as to maintain the initial therapeutic effect (activity) for an extended period of time. “Intermittent” administration is treatment that is not consecutively done without interruption, but rather is cyclic in nature.

[0095] “Mammal” for purposes of treatment refers to any animal classified as a mammal, including humans, domestic and farm animals, and zoo, sports, or pet animals, such as dogs, cats, cattle, horses, sheep, pigs, goats, rabbits, etc. Preferably, the mammal is human.

[0096] Administration “in combination with” one or more further therapeutic agents includes simultaneous (concurrent) and consecutive administration in any order.

[0097] “Carriers” as used herein include pharmaceutically acceptable carriers, excipients, or stabilizers which are nontoxic to the cell or mammal being exposed thereto at the dosages and concentrations employed. Often the physiologically acceptable carrier is an aqueous pH buffered solution. Examples of physiologically acceptable carriers include buffers such as phosphate, citrate, and other organic acids; antioxidants including ascorbic acid; low molecular weight (less than about 10 residues) polypeptide; proteins, such as serum albumin, gelatin, or immunoglobulins; hydrophilic polymers such as polyvinylpyrrolidone; amino acids such as glycine, glutamine, asparagine, arginine or lysine; monosaccharides, disaccharides, and other carbohydrates including glucose, mannose, or dextrins; chelating agents such as EDTA; sugar alcohols such as mannitol or sorbitol; salt-forming counterions such as sodium; and/or nonionic surfactants such as TWEEN™, polyethylene glycol (PEG), and PLURONICS™.

[0098] “Antibody fragments” comprise a portion of an intact antibody, preferably the antigen binding or variable region of the intact antibody. Examples of antibody fragments include Fab, Fab′, F(ab′)₂, and Fv fragments; diabodies; linear antibodies (Zapata et al., Protein Eng. 8(10): 1057-1062 [1995]); single-chain antibody molecules; and multispecific antibodies formed from antibody fragments.

[0099] Papain digestion of antibodies produces two identical antigen-binding fragments, called “Fab” fragments, each with a single antigen-binding site, and a residual “Fc” fragment, a designation reflecting the ability to crystallize readily. Pepsin treatment yields an F(ab′)₂ fragment that has two antigen-combining sites and is still capable of cross-linking antigen.

[0100] “Fv” is the minimum antibody fragment which contains a complete antigen-recognition and binding site. This region consists of a dimer of one heavy- and one light-chain variable domain in tight, non-covalent association. It is in this configuration that the three CDRs of each variable domain interact to define an antigen-binding site on the surface of the V_{H}-V_{L} dimer. Collectively, the six CDRs confer antigen-binding specificity to the antibody. However, even a single variable domain (or half of an Fv comprising only three CDRs specific for an antigen) has the ability to recognize and bind antigen, although at a lower affinity than the entire binding site.

[0101] The Fab fragment also contains the constant domain of the light chain and the first constant domain (CH1) of the heavy chain. Fab fragments differ from Fab′ fragments by the addition of a few residues at the carboxy terminus of the heavy chain CH1 domain including one or more cysteines from the antibody hinge region. Fab′-SH is the designation herein for Fab′ in which the cysteine residue(s) of the constant domains bear a free thiol group. F(ab′)₂ antibody fragments originally were produced as pairs of Fab′ fragments which have hinge cysteines between them. Other chemical couplings of antibody fragments are also known.

[0102] The “light chains” of antibodies (immunoglobulins) from any vertebrate species can be assigned to one of two clearly distinct types, called kappa and lambda, based on the amino acid sequences of their constant domains.

[0103] Depending on the amino acid sequence of the constant domain of their heavy chains, immunoglobulins can be assigned to different classes. There are five major classes of immunoglobulins: IgA, IgD, IgE, IgG, and IgM, and several of these may be further divided into subclasses (isotypes), e.g., IgG1, IgG2, IgG3, IgG4, IgA, and IgA2.

[0104] “Single-chain Fv” or “sFv” antibody fragments comprise the V_{H} and V_{L} domains of antibody, wherein these domains are present in a single polypeptide chain. Preferably, the Fv polypeptide further comprises a polypeptide linker between the V_{H} and V_{L} domains which enables the sFv to form the desired structure for antigen binding. For a review of sFv, see Pluckthun in The Pharmacology of Monoclonal Antibodies, vol. 113, Rosenburg and Moore eds., Springer-Verlag, New York, pp. 269-315 (1994).

[0105] The term “diabodies” refers to small antibody fragments with two antigen-binding sites, which fragments comprise a heavy-chain variable domain (V_{H}) connected to a light-chain variable domain (V_{L}) in the same polypeptide chain (V_{H}-V_{L}). By using a linker that is too short to allow pairing between the two domains on the same chain, the domains are forced to pair with the complementary domains of another chain and create two antigen-binding sites. Diabodies are described more fully in, for example, EP 404,097; WO 93/11161; and Hollinger et al., Proc. Natl. Acad. Sci. USA, 90:6444-6448 (1993).

[0106] An “isolated” antibody is one which has been identified and separated and/or recovered from a component of its natural environment Contaminant components of its natural environment are materials which would interfere with diagnostic or therapeutic uses for the antibody, and may include enzymes, hormones, and other proteinaceous or nonproteinaceous solutes. In preferred embodiments, the antibody will be purified (1) to greater than 95% by weight of antibody as determined by the Lowry method, and most preferably more than 99% by weight, (2) to a degree sufficient to obtain at least 15 residues of N-terminal or internal amino acid sequence by use of a spinning cup sequenator, or (3) to homogeneity by SDS-PAGE under reducing or nonreducing conditions using Coomassie blue or, preferably, silver stain. Isolated antibody includes the antibody in situ within recombinant cells since at least one component of the antibody's natural environment will not be present. Ordinarily, however, isolated antibody will be prepared by at least one purification step.

[0107] An antibody that “specifically binds to” or is “specific for” a particular polypeptide or an epitope on a particular polypeptide is one that binds to that particular polypeptide or epitope on a particular polypeptide without substantially binding to any other polypeptide or polypeptide epitope.

[0108] The word “label” when used herein refers to a detectable compound or composition which is conjugated directly or indirectly to the antibody so as to generate a “labeled” antibody. The label may be detectable by itself (e.g. radioisotope labels or fluorescent labels) or, in the case of an enzymatic label, may catalyze chemical alteration of a substrate compound or composition which is detectable.

[0109] By “solid phase” is meant a non-aqueous matrix to which the antibody of the present invention can adhere. Examples of solid phases encompassed herein include those formed partially or entirely of glass (e.g., controlled pore glass), polysaccharides (e.g., agarose), polyacrylamides, polystyrene, polyvinyl alcohol and silicones. In certain embodiments, depending on the context, the solid phase can comprise the well of an assay plate; in others it is a purification column (e.g., an affinity chromatography column). This term also includes a discontinuous solid phase of discrete particles, such as those described in U.S. Pat. No. 4,275,149.

[0110] A “liposome” is a small vesicle composed of various types of lipids, phospholipids and/or surfactant which is useful for delivery of a drug (such as a PRO polypeptide or antibody thereto) to a mammal. The components of the liposome are commonly arranged in a bilayer formation, similar to the lipid arrangement of biological membranes.

[0111] A “small molecule” is defined herein to have a molecular weight below about 500 Daltons.

[0112] The term “immune related disease” means a disease in which a component of the immune system of a mammal causes, mediates or otherwise contributes to a morbidity in the mammal. Also included are diseases in which stimulation or intervention of the immune response has an ameliorative effect on progression of the disease. Included within this term are immune-mediated inflammatory diseases, non-immune-mediated inflammatory diseases, infectious diseases, immunodeficiency diseases, neoplasia, etc.

[0113] The term “T cell mediated disease” means a disease in which T cells directly or indirectly mediate or otherwise contribute to a morbidity in a mammal. The T cell mediated disease may be associated with cell mediated effects, lymphokine mediated effects, etc., and even effects associated with B cells if the B cells are stimulated, for example, by the lymphokines secreted by T cells.

[0114] Examples of immune-related and inflammatory diseases, some of which are immune or T cell mediated, which can be treated according to the invention include systemic lupus erythematosis, rheumatoid arthritis, juvenile chronic arthritis, spondyloarthropathies, systemic sclerosis (scleroderma), idiopathic inflammatory myopathies (dermatomyositis, polymyositis), Sjögren's syndrome, systemic vasculitis, sarcoidosis, autoimmune hemolytic anemia (immune pancytopenia, paroxysmal nocturnal hemoglobinuria), autoimmune thrombocytopenia (idiopathic thrombocytopenic purpura, immune-mediated thrombocytopenia), thyroiditis (Grave's disease, Hashimoto's thyroiditis, juvenile lymphocytic thyroiditis, atrophic thyroiditis), diabetes mellitus, immune-mediated renal disease (glomerulonephritis, tubulointerstitial nephritis), demyelinating diseases of the central and peripheral nervous systems such as multiple sclerosis, idiopathic demyelinating polyneuropathy or Guillain-Barré syndrome, and chronic inflammatory demyelinating polyneuropathy, hepatobiliary diseases such as infectious hepatitis (hepatitis A, B, C, D, E and other non-hepatotropic viruses), autoimmune chronic active hepatitis, primary biliary cirrhosis, granulomatous hepatitis, and sclerosing cholangitis, inflammatory bowel disease (ulcerative colitis: Crohn's disease), gluten-sensitive enteropathy, and Whipple's disease, autoimmune or immune-mediated skin diseases including bullous skin diseases, erythema multiforme and contact dermatitis, psoriasis, allergic diseases such as asthma, allergic rhinitis, atopic dermatitis, food hypersensitivity and urticaria, immunologic diseases of the lung such as eosinophilic pneumonias, idiopathic pulmonary fibrosis and hypersensitivity pneumonitis, transplantation associated diseases including graft rejection and graft-versus-host-disease. Infectious diseases including viral diseases such as AIDS (HIV infection), hepatitis A, B, C, D, and B, herpes, etc., bacterial infections, fungal infections, protozoal infections and parasitic infections.

[0115] The term “effective amount” is a concentration or amount of a PRO polypeptide and/or agonist/antagonist which results in achieving a particular stated purpose. An “effective amount” of a PRO polypeptide or agonist or antagonist thereof may be determined empirically. Furthermore, a “therapeutically effective amount” is a concentration or amount of a PRO polypeptide and/or agonist/antagonist which is effective for achieving a stated therapeutic effect. This amount may also be determined empirically.

[0116] The term “cytotoxic agent” as used herein refers to a substance that inhibits or prevents the function of cells and/or causes destruction of cells. The term is intended to include radioactive isotopes (e.g., I¹³¹, I¹²⁵, Y⁹⁰ and Re¹⁸⁶), chemotherapeutic agents, and toxins such as enzymatically active toxins of bacterial, fungal, plant or animal origin, or fragments thereof.

[0117] A “chemotherapeutic agent” is a chemical compound useful in the treatment of cancer. Examples of chemotherapeutic agents include adriamycin, doxorubicin, epirubicin, 5-fluorouracil, cytosine arabinoside (“Ara-C”), cyclophosphamide, thiotepa, busulfan, cytoxin, taxoids, e.g., paclitaxel (Taxol, Bristol-Myers Squibb Oncology, Princeton, N.J.), and doxetaxel (Taxotere, Rhône-Poulenc Rorer, Antony, France), toxotere, methotrexate, cisplatin, melphalan, vinblastine, bleomycin, etoposide, ifosfamide, mitomycin C, mitoxantrone, vincristine, vinorelbine, carboplatin, teniposide, daunomycin, carminomycin, aminopterin, dactinomycin, mitomycins, esperamicins (see U.S. Pat. No. 4,675,187), melphalan and other related nitrogen mustards. Also included in this definition are hormonal agents that act to regulate or inhibit hormone action on tumors such as tamoxifen and onapristone.

[0118] A “growth inhibitory agent” when used herein refers to a compound or composition which inhibits growth of a cell, especially cancer cell overexpressing any of the genes identified herein, either in vitro or in vivo. Thus, the growth inhibitory agent is one which significantly reduces the percentage of cells overexpressing such genes in S phase. Examples of growth inhibitory agents include agents that block cell cycle progression (at a place other than S phase), such as agents that induce G1 arrest and M-phase arrest. Classical M-phase blockers include the vincas (vincristine and vinblastine), taxol, and topo II inhibitors such as doxorubicin, epirubicin, daunorubicin, etoposide, and bleomycin. Those agents that arrest G1 also spill over into S-phase arrest, for example, DNA alkylating agents such as tamoxifen, prednisone, dacarbazine, mechlorethamine, cisplatin, methotrexate, 5-fluorouracil, and ara-C. Further information can be found in The Molecular Basis of Cancer, Mendelsohn and Israel, eds., Chapter 1, entitled “Cell cycle regulation, oncogens, and antineoplastic drugs” by Murakami et al. (WB Saunders: Philadelphia, 1995), especially p. 13.

[0119] The term “cytokine” is a generic term for proteins released by one cell population which act on another cell as intercellular mediators. Examples of such cytokines are lymphokines, monokines, and traditional polypeptide hormones. Included among the cytokines are growth hormone such as human growth hormone, N-methionyl human growth hormone, and bovine growth hormone; parathyroid hormone; thyroxine; insulin; proinsulin; relaxin; prorelaxin; glycoprotein hormones such as follicle stimulating hormone (FSH), thyroid stimulating hormone (TSH), and luteinizing hormone (LH); hepatic growth factor; fibroblast growth factor; prolactin; placental lactogen; tumor necrosis factor-α and -β; mullerian-inhibiting substance; mouse gonadotropin-associated peptide; inhibin; activin; vascular endothelial growth factor; integrin; thrombopoietin (TPO); nerve growth factors such as NGF-β; platelet-growth factor; transforming growth factors (TGFs) such as TGF-α and TGF-β; insulin-like growth factor-I and -II; erythropoietin (EPO); osteoinductive factors; interferons such as interferon-α, -β, and -γ, colony stimulating factors (CSFs) such as macrophage-CSF (M-CSF); granulocyte-macrophage-CSF (GM-CSF); and granulocyte-CSF (G-CSF); interleukins (ILs) such as IL-1, IL-1α, IL-2, IL-3, IL-4, IL-5, IL-6, IL-7, IL-8, IL-9, IL-11, IL-12; a tumor necrosis factor such as TNF-α or TNF-β; and other polypeptide factors including LIP and kit ligand (KL). As used herein, the term cytokine includes proteins from natural sources or from recombinant cell culture and biologically active equivalents of the native sequence cytokines.

[0120] As used herein, the term “immunoadhesin” designates antibody-like molecules which combine the binding specificity of a heterologous protein (an “adhesin”) with the effector functions of immunoglobulin constant domains. Structurally, the immunoadhesins comprise a fusion of an amino acid sequence with the desired binding specificity which is other than the antigen recognition and binding site of an antibody (i.e., is “heterologous”), and an immunoglobulin constant domain sequence. The adhesin part of an immunoadhesin molecule typically is a contiguous amino acid sequence comprising at least the binding site of a receptor or a ligand. The immunoglobulin constant domain sequence in the immunoadhesin may be obtained from any immunoglobulin, such as IgG-1, IgG-2, IgG-3, or IgG-4 subtypes, IgA (including IgA-1 and IgA-2), IgE, IgD or IgM.

[0121] As used herein, the term “inflammatory cells” designates cells that enhance the inflammatory response such as mononuclear cells, eosinophils, macrophages, and polymorphonuclear neutrophils (PMN).

[symbol]

TABLE 2

| | | |
|---|---|---|
| PRO | XXXXXXXXXXXXXXX | (Length = 15 amino acids) |
| Comparison | XXXXXYYYYYYY | (Length = 12 amino acids) |
| Protein | | |

% amino acid sequence identity = (the number of identically matching amino acid residues between the two polypeptide sequences as determined by ALIGN-2) divided by (the total number of amino acid residues of the PRO polypeptide) = 5 divided by 15 = 33.3%

[0122] TABLE 3

| | | |
|---|---|---|
| PRO | XXXXXXXXXX | (Length = 10 amino acids) |
| Comparison | XXXXXYYYYYYZZYZ | (Length = 15 amino acids) |
| Protein | | |

% amino acid sequence identity = (the number of identically matching amino acid residues between the two polypeptide sequences as determined by ALIGN-2) divided by (the total number of amino acid residues of the PRO polypeptide) = 5 divided by 10 = 50%

[0123] TABLE 4

| | | |
|---|---|---|
| PRO-DNA | NNNNNNNNNNNNNN | (Length = 14 nucleotides) |
| Comparison | NNNNNNLLLLLLLLLL | (Length = 16 nucleotides) |
| DNA | | |

% nucleic acid sequence identity = (the number of identically matching nucleotides between the two nucleic acid sequences as determined by ALIGN-2) divided by (the total number of nucleatides of the PRO-DNA nucleic acid sequence) = 6 divided by 14 = 42.9%

[0124] TABLE 5

| | | |
|---|---|---|
| PRO-DNA | NNNNNNNNNNNN | (Length = 12 nucleotides) |
| Comparison DNA | NNNNLLLVV | (Length = 9 nucleotides) |

% nucleic acid sequence identity = (the number of identically matching nucleotides between the two nucleic acid sequences as determined by ALIGN-2) divided by (the total number of nucleotides of the PRO-DNA nucleic acid sequence) = 4 divided by 12 = 33.3%

II. Compositions and Methods of the Invention

[0125] A. Full-Length PRO Polypeptides

[0126] The present invention provides newly identified and isolated nucleotide sequences encoding polypeptides referred to in the present application as PRO polypeptides. In particular, cDNAs encoding various PRO polypeptides have been identified and isolated, as disclosed in further detail in the Examples below. However, for sake of simplicity, in the present specification the protein encoded by the full length native nucleic acid molecules disclosed herein as well as all further native homologues and variants included in the foregoing definition of PRO, will be referred to as “PRO/number”, regardless of their origin or mode of preparation.

[0127] As disclosed in the Examples below, various cDNA clones have been disclosed. The predicted amino acid sequence can be determined from the nucleotide sequence using routine skill. For the PRO polypeptides and encoding nucleic acids described herein, Applicants have identified what is believed to be the reading frame best identifiable with the sequence information available at the time.

[0128] B. PRO Polypeptide Variants

[0129] In addition to the full-length native sequence PRO polypeptides described herein, it is contemplated that PRO variants can be prepared. PRO variants can be prepared by introducing appropriate nucleotide changes into the PRO DNA, and/or by synthesis of the desired PRO polypeptide. Those skilled in the art will appreciate that amino acid changes may alter post-translational processes of the PRO, such as changing the number or position of glycosylation sites or altering the membrane anchoring characteristics.

[0130] Variations in the native full-length sequence PRO or in various domains of the PRO described herein, can be made, for example, using any of the techniques and guidelines for conservative and non-conservative mutations set forth, for instance, in U.S. Pat. No. 5,364,934. Variations may be a substitution, deletion or insertion of one or more codons encoding the PRO that results in a change in the amino acid sequence of the PRO as compared with the native sequence PRO. Optionally, the variation is by substitution of at least one amino acid with any other amino acid in one or more of the domains of the PRO. Guidance in determining which amino acid residue may be inserted, substituted or deleted without adversely affecting the desired activity may be found by comparing the sequence of the PRO with that of homologous known protein molecules and minimizing the number of amino acid sequence changes made in regions of high homology. Amino acid substitutions can be the result of replacing one amino acid with another amino acid having similar structural and/or chemical properties, such as the replacement of a leucine with a serine, i.e., conservative amino acid replacements. Insertions or deletions may optionally be in the range of about 1 to 5 amino acids. The variation allowed may be determined by systematically making insertions, deletions or substitutions of amino acids in the sequence and testing the resulting variants for activity exhibited by the full-length or mature native sequence.

[0131] PRO polypeptide fragments are provided herein. Such fragments may be truncated at the N-terminus or C-terminus, or may lack internal residues, for example, when compared with a full length native protein. Certain fragments lack amino acid residues that are not essential for a desired biological activity of the PRO polypeptide.

[0132] PRO fragments may be prepared by any of a number of conventional techniques. Desired peptide fragments may be chemically synthesized. An alternative approach involves generating PRO fragments by enzymatic digestion, e.g., by treating the protein with an enzyme known to cleave proteins at sites defined by particular amino acid residues, or by digesting the DNA with suitable restriction enzymes and isolating the desired fragment. Yet another suitable technique involves isolating and amplifying a DNA fragment encoding a desired polypeptide fragment, by polymerase chain reaction (PCR). Oligonucleotides that define the desired termini of the DNA fragment are employed at the 5′ and 3′ primers in the PCR. Preferably, PRO polypeptide fragments share at least one biological and/or immunological activity with the native PRO polypeptide disclosed herein.

[0133] In particular embodiments, conservative substitutions of interest are shown in Table 6 under the heading of preferred substitutions. If such substitutions result in a change in biological activity, then more substantial changes, denominated exemplary substitutions in Table 6, or as further described below in reference to amino acid classes, are introduced and the products screened.

TABLE 6

| Original | Exemplary | Preferred |
|---|---|---|
| Residue | Substitutions | Substitutions |
| Ala (A) | val; leu; ile | val |
| Arg (R) | lys; gln; asn | lys |
| Asn (N) | gln; his; lys; arg | gln |
| Asp (D) | glu | glu |
| Cys (C) | ser | ser |
| Gln (Q) | asn | asn |
| Glu (E) | asp | asp |
| Gly (G) | pro; ala | ala |
| His (H) | asn; gln; lys; arg | arg |
| Ile (I) | leu; val; met; ala; phe; | |
| | norleucine | leu |
| Leu (L) | norleucine; ile; val; | |
| | met; ala; phe | ile |
| Lys (K) | arg; gln; asn | arg |
| Met (M) | leu; phe; ile | leu |
| Phe (F) | leu; val; ile; ala; tyr | leu |
| Pro (P) | ala | ala |
| Ser (S) | thr | thr |
| Thr (T) | ser | ser |
| Trp (W) | tyr; phe | tyr |
| Tyr (Y) | trp; phe; thr; ser | phe |
| Val (V) | ile; leu; met; phe; | |
| | ala; norleucine | leu |

[0134] Substantial modifications in function or immunological identity of the PRO polypeptide are accomplished by selecting substitutions that differ significantly in their effect on maintaining (a) the structure of the polypeptide backbone in the area of the substitution, for example, as a sheet or helical conformation, (b) the charge or hydrophobicity of the molecule at the target site, or (c) the bulk of the side chain. Naturally occurring residues are divided into groups based on common side-chain properties:

(1) hydrophobic: norleucine, met, ala, val, leu, ile;

(2) neutral hydrophilic: cys, ser, thr;

(3) acidic: asp, glu;

(4) basic: asn, gln, his, lys, arg;

(5) residues that influence chain orientation: gly, pro; and

(6) aromatic: trp, tyr, phe.

[0135] Non-conservative substitutions will entail exchanging a member of one of these classes for another class. Such substituted residues also may be introduced into the conservative substitution sites or, more preferably, into the remaining (non-conserved) sites.

[0136] The variations can be made using methods known in the art such as oligonucleotide-mediated (site-directed) mutagenesis, alanine scanning, and PCR mutagenesis. Site-directed mutagenesis [Carter et al., Nucl. Acids Res. 13:4331 (1986); Zoller et al., Nucl. Acids Res., 10:6487 (1987)], cassette mutagenesis [Wells et al., Gene. 34:315 (1985)], restriction selection mutagenesis [Wells et al., Philos. Trans. R. Soc. London SerA, 317:415 (1986)] or other known techniques can be performed on the cloned DNA to produce the PRO variant DNA.

[0137] Scanning amino acid analysis can also be employed to identify one or more amino acids along a contiguous sequence. Among the preferred scanning amino acids are relatively small, neutral amino acids. Such amino acids include alanine, glycine, serine, and cysteine. Alanine is typically a preferred scanning amino acid among this group because it eliminates the side-chain beyond the beta-carbon and is less likely to alter the main-chain conformation of the variant [Cunningham and Wells, Science, 244: 1081-1085 (1989)]. Alanine is also typically preferred because it is the most common amino acid. Further, it is frequently found in both buried and exposed positions [Creighton, The Proteins, (W.H. Freeman & Co., N.Y.); Chothia, J. Mol. Biol. 150:1 (1976)]. If alanine substitution does not yield adequate amounts of variant, an isoteric amino acid can be used.

[0138] C. Modifications of PRO

[0139] Covalent modifications of PRO are included within the scope of this invention. One type of covalent modification includes reacting targeted amino acid residues of a PRO polypeptide with an organic derivatizing agent that is capable of reacting with selected side chains or the N- or C-terminal residues of the PRO. Derivatization with bifunctional agents is useful, for instance, for crosslinking PRO to a water-insoluble support matrix or surface for use in the method for purifying anti-PRO antibodies, and vice-versa Commonly used crosslinking agents include, e.g., 1,1-bis(diazoacetyl)-2-phenylethane, glutaraldehyde, N-hydroxysuccinimide esters, for example, esters with 4-azidosalicylic acid, homobifunctional imidoesters, including disuccinimidyl esters such as 3,3′-dithiobis(succinimidylpropionate), bifunctional maleimides such as bis-N-maleimido-1,8-octane and agents such as methyl-3-[(p-azidophenyl)dithio]propioimidate.

[0140] Other modifications include deamidation of glutaminyl and asparaginyl residues to the corresponding glutamyl and aspartyl residues, respectively, hydroxylation of proline and lysine, phosphorylation of hydroxyl groups of seryl or threonyl residues, methylation of the α-amino groups of lysine, arginine, and histidine side chains [T. E. Creighton, Proteins: Structure and Molecular Properties, W.H. Freeman & Co., San Francisco, pp. 79-86 (1983)], acetylation of the N-terminal amine, and amidation of any C-terminal carboxyl group.

[0141] Another type of covalent modification of the PRO polypeptide included within the scope of this invention comprises altering the native glycosylation pattern of the polypeptide. “Altering the native glycosylation pattern” is intended for purposes herein to mean deleting one or more carbohydrate moieties found in native sequence PRO (either by removing the underlying glycosylation site or by deleting the glycosylation by chemical and/or enzymatic means), and/or adding one or more glycosylation sites that are not present in the native sequence PRO. In addition, the phrase includes qualitative changes in the glycosylation of the native proteins, involving a change in the nature and proportions of the various carbohydrate moieties present.

[0142] Addition of glycosylation sites to the PRO polypeptide may be accomplished by altering the amino acid sequence. The alteration may be made, for example, by the addition of, or substitution by, one or more serine or threonine residues to the native sequence PRO (for O-linked glycosylation sites). The PRO amino acid sequence may optionally be altered through changes at the DNA level, particularly by mutating the DNA encoding the PRO polypeptide at preselected bases such that codons are generated that will translate into the desired amino acids.

[0143] Another means of increasing the number of carbohydrate moieties on the PRO polypeptide is by chemical or enzymatic coupling of glycosides to the polypeptide. Such methods are described in the art, e.g., in WO 87/05330 published 11 Sep. 1987, and in Aplin and Wriston, CRC Crit. Rev. Biochem., pp. 259-306 (1981).

[0144] Removal of carbohydrate moieties present on the PRO polypeptide may be accomplished chemically or enzymatically or by mutational substitution of codons encoding for amino acid residues that serve as targets for glycosylation. Chemical deglycosylation techniques are known in the art and described, for instance, by Hakimuddin, et al., Arch. Biochem. Biophys., 259:52 (1987) and by Edge et al., Anal. Biochem., 118:131 (1981). Enzymatic cleavage of carbohydrate moieties on polypeptides can be achieved by the use of a variety of endo- and exo-glycosidases as described by Thotakura et al., Meth. Enzymol., 138:350 (1987).

[0145] Another type of covalent modification of PRO comprises linking the PRO polypeptide to one of a variety of nonproteinaceous polymers, e.g., polyethylene glycol (PEG), polypropylene glycol, or polyoxyalkylenes, in the manner set forth in U.S. Pat. No. 4,640,835; 4,496,689; 4,301,144; 4,670,417; 4,791,192 or 4,179,337.

[0146] The PRO of the present invention may also be modified in a way to form a chimeric molecule comprising PRO fused to another, heterologous polypeptide or amino acid sequence.

[0147] In one embodiment, such a chimeric molecule comprises a fusion of the PRO with a tag polypeptide which provides an epitope to which an anti-tag antibody can selectively bind. The epitope tag is generally placed at the amino- or carboxyl-terminus of the PRO. The presence of such epitope-tagged forms of the PRO can be detected using an antibody against the tag polypeptide. Also, provision of the epitope tag enables the PRO to be readily purified by affinity purification using an anti-tag antibody or another type of affinity matrix that binds to the epitope tag. Various tag polypeptides and their respective antibodies are well known in the art Examples include poly-histidine (poly-his) or poly-histidine-glycine (poly-his-gly) tags; the flu HA tag polypeptide and its antibody 12CA5 [Field et al., Mol. Cell. Biol. 8:2159-2165 (1988)]; the c-myc tag and the 8F9, 3C7, 6E10, G4, B7 and 9E10 antibodies thereto (Evan et al., Molecular and Cellular Biology, 5:3610-3616 (1985)]; and the Herpes Simplex virus glycoprotein D (gD) tag and its antibody [Paborsky et al., Protein Engineering, 3(6):547-553 (1990)]. Other tag polypeptides include the Flag-peptide [Hopp et al., BioTechnology, 6:1204-1210 (1988)]; the KT3 epitope peptide [Martin et al., Science, 255:192-194 (1992)]; an alpha-tubulin epitope peptide [Skinner et al., J. Biol. Chem. 266:15163-15166 (1991)]; and the T7 gene 10 protein peptide tag [Lutz-Freyermuth et al., Proc. Natl. Acad. Sci. USA, 87:6393-6397 (1990)].

[0148] In an alternative embodiment, the chimeric molecule may comprise a fusion of the PRO with an immunoglobulin or a particular region of an immunoglobulin. For a bivalent form of the chimeric molecule (also referred to as an “immunoadhesin”), such a fusion could be to the Fc region of an IgG molecule. The Ig fusions preferably include the substitution of a soluble (transmembrane domain deleted or inactivated) form of a PRO polypeptide in place of at least one variable region within an Ig molecule. In a particularly preferred embodiment, the immunoglobulin fusion includes the hinge, CH2 and CH3, or the hinge, CH1, CH2 and CH3 regions of an IgG1 molecule. For the production of immunoglobulin fusions see also U.S. Pat. No. 5,428,130 issued Jun. 27, 1995.

[0149] D. Preparation of PRO

[0150] The description below relates primarily to production of PRO by culturing cells transformed or transfected with a vector containing PRO nucleic acid. It is, of course, contemplated that alternative methods, which are well known in the art, may be employed to prepare PRO. For instance, the PRO sequence, or portions thereof, may be produced by direct peptide synthesis using solid-phase techniques [see, e.g., Stewart et al., Solid-Phase Peptide Synthesis, W.H. Freeman Co., San Francisco, Calif. (1969); Merrifield, J. Am. Chem. Soc., 85:2149-2154 (1963)]. In vitro protein synthesis may be performed using manual techniques or by automation. Automated synthesis may be accomplished, for instance, using an Applied Biosystems Peptide Synthesizer (Foster City, Calif.) using manufacturer's instructions. Various portions of the PRO may be chemically synthesized separately and combined using chemical or enzymatic methods to produce the full-length PRO.

[0151] 1. Isolation of DNA Encoding PRO

[0152] DNA encoding PRO may be obtained from a cDNA library prepared from tissue believed to possess the PRO mRNA and to express it at a detectable level. Accordingly, human PRO DNA can be conveniently obtained from a cDNA library prepared from human tissue, such as described in the Examples. The PRO-encoding gene may also be obtained from a genomic library or by known synthetic procedures (e.g., automated nucleic acid synthesis).

[0153] Libraries can be screened with probes (such as antibodies to the PRO or oligonucleotides of at least about 20-80 bases) designed to identify the gene of interest or the protein encoded by it. Screening the cDNA or genomic library with the selected probe may be conducted using standard procedures, such as described in Sambrook et al., Molecular Cloning: A Laboratory Manual (New York: Cold Spring Harbor Laboratory Press, 1989). An alternative means to isolate the gene encoding PRO is to use PCR methodology [Sambrook et al., supra; Dieffenbach et al., PCR Primer: A Laboratory Manual (Cold Spring Harbor Laboratory Press, 1995)].

[0154] The Examples below describe techniques for screening a cDNA library. The oligonucleotide sequences selected as probes should be of sufficient length and sufficiently unambiguous that false positives are minimized. The oligonucleotide is preferably labeled such that it can be detected upon hybridization to DNA in the library being screened. Methods of labeling are well known in the art, and include the use of radiolabels like ³²P-labeled ATP, biotinylation or enzyme labeling. Hybridization conditions, including moderate stringency and high stringency, are provided in Sambrook et al., supra.

[0155] Sequences identified in such library screening methods can be compared and aligned to other known sequences deposited and available in public databases such as GenBank or other private sequence databases. Sequence identity (at either the amino acid or nucleotide level) within defined regions of the molecule or across the full-length sequence can be determined using methods known in the art and as described herein.

[0156] Nucleic acid having protein coding sequence may be obtained by screening selected cDNA or genomic libraries using the deduced amino acid sequence disclosed herein for the first time, and, if necessary, using conventional primer extension procedures as described in Sambrook et al., supra, to detect precursors and processing intermediates of mRNA that may not have been reverse-transcribed into cDNA.

[0157] 2. Selection and Transformation of Host Cells

[0158] Host cells are transfected or transformed with expression or cloning vectors described herein for PRO production and cultured in conventional nutrient media modified as appropriate for inducing promoters, selecting transformants, or amplifying the genes encoding the desired sequences. The culture conditions, such as media, temperature, pH and the like, can be selected by the skilled artisan without undue experimentation. In general, principles, protocols, and practical techniques for maximizing the productivity of cell cultures can be found in Mammalian Cell Biotechnology: a Practical Approach, M. Butler, ed. (IRL Press, 1991) and Sambrook et al., supra.

[0159] Methods of eukaryotic cell transfection and prokaryotic cell transformation are known to the ordinarily skilled artisan, for example, CaCl₂, CaPO₄, liposome-mediated and electroporation. Depending on the host cell used, transformation is performed using standard techniques appropriate to such cells. The calcium treatment employing calcium chloride, as described in Sambrook et al., supra, or electroporation is generally used for prokaryotes. Infection with Agrobacterium tumefaciens is used for transformation of certain plant cells, as described by Shaw et al., Gene, 23:315 (1983) and WO 89/05859 published 29 Jun. 1989. For mammalian cells without such cell walls, the calcium phosphate precipitation method of Graham and van der Eb, Virology, 52:456-457 (1978) can be employed. General aspects of mammalian cell host system transfections have been described in U.S. Pat. No. 4,399,216. Transformations into yeast are typically carried out according to the method of Van Solingen et al., J. Bact., 130:946 (1977) and Hsiao et al., Proc. Natl. Acad. Sci. (USA), 76:3829 (1979). However, other methods for introducing DNA into cells, such as by nuclear microinjection, electroporation, bacterial protoplast fusion with intact cells, or polycations, e.g., polybrene, polyornithine, may also be used. For various techniques for transforming mammalian cells, see Keown et al., Methods in Enzymology, 185:527-537 (1990) and Mansour et al., Nature, 336:348-352 (1988).

[0160] Suitable host cells for cloning or expressing the DNA in the vectors herein include prokaryote, yeast, or higher eukaryote cells. Suitable prokaryotes include but are not limited to eubacteria, such as Gram-negative or Gram-positive organisms, for example, Enterobacteriaceae such as E. coli. Various E. coli strains are publicly available, such as E. coli K12 strain MM294 (ATCC 31,446); E. coli X1776 (ATCC 31,537); E. coli strain W3110 (ATCC 27,325) and K5 772 (ATCC 53,635). Other suitable prokaryotic host cells include Enterobacteriaceae such as Escherichia, e.g., E. coli, Enterobacter, Erwinia, Klebsiella, Proteus, Salmonella, e.g., Salmonella typhimurium, Serratia, e.g., Serratia marcescans, and Shigella, as well as Bacilli such as B. subtilis and B. licheniformis (e.g., B. licheniformis 41P disclosed in DD 266,710 published 12 Apr. 1989), Pseudomonas such as P. aeruginosa, and Streptomyces. These examples are illustrative rather than limiting. Strain W3110 is one particularly preferred host or parent host because it is a common host strain for recombinant DNA product fermentations. Preferably, the host cell secretes minimal amounts of proteolytic enzymes. For example, strain W3110 may be modified to effect a genetic mutation in the genes encoding proteins endogenous to the host, with examples of such hosts including E. coli W3110 strain 1A2, which has the complete genotype tonA; E. coli W3110 strain 9E4, which has the complete genotype tonA ptr3; E. coli W3110 strain 27C7 (ATCC 55,244), which has the complete genotype tonA ptr3 phoA E15 (argF-lac)169 degP ompT kan^{r}; E. coli W3110 strain 37D6, which has the complete genotype tonA ptr3 phoA E15 (argF-lac)169 degP ompT rbs7 ilvG kan^{r}; E. coli W3110 strain 40B4, which is strain 37D6 with a non-kanamycin resistant degP deletion mutation; and an E. coli strain having mutant periplasmic protease disclosed in U.S. Pat. No. 4,946,783 issued 7 Aug. 1990. Alternatively, in vitro methods of cloning, e.g., PCR or other nucleic acid polymerase reactions, are suitable.

[0161] In addition to prokaryotes, eukaryotic microbes such as filamentous fungi or yeast are suitable cloning or expression hosts for PRO-encoding vectors. Saccharomyces cerevisiae is a commonly used lower eukaryotic host microorganism. Others include Schizosaccharomyces pombe (Beach and Nurse, Nature, 290: 140 (1981]; EP 139,383 published 2 May 1985); Kluyveromyces hosts (U.S. Pat. No. 4,943,529; Fleer et al., Bio/Technology, 9:968-975 (1991)) such as, e.g., K. lactis (MW98-8C, CBS683, CBS4574; Louvencourt et al., J. Bacteriol., 154(2):737-742 [1983]), K. fragilis (ATCC 12,424), K. bulgaricus (ATCC 16,045), K. wickeramii (ATCC 24,178), K. waltii (ATCC 56,500), K. drosophilarum (ATCC 36,906; Van den Berg et al., Bio/Technology, 8:135 (1990)), K. thermotolerans, and K. marxianus; yarrowia (EP 402,226); Pichia pastoris (EP 183,070; Sreekrishna et al., J. Basic Microbiol., 28:265-278 [1988]); Candida; Trichoderma reesia (EP 244,234); Neurospora crassa (Case et al., Proc. Natl. Acad. Sci. USA, 76:5259-5263 [1979]); Schwanniomyces such as Schwanniomyces occidentalis (EP 394,538 published 31 Oct. 1990); and filamentous fungi such as, e.g., Neurospora, Penicillium, Tolypocladium (WO 91/00357 published 10 Jan. 1991), and Aspergillus hosts such as A. nidulans (Ballance et al., Biochem. Biophys. Res. Commun., 112:284-289 [1983]; Tilburn et al., Gene, 26:205-221 [1983]; Yelton et al., Proc. Natl. Acad. Sci. USA, 81: 1470-1474 [1984]) and A. niger (Kelly and Hynes, EMBO J., 4:475-479 [1985]). Methylotropic yeasts are suitable herein and include, but are not limited to, yeast capable of growth on methanol selected from the genera consisting of Hansenula, Candida, Kloeckera, Pichia, Saccharomyces, Torulopsis, and Rhodotorula. A list of specific species that are exemplary of this class of yeasts may be found in C. Anthony, The Biochemistry of Methylotrophs, 269 (1982).

[0162] Suitable host cells for the expression of glycosylated PRO are derived from multicellular organisms. Examples of invertebrate cells include insect cells such as Drosophila S2 and Spodoptera Sf9, as well as plant cells. Examples of useful mammalian host cell lines include Chinese hamster ovary (CHO) and COS cells. More specific examples include monkey kidney CV1 line transformed by SV40 (COS-7, ATCC CRL 1651); human embryonic kidney line (293 or 293 cells subcloned for growth in suspension culture, Graham et al., J. Gen Virol., 36:59 (1977)); Chinese hamster ovary cells/−DHFR (CHO, Urlaub and Chasin, Proc. Natl. Acad. Sci. USA, 77:4216 (1980)); mouse sertoli cells (TM4, Mather, Biol. Retrod., 23:243-251 (1980)); human lung cells (W138, ATCC CCL 75); human liver cells (Hep G2, HB 8065); and mouse mammary tumor (MMT 060562, ATCC CCL51). The selection of the appropriate host cell is deemed to be within the skill in the art.

[0163] 3. Selection and Use of a Replicable Vector

[0164] The nucleic acid (e.g., cDNA or genomic DNA) encoding PRO may be inserted into a replicable vector for cloning (amplification of the DNA) or for expression. Various vectors are publicly available. The vector may, for example, be in the form of a plasmid, cosmid, viral particle, or phage. The appropriate nucleic acid sequence may be inserted into the vector by a variety of procedures. In general, DNA is inserted into an appropriate restriction endonuclease site(s) using techniques known in the art. Vector components generally include, but are not limited to, one or more of a signal sequence, an origin of replication, one or more marker genes, an enhancer element, a promoter, and a transcription termination sequence. Construction of suitable vectors containing one or more of these components employs standard ligation techniques which are known to the skilled artisan.

[0165] The PRO may be produced recombinantly not only directly, but also as a fusion polypeptide with a heterologous polypeptide, which may be a signal sequence or other polypeptide having a specific cleavage site at the N-terminus of the mature protein or polypeptide. In general, the signal sequence may be a component of the vector, or it may be a part of the PRO-encoding DNA that is inserted into the vector. The signal sequence may be a prokaryotic signal sequence selected, for example, from the group of the alkaline phosphatase, penicillinase, lpp, or heat-stable enterotoxin II leaders. For yeast secretion the signal sequence may be, e.g., the yeast invertase leader, alpha factor leader (including Saccharomyces and Kluyveromyces α-factor leaders, the latter described in U.S. Pat. No. 5,010,182), or acid phosphatase leader, the C. albicans glucoamylase leader (EP 362,179 published 4 Apr. 1990), or the signal described in WO 90/13646 published 15 Nov. 1990. In mammalian cell expression, mammalian signal sequences may be used to direct secretion of the protein, such as signal sequences from secreted polypeptides of the same or related species, as well as viral secretory leaders.

[0166] Both expression and cloning vectors contain a nucleic acid sequence that enables the vector to replicate in one or more selected host cells. Such sequences are well known for a variety of bacteria, yeast, and viruses. The origin of replication from the plasmid pBR322 is suitable for most Gram-negative bacteria, the 2μ plasmid origin is suitable for yeast, and various viral origins (SV40, polyoma, adenovirus, VSV or BPV) are useful for cloning vectors in mammalian cells.

[0167] Expression and cloning vectors will typically contain a selection gene, also termed a selectable marker. Typical selection genes encode proteins that (a) confer resistance to antibiotics or other toxins, e.g., ampicillin, neomycin, methotrexate, or tetracycline, (b) complement auxotrophic deficiencies, or (c) supply critical nutrients not available from complex media, e.g., the gene encoding D-alanine racemase for Bacilli.

[0168] An example of suitable selectable markers for mammalian cells are those that enable the identification of cells competent to take up the PRO-encoding nucleic acid, such as DHFR or thymidine kinase. An appropriate host cell when wild-type DHFR is employed is the CHO cell line deficient in DHPR activity, prepared and propagated as described by Urlaub et al., Proc. Natl. Acad. Sci. USA, 77:4216 (1980). A suitable selection gene for use in yeast is the trp1 gene present in the yeast plasmid YRp7 [Stinchcomb et al., Nature, 282:39 (1979); Kingsman et al., Gene, 7:141 (1979); Tschemper et al., Gene 10:157 (1980)]. The trp1 gene provides a selection marker for a mutant strain of yeast lacking the ability to grow in tryptophan, for example, ATCC No. 44076 or PEP4-1 [Jones, Genetics, 85:12 (1977)].

[0169] Expression and cloning vectors usually contain a promoter operably linked to the PRO-encoding nucleic acid sequence to direct mRNA synthesis. Promoters recognized by a variety of potential host cells are well known. Promoters suitable for use with prokaryotic hosts include the β-lactamase and lactose promoter systems [Chang et al., Nature. 275:615 (1978); Goeddel et al., Nature, 281:544 (1979)], alkaline phosphatase, a tryptophan (trp) promoter system [Goeddel, Nucleic Acids Res., 8:4057 (1980); EP 36,776], and hybrid promoters such as the tac promoter [deBoer et al., Proc. Natl. Acad. Sci. USA, 80:21-25 (1983)]. Promoters for use in bacterial systems also will contain a Shine-Dalgarno (S.D.) sequence operably linked to the DNA encoding PRO.

[0170] Examples of suitable promoting sequences for use with yeast hosts include the promoters for 3-phosphoglycerate kinase [Hitzeman et al., J. Biol. Chem., 255:2073 (1980)] or other glycolytic enzymes [Hess et al., J. Adv. Enzyme Reg. 7:149 (1968); Holland, Biochemistry, 17:4900 (1978)], such as enolase, glyceraldehyde-3-phosphate dehydrogenase, hexokinase, pyruvate decarboxylase, phosphofructokinase, glucose-6-phosphate isomerase, 3-phosphoglycerate mutase, pyruvate kinase, triosephosphate isomerase, phosphoglucose isomerase, and glucokinase.

[0171] Other yeast promoters, which are inducible promoters having the additional advantage of transcription controlled by growth conditions, are the promoter regions for alcohol dehydrogenase 2, isocytochrome C, acid phosphatase, degradative enzymes associated with nitrogen metabolism, metallothionein, glyceraldehyde-3-phosphate dehydrogenase, and enzymes responsible for maltose and galactose utilization. Suitable vectors and promoters for use in yeast expression are further described in EP 73,657.

[0172] PRO transcription from vectors in mammalian host cells is controlled, for example, by promoters obtained from the genomes of viruses such as polyoma virus, fowlpox virus (UK 2,211,504 published 5 Jul. 1989), adenovirus (such as Adenovirus 2), bovine papilloma virus, avian sarcoma virus, cytomegalovirus, a retrovirus, hepatitis-B virus and Simian Virus 40 (SV40), from heterologous mammalian promoters, e.g., the actin promoter or an immunoglobulin promoter, and from heat-shock promoters, provided such promoters are compatible with the host cell systems.

[0173] Transcription of a DNA encoding the PRO by higher eukaryotes may be increased by inserting an enhancer sequence into the vector. Enhancers are cis-acting elements of DNA, usually about from 10 to 300 bp, that act on a promoter to increase its transcription. Many enhancer sequences are now known from mammalian genes (globin, elastase, albumin, α-fetoprotein, and insulin). Typically, however, one will use an enhancer from a eukaryotic cell virus. Examples include the SV40 enhancer on the late side of the replication origin (bp 100-270), the cytomegalovirus early promoter enhancer, the polyoma enhancer on the late side of the replication origin, and adenovirus enhancers. The enhancer may be spliced into the vector at a position 5′ or 3′ to the PRO coding sequence, but is preferably located at a site 5′ from the promoter.

[0174] Expression vectors used in eukaryotic host cells (yeast, fungi, insect, plant, animal, human, or nucleated cells from other multicellular organisms) will also contain sequences necessary for the termination of transcription and for stabilizing the mRNA. Such sequences are commonly available from the 5′ and, occasionally 3′, untranslated regions of eukaryotic or viral DNAs or cDNAs. These regions contain nucleotide segments transcribed as polyadenylated fragments in the untranslated portion of the mRNA encoding PRO.

[0175] Still other methods, vectors, and host cells suitable for adaptation to the synthesis of PRO in recombinant vertebrate cell culture are described in Gething et al., Nature, 293:620-625 (1981); Mantei et al., Nature, 281:40-46 (1979); EP 117,060; and EP 117,058.

[0176] 4. Detecting Gene Amplification/Expression

[0177] Gene amplification and/or expression may be measured in a sample directly, for example, by conventional Southern blotting, Northern blotting to quantitate the transcription of mRNA [Thomas, Proc. Natl. Acad. Sci. USA, 77:5201-5205 (1980)], dot blotting (DNA analysis), or in situ hybridization, using an appropriately labeled probe, based on the sequences provided herein. Alternatively, antibodies may be employed that can recognize specific duplexes, including DNA duplexes, RNA duplexes, and DNA-RNA hybrid duplexes or DNA-protein duplexes. The antibodies in turn may be labeled and the assay may be carried out where the duplex is bound to a surface, so that upon the formation of duplex on the surface, the presence of antibody bound to the duplex can be detected.

[0178] Gene expression, alternatively, may be measured by immunological methods, such as immunohistochemical staining of cells or tissue sections and assay of cell culture or body fluids, to quantitate directly the expression of gene product. Antibodies useful for immunohistochemical staining and/or assay of sample fluids may be either monoclonal or polyclonal, and may be prepared in any mammal. Conveniently, the antibodies may be prepared against a native sequence PRO polypeptide or against a synthetic peptide based on the DNA sequences provided herein or against exogenous sequence fused to PRO DNA and encoding a specific antibody epitope.

[0179] 5. Purification of Polypeptide

[0180] Forms of PRO may be recovered from culture medium or from host cell lysates. If membrane-bound, it can be released from the membrane using a suitable detergent solution (e.g. Triton-X 100) or by enzymatic cleavage. Cells employed in expression of PRO can be disrupted by various physical or chemical means, such as freeze-thaw cycling, sonication, mechanical disruption, or cell lysing agents.

[0181] It may be desired to purify PRO from recombinant cell proteins or polypeptides. The following procedures are exemplary of suitable purification procedures: by fractionation on an ion-exchange column; ethanol precipitation; reverse phase HPLC; chromatography on silica or on a cation-exchange resin such as DEAE; chromatofocusing; SDS-PAGE; ammonium sulfate precipitation; gel filtration using, for example, Sephadex G-75; protein A Sepharose columns to remove contaminants such as IgG; and metal chelating columns to bind epitope-tagged forms of the PRO. Various methods of protein purification may be employed and such methods are known in the art and described for example in Deutscher, Methods in Enzymology, 182 (1990); Scopes, Protein Purification: Principles and Practice, Springer-Verlag, New York (1982). The purification step(s) selected will depend, for example, on the nature of the production process used and the particular PRO produced.

[0182] E. Tissue Distribution

[0183] The location of tissues expressing the PRO can be identified by determining mRNA expression in various human tissues. The location of such genes provides information about which tissues are most likely to be affected by the stimulating and inhibiting activities of the PRO polypeptides. The location of a gene in a specific tissue also provides sample tissue for the activity blocking assays discussed below.

[0184] As noted before, gene expression in various tissues may be measured by conventional Southern blotting, Northern blotting to quantitate the transcription of mRNA (Thomas, Proc. Natl. Acad. Sci. USA, 77:5201-5205 [1980]), dot blotting (DNA analysis), or in situ hybridization, using an appropriately labeled probe, based on the sequences provided herein. Alternatively, antibodies may be employed that can recognize specific duplexes, including DNA duplexes, RNA duplexes, and DNA-RNA hybrid duplexes or DNA-protein duplexes.

[0185] Gene expression in various tissues, alternatively, may be measured by immunological methods, such as immunohistochemical staining of tissue sections and assay of cell culture or body fluids, to quantitate directly the expression of gene product. Antibodies useful for immunohistochemical staining and/or assay of sample fluids may be either monoclonal or polyclonal, and may be prepared in any mammal. Conveniently, the antibodies may be prepared against a native sequence of a PRO polypeptide or against a synthetic peptide based on the DNA sequences encoding the PRO polypeptide or against an exogenous sequence fused to a DNA encoding a PRO polypeptide and encoding a specific antibody epitope. General techniques for generating antibodies, and special protocols for Northern blotting and in situ hybridization are provided below.

[0186] F. Antibody Binding Studies

[0187] The activity of the PRO polypeptides can be further verified by antibody binding studies, in which the ability of anti-PRO antibodies to inhibit the effect of the PRO polypeptides, respectively, on tissue cells is tested. Exemplary antibodies include polyclonal, monoclonal, humanized, bispecific, and heteroconjugate antibodies, the preparation of which will be described hereinbelow.

[0188] Antibody binding studies may be carried out in any known assay method, such as competitive binding assays, direct and indirect sandwich assays, and immunoprecipitation assays. Zola, Monoclonal Antibodies: A Manual of Techniques, pp. 147-158 (CRC Press, Inc., 1987).

[0189] Competitive binding assays rely on the ability of a labeled standard to compete with the test sample analyte for binding with a limited amount of antibody. The amount of target protein in the test sample is inversely proportional to the amount of standard that becomes bound to the antibodies. To facilitate determining the amount of standard that becomes bound, the antibodies preferably are insolubilized before or after the competition, so that the standard and analyte that are bound to the antibodies may conveniently be separated from the standard and analyte which remain unbound.

[0190] Sandwich assays involve the use of two antibodies, each capable of binding to a different immunogenic portion, or epitope, of the protein to be detected. In a sandwich assay, the test sample analyte is bound by a first antibody which is immobilized on a solid support, and thereafter a second antibody binds to the analyte, thus forming an insoluble three-part complex. See, e.g., U.S. Pat. No. 4,376,110. The second antibody may itself be labeled with a detectable moiety (direct sandwich assays) or may be measured using an anti-immunoglobulin antibody that is labeled with a detectable moiety (indirect sandwich assay). For example, one type of sandwich assay is an ELISA assay, in which case the detectable moiety is an enzyme.

[0191] For immunohistochemistry, the tissue sample may be fresh or frozen or may be embedded in paraffin and fixed with a preservative such as formalin, for example.

[0192] G. Cell-Based Assays

[0193] Cell-based assays and animal models for immune related diseases can be used to further understand the relationship between the genes and polypeptides identified herein and the development and pathogenesis of immune related disease.

[0194] In a different approach, cells of a cell type known to be involved in a particular immune related disease are transfected with the cDNAs described herein, and the ability of these cDNAs to stimulate or inhibit immune function is analyzed. Suitable cells can be transfected with the desired gene, and monitored for immune function activity. Such transfected cell lines can then be used to test the ability of poly- or monoclonal antibodies or antibody compositions to inhibit or stimulate immune function, for example to modulate T-cell proliferation or inflammatory cell infiltration. Cells transfected with the coding sequences of the genes identified herein can further be used to identify drug candidates for the treatment of immune related diseases.

[0195] In addition, primary cultures derived from transgenic animals (as described below) can be used in the cell-based assays herein, although stable cell lines are preferred. Techniques to derive continuous cell lines from transgenic animals are well known in the art (see, e.g., Small et al., Mol. Cell. Biol. 5: 642-648 [1985]).

[0196] One suitable cell based assay is the mixed lymphocyte reaction (MLR). Current Protocols in Immunology, unit 3.12; edited by J B Coligan, A M Kruisbeek, D H Marglies, B M Shevach, W Strober, National Institutes of Health, Published by John Wiley & Sons, Inc. In this assay, the ability of a test compound to stimulate or inhibit the proliferation of activated T cells is assayed. A suspension of responder T cells is cultured with allogeneic stimulator cells and the proliferation of T cells is measured by uptake of tritiated thymidine. This assay is a general measure of T cell reactivity. Since the majority of T cells respond to and produce IL-2 upon activation, differences in responsiveness in this assay in part reflect differences in IL-2 production by the responding cells. The MLR results can be verified by a standard lymphokine (IL-2) detection assay. Current Protocols in Immunology, above, 3.15, 6.3.

[0197] A proliferative T cell response in an MLR assay may be due to direct mitogenic properties of an assayed molecule or to external antigen induced activation. Additional verification of the T cell stimulatory activity of the PRO polypeptides can be obtained by a costimulation assay. T cell activation requires an antigen specific signal mediated through the T-cell receptor (TCR) and a costimulatory signal mediated through a second ligand binding interaction, for example, the B7 (CD80, CD86)/CD28 binding interaction. CD28 crosslinking increases lymphokine secretion by activated T cells. T cell activation has both negative and positive controls through the binding of ligands which have a negative or positive effect CD28 and CTLA-4 are related glycoproteins in the Ig superfamily which bind to B7. CD28 binding to B7 has a positive costimulation effect of T cell activation; conversely, CTLA4 binding to B7 has a T cell deactivating effect Chambers, C. A. and Allison, J. P., Curr. Opin. Immunol. (1997) 9:396. Schwartz, R. H., Cell (1992) 71:1065; Linsey, P. S. and Ledbetter, J. A., Annu. Rev. Immunol. (1993) 11:191; June, C. H. et al, Immunol. Today (1994) 15:321; Jenkins, M. K., Immunity (1994) 1:405. In a costimulation assay, the PRO polypeptides are assayed for T cell costimulatory or inhibitory activity.

[0198] Direct use of a stimulating compound as in the invention has been validated in experiments with 4-1BB glycoprotein, a member of the tumor necrosis factor receptor family, which binds to a ligand (4-IBBL) expressed on primed T cells and signals T cell activation and growth. Alderson, M. E. et al., J. Immunol. (1994) 24:2219.

[0199] The use of an agonist stimulating compound has also been validated experimentally. Activation of 4-BB by treatment with an agonist anti-4-1BB antibody enhances eradication of tumors. Hellstrom, I. and Hellstrom, K. E., Crit. Rev. Immunol. (1998) 18:1. Immunoadjuvant therapy for treatment of tumors, described in more detail below, is another example of the use of the stimulating compounds of the invention.

[0200] Alternatively, an immune stimulating or enhancing effect can also be achieved by administration of a PRO which has vascular permeability enhancing properties. Enhanced vascular permeability would be beneficial to disorders which can be attenuated by local infiltration of immune cells (e.g., monocytes, eosinophils, PMNs) and inflammation.

[0201] On the other hand, PRO polypeptides, as well as other compounds of the invention, which are direct inhibitors of T cell proliferation/activation, lymphokine secretion, and/or vascular permeability can be directly used to suppress the immune response. These compounds are useful to reduce the degree of the immune response and to treat immune related diseases characterized by a hyperactive, superoptimal, or autoimmune response. This use of the compounds of the invention has been validated by the experiments described above in which CTLA4 binding to receptor B7 deactivates T cells. The direct inhibitory compounds of the invention function in an analogous manner. The use of compound which suppress vascular permeability would be expected to reduce inflammation. Such uses would be beneficial in treating conditions associated with excessive inflammation.

[0202] Alternatively, compounds, e.g., antibodies, which bind to stimulating PRO polypeptides and block the stimulating effect of these molecules produce a net inhibitory effect and can be used to suppress the T cell mediated immune response by inhibiting T cell proliferation/activation and/or lymphokine secretion. Blocking the stimulating effect of the polypeptides suppresses the immune response of the mammal. This use has been validated in experiments using an anti-IL2 antibody. In these experiments, the antibody binds to IL2 and blocks binding of IL2 to its receptor thereby achieving a T cell inhibitory effect.

[0203] H. Animal Models

[0204] The results of the cell based in vitro assays can be further verified using in vivo animal models and assays for T-cell function. A variety of well known animal models can be used to further understand the role of the genes identified herein in the development and pathogenesis of immune related disease, and to test the efficacy of candidate therapeutic agents, including antibodies, and other antagonists of the native polypeptides, including small molecule antagonists. The in vivo nature of such models makes them predictive of responses in human patients. Animal models of immune related diseases include both non-recombinant and recombinant (transgenic) animals. Non-recombinant animal models include, for example, rodent, e.g., murine models. Such models can be generated by introducing cells into syngeneic mice using standard techniques, e.g., subcutaneous injection, tail vein injection, spleen implantation, intraperitoneal implantation, implantation under the renal capsule, etc.

[0205] Graft-versus-host disease occurs when immunocompetent cells are transplanted into immunosuppressed or tolerant patients. The donor cells recognize and respond to host antigens. The response can vary from life threatening severe inflammation to mild cases of diarrhea and weight loss. Graft-versus-host disease models provide a means of assessing T cell reactivity against MHC antigens and minor transplant antigens. A suitable procedure is described in detail in Current Protocols in Immunology, above, unit 4.3.

[0206] An animal model for skin allograft rejection is a means of testing the ability of T cells to mediate in vivo tissue destruction and a measure of their role in transplant rejection. The most common and accepted models use murine tail-skin grafts. Repeated experiments have shown that skin allograft rejection is mediated by T cells, helper T cells and killer-effector T cells, and not antibodies. Auchincloss, H. Jr. and Sachs, D. H., Fundamental Immunology, 2nd ed., W. E. Paul ed., Raven Press, NY, 1989, 889-992. A suitable procedure is described in detail in Current Protocols in Immunology, above, unit 4.4. Other transplant rejection models which can be used to test the compounds of the invention are the allogeneic heart transplant models described by Tanabe, M. et al, Transplantation (1994) 58:23 and Tinubu, S. A. et al, J. Immunol. (1994) 4330-4338.

[0207] Animal models for delayed type hypersensitivity provides an assay of cell mediated immune function as well. Delayed type hypersensitivity reactions are a T cell mediated in vivo immune response characterized by inflammation which does not reach a peak until after a period of time has elapsed after challenge with an antigen. These reactions also occur in tissue specific autoimmune diseases such as multiple sclerosis (MS) and experimental autoimmune encephalomyelitis (EAE, a model for MS). A suitable procedure is described in detail in Current Protocols in Immunology, above, unit 4.5.

[0208] EAE is a T cell mediated autoimmune disease characterized by T cell and mononuclear cell inflammation and subsequent demyelination of axons in the central nervous system. FAB is generally considered to be a relevant animal model for MS in humans. Bolton, C., Multiple Sclerosis (1995) 1:143. Both acute and relapsing-remitting models have been developed. The compounds of the invention can be tested for T cell stimulatory or inhibitory activity against immune mediated demyelinating disease using the protocol described in Current Protocols in Immunology, above, units 15.1 and 15.2. See also the models for myelin disease in which oligodendrocytes or Schwann cells are grafted into the central nervous system as described in Duncan, I. D. et al, Molec. Med. Today (1997) 554-561.

[0209] Contact hypersensitivity is a simple delayed type hypersensitivity in vivo assay of cell mediated immune function. In this procedure, cutaneous exposure to exogenous haptens which gives rise to a delayed type hypersensitivity reaction which is measured and quantitated. Contact sensitivity involves an initial sensitizing phase followed by an elicitation phase. The elicitation phase occurs when the T lymphocytes encounter an antigen to which they have had previous contact. Swelling and inflammation occur, making this an excellent model of human allergic contact dermatitis. A suitable procedure is described in detail in Current Protocols in Immunology, Eds. J. E. Cologan, A. M. Kruisbeek, D. H. Margulies, E. M. Shevach and W. Strober, John Wiley & Sons, Inc., 1994, unit 4.2. See also Grabbe, S. and Schwarz, T, Immun. Today 19 (1): 3744 (1998).

[0210] An animal model for arthritis is collagen-induced arthritis. This model shares clinical, histological and immunological characteristics of human autoimmune rheumatoid arthritis and is an acceptable model for human autoimmune arthritis. Mouse and rat models are characterized by synovitis, erosion of cartilage and subchondral bone. The compounds of the invention can be tested for activity against autoimmune arthritis using the protocols described in Current Protocols in Immunology, above, units 15.5. See also the model using a monoclonal antibody to CD18 and VLA-4 integrins described in Issekutz, A. C. et al., Immunology (1996) 88:569.

[0211] A model of asthma has been described in which antigen-induced airway hyper-reactivity, pulmonary eosinophilia and inflammation are induced by sensitizing an animal with ovalbumin and then challenging the animal with the same protein delivered by aerosol. Several animal models (guinea pig, rat, non-human primate) show symptoms similar to atopic asthma in humans upon challenge with aerosol antigens. Murine models have many of the features of human asthma. Suitable procedures to test the compounds of the invention for activity and effectiveness in the treatment of asthma are described by Wolyniec, W. W. et al, Am. J. Respir. Cell Mol. Biol. (1998) 18:777 and the references cited therein.

[0212] Additionally, the compounds of the invention can be tested on animal models for psoriasis like diseases. Evidence suggests a T cell pathogenesis for psoriasis. The compounds of the invention can be tested in the scid/scid mouse model described by Schon, M. P. et al, Nat. Med. (1997) 3:183, in which the mice demonstrate histopathologic skin lesions resembling psoriasis. Another suitable model is the human skin/scid mouse chimera prepared as described by Nickoloff, B. J. et al, Am. J. Path. (1995) 146:580.

[0213] Recombinant (transgenic) animal models can be engineered by introducing the coding portion of the genes identified herein into the genome of animals of interest, using standard techniques for producing transgenic animals. Animals that can serve as a target for transgenic manipulation include, without limitation, mice, rats, rabbits, guinea pigs, sheep, goats, pigs, and non-human primates, e.g., baboons, chimpanzees and monkeys. Techniques known in the art to introduce a transgene into such animals include pronucleic microinjection (Hoppe and Wanger, U.S. Pat. No. 4,873,191); retrovirus-mediated gene transfer into germ lines (e.g., Van der Putten et al., Proc. Natl. Acad. Sci. USA 82, 6148-615 [1985]); gene targeting in embryonic stem cells (Thompson et al., Cell 5, 313-321 [1989]); electroporation of embryos (Lo, Mol. Cel. Biol. 3, 1803-1814 [19831); sperm-mediated gene transfer (Lavitrano et al., Cell 57, 717-73 [1989]). For review, see, for example, U.S. Pat. No. 4,736,866.

[0214] For the purpose of the present invention, transgenic animals include those that carry the transgene only in part of their cells (“mosaic animals”). The transgene can be integrated either as a single transgene, or in concatamers, e.g., head-to-head or head-to-tail tandems. Selective introduction of a transgene into a particular cell type is also possible by following, for example, the technique of Lasko et al., Proc. Natl. Acad. Sci. USA 89, 6232-636 (1992).

[0215] The expression of the transgene in transgenic animals can be monitored by standard techniques. For example, Southern blot analysis or PCR amplification can be used to verify the integration of the transgene. The level of mRNA expression can then be analyzed using techniques such as in situ hybridization, Northern blot analysis, PCR, or immunocytochemistry.

[0216] The animals may be further examined for signs of immune disease pathology, for example by histological examination to determine infiltration of immune cells into specific tissues. Blocking experiments can also be performed in which the transgenic animals are treated with the compounds of the invention to determine the extent of the T cell proliferation stimulation or inhibition of the compounds. In these experiments, blocking antibodies which bind to the PRO polypeptide, prepared as described above, are administered to the animal and the effect on immune function is determined.

[0217] Alternatively, “knock out” animals can be constructed which have a defective or altered gene encoding a polypeptide identified herein, as a result of homologous recombination between the endogenous gene encoding the polypeptide and altered genomic DNA encoding the same polypeptide introduced into an embryonic cell of the animal. For example, cDNA encoding a particular polypeptide can be used to clone genomic DNA encoding that polypeptide in accordance with established techniques. A portion of the genomic DNA encoding a particular polypeptide can be deleted or replaced with another gene, such as a gene encoding a selectable marker which can be used to monitor integration. Typically, several kilobases of unaltered flanking DNA (both at the 5′ and 3′ ends) are included in the vector [see e.g., Thomas and Capecchi, Cell, 51:503 (1987) for a description of homologous recombination vectors]. The vector is introduced into an embryonic stem cell line (e.g., by electroporation) and cells in which the introduced DNA has homologously recombined with the endogenous DNA are selected [see e.g., Li et al., Cell, 69:915 (1992)]. The selected cells are then injected into a blastocyst of an animal (e.g., a mouse or rat) to form aggregation chimeras [see e.g., Bradley, in Teratocarcinomas and Embryonic Stem Cells: A Practical Approach, E. J. Robertson, ed. (IRL, Oxford, 1987), pp. 113-152]. A chimeric embryo can then be implanted into a suitable pseudopregnant female foster animal and the embryo brought to term to create a “knock out” animal. Progeny harboring the homologously recombined DNA in their germ cells can be identified by standard techniques and used to breed animals in which all cells of the animal contain the homologously recombined DNA. Knockout animals can be characterized for instance, for their ability to defend against certain pathological conditions and for their development of pathological conditions due to absence of the polypeptide.

[0218] I. ImmunoAdjuvant Therapy

[0219] In one embodiment, the immunostimulating compounds of the invention can be used in immunoadjuvant therapy for the treatment of tumors (cancer). It is now well established that T cells recognize human tumor specific antigens. One group of tumor antigens, encoded by the MAGE, BAGE and GAGE families of genes, are silent in all adult normal tissues, but are expressed in significant amounts in tumors, such as melanomas, lung tumors, head and neck tumors, and bladder carcinomas. DeSmet, C. et al., (1996) Proc. Natl. Acad. Sci. USA, 93:7149. It has been shown that costimulation of T cells induces tumor regression and an antitumor response both in vitro and in vivo. Melero, I. et al., Nature Medicine (1997) 3:682; Kwon, E. D. et al., Proc. Natl. Acad. Sci. USA (1997) 94: 8099; Lynch, D. H. et al, Nature Medicine (1997) 3:625; Finn, O. J. and Lotze, M. T., J. Immunol. (1998) 21:114. The stimulatory compounds of the invention can be administered as adjuvants, alone or together with a growth regulating agent, cytotoxic agent or chemotherapeutic agent, to stimulate T cell proliferation/activation and an antitumor response to tumor antigens. The growth regulating, cytotoxic, or chemotherapeutic agent may be administered in conventional amounts using known administration regimes. Immunostimulating activity by the compounds of the invention allows reduced amounts of the growth regulating, cytotoxic, or chemotherapeutic agents thereby potentially lowering the toxicity to the patient

[0220] J. Screening Assays for Drug Candidates

[0221] Screening assays for drug candidates are designed to identify compounds that bind to or complex with the polypeptides encoded by the genes identified herein or a biologically active fragment thereof, or otherwise interfere with the interaction of the encoded polypeptides with other cellular proteins. Such screening assays will include assays amenable to high-throughput screening of chemical libraries, making them particularly suitable for identifying small molecule drug candidates. Small molecules contemplated include synthetic organic or inorganic compounds, including peptides, preferably soluble peptides, (poly)peptide-immunoglobulin fusions, and, in particular, antibodies including, without limitation, poly- and monoclonal antibodies and antibody fragments, single-chain antibodies, anti-idiotypic antibodies, and chimeric or humanized versions of such antibodies or fragments, as well as human antibodies and antibody fragments. The assays can be performed in a variety of formats, including protein-protein binding assays, biochemical screening assays, immunoassays and cell based assays, which are well characterized in the art. All assays are common in that they call for contacting the drug candidate with a polypeptide encoded by a nucleic acid identified herein under conditions and for a time sufficient to allow these two components to interact.

[0222] In binding assays, the interaction is binding and the complex formed can be isolated or detected in the reaction mixture. In a particular embodiment, the polypeptide encoded by the gene identified herein or the drug candidate is immobilized on a solid phase, e.g., on a microtiter plate, by covalent or non-covalent attachments. Non-covalent attachment generally is accomplished by coating the solid surface with a solution of the polypeptide and drying. Alternatively, an immobilized antibody, e.g., a monoclonal antibody, specific for the polypeptide to be immobilized can be used to anchor it to a solid surface. The assay is performed by adding the non-immobilized component, which may be labeled by a detectable label, to the immobilized component, e.g., the coated surface containing the anchored component. When the reaction is complete, the non-reacted components are removed, e.g., by washing, and complexes anchored on the solid surface are detected. When the originally non-immobilized component carries a detectable label, the detection of label immobilized on the surface indicates that complexing occurred. Where the originally non-immobilized component does not carry a label, complexing can be detected, for example, by using a labelled antibody specifically binding the immobilized complex.

[0223] If the candidate compound interacts with but does not bind to a particular protein encoded by a gene identified herein, its interaction with that protein can be assayed by methods well known for detecting protein-protein interactions. Such assays include traditional approaches, such as, cross-linking, co-immunoprecipitation, and co-purification through gradients or chromatographic columns. In addition, protein-protein interactions can be monitored by using a yeast-based genetic system described by Fields and co-workers [Fields and Song, Nature (London) 340, 245-246 (1989); Chien et al., Proc. Natl. Acad. Sci. USA 88, 9578-9582 (1991)] as disclosed by Chevray and Nathans, Proc. Natl. Acad. Sci. USA a 5789-5793 (1991). Many transcriptional activators, such as yeast GAL4, consist of two physically discrete modular domains, one acting as the DNA-binding domain, while the other one functioning as the transcription activation domain. The yeast expression system described in the foregoing publications (generally referred to as the “two-hybrid system”) takes advantage of this property, and employs two hybrid proteins, one in which the target protein is fused to the DNA-binding domain of GAL4, and another, in which candidate activating proteins are fused to the activation domain. The expression of a GAL1-lacZ reporter gene under control of a GAL4-activated promoter depends on reconstitution of GAL4 activity via protein-protein interaction. Colonies containing interacting polypeptides are detected with a chromogenic substrate for β-galactosidase. A complete kit (MATCHMAKER™) for identifying protein-protein interactions between two specific proteins using the two-hybrid technique is commercially available from Clontech. This system can also be extended to map protein domains involved in specific protein interactions as well as to pinpoint amino acid residues that are crucial for these interactions.

[0224] In order to find compounds that interfere with the interaction of a gene identified herein and other intra- or extracellular components can be tested, a reaction mixture is usually prepared containing the product of the gene and the intra- or extracellular component under conditions and for a time allowing for the interaction and binding of the two products. To test the ability of a test compound to inhibit binding, the reaction is run in the absence and in the presence of the test compound. In addition, a placebo may be added to a third reaction mixture, to serve as positive control. The binding (complex formation) between the test compound and the intra- or extracellular component present in the mixture is monitored as described above. The formation of a complex in the control reaction(s) but not in the reaction mixture containing the test compound indicates that the test compound interferes with the interaction of the test compound and its reaction partner.

[0225] K. Compositions and Methods for the Treatment of Immune Related Diseases

[0226] The compositions useful in the treatment of immune related diseases include, without limitation, proteins, antibodies, small organic molecules, peptides, phosphopeptides, antisense and ribozyme molecules, triple helix molecules, etc. that inhibit or stimulate immune function, for example, T cell proliferation/activation, lymphokine release, or immune cell infiltration.

[0227] For example, antisense RNA and RNA molecules act to directly block the translation of mRNA by hybridizing to targeted mRNA and preventing protein translation. When antisense DNA is used, oligodeoxyribonucleotides derived from the translation initiation site, e.g., between about −10 and +10 positions of the target gene nucleotide sequence, are preferred.

[0228] Ribozymes are enzymatic RNA molecules capable of catalyzing the specific cleavage of RNA. Ribozymes act by sequence-specific hybridization to the complementary target RNA, followed by endonucleolytic cleavage. Specific ribozyme cleavage sites within a potential RNA target can be identified by known techniques. For further details see, e.g., Rossi, Current Biology 4, 469-471 (1994), and PCT publication No. WO 97/33551 (published Sep. 18, 1997).

[0229] Nucleic acid molecules in triple helix formation used to inhibit transcription should be single-stranded and composed of deoxynucleotides. The base composition of these oligonucleotides is designed such that it promotes triple helix formation via Hoogsteen base pairing rules, which generally require sizeable stretches of purines or pyrimidines on one strand of a duplex. For further details see, e.g., PCT publication No. WO 97/33551, supra.

[0230] These molecules can be identified by any or any combination of the screening assays discussed above and/or by any other screening techniques well known for those skilled in the art.

[0231] L. Anti-PRO Antibodies

[0232] The present invention further provides anti-PRO antibodies. Exemplary antibodies include polyclonal, monoclonal, humanized, bispecific, and heteroconjugate antibodies.

[0233] 1. Polyclonal Antibodies

[0234] The anti-PRO antibodies may comprise polyclonal antibodies. Methods of preparing polyclonal antibodies are known to the skilled artisan. Polyclonal antibodies can be raised in a mammal, for example, by one or more injections of an immunizing agent and, if desired, an adjuvant. Typically, the immunizing agent and/or adjuvant will be injected in the mammal by multiple subcutaneous or intraperitoneal injections. The immunizing agent may include the PRO polypeptide or a fusion protein thereof. It may be useful to conjugate the immunizing agent to a protein known to be immunogenic in the mammal being immunized. Examples of such immunogenic proteins include but are not limited to keyhole limpet hemocyanin, serum albumin, bovine thyroglobulin, and soybean trypsin inhibitor. Examples of adjuvants which may be employed include Freund's complete adjuvant and MPL-TDM adjuvant (monophosphoryl Lipid A, synthetic trehalose dicorynomycolate). The immunization protocol may be selected by one skilled in the art without undue experimentation.

[0235] 2. Monoclonal Antibodies

[0236] The anti-PRO antibodies may, alternatively, be monoclonal antibodies. Monoclonal antibodies may be prepared using hybridoma methods, such as those described by Kohler and Milstein, Nature, 256:495 (1975). In a hybridoma method, a mouse, hamster, or other appropriate host animal, is typically immunized with an immunizing agent to elicit lymphocytes that produce or are capable of producing antibodies that will specifically bind to the immunizing agent. Alternatively, the lymphocytes may be immunized in vitro.

[0237] The immunizing agent will typically include the PRO polypeptide or a fusion protein thereof. Generally, either peripheral blood lymphocytes (“PBLs”) are used if cells of human origin are desired, or spleen cells or lymph node cells are used if non-human mammalian sources are desired. The lymphocytes are then fused with an immortalized cell line using a suitable fusing agent, such as polyethylene glycol, to form a hybridoma cell [Goding, Monoclonal Antibodies: Principles and Practice, Academic Press, (1986) pp. 59-103]. Immortalized cell lines are usually transformed mammalian cells, particularly myeloma cells of rodent, bovine and human origin. Usually, rat or mouse myeloma cell lines are employed. The hybridoma cells may be cultured in a suitable culture medium that preferably contains one or more substances that inhibit the growth or survival of the unfused, immortalized cells. For example, if the parental cells lack the enzyme hypoxanthine guanine phosphoribosyl transferase (HGPRT or HPRT), the culture medium for the hybridomas typically will include hypoxanthine, aminopterin, and thymidine (“HAT medium”), which substances prevent the growth of HGPRT-deficient cells.

[0238] Preferred immortalized cell lines are those that fuse efficiently, support stable high level expression of antibody by the selected antibody-producing cells, and are sensitive to a medium such as HAT medium. More preferred immortalized cell lines are murine myeloma lines, which can be obtained, for instance, from the Salk Institute Cell Distribution Center, San Diego, Calif. and the American Type Culture Collection, Manassas, Va. Human myeloma and mouse-human heteromyeloma cell lines also have been described for the production of human monoclonal antibodies [Kozbor, J. Immunol., 133:3001 (1984); Brodeur et al., Monoclonal Antibody Production Techniques and Applications, Marcel Dekker, Inc., New York, (1987) pp. 51-63].

[0239] The culture medium in which the hybridoma cells are cultured can then be assayed for the presence of monoclonal antibodies directed against PRO. Preferably, the binding specificity of monoclonal antibodies produced by the hybridoma cells is determined by immunoprecipitation or by an in vitro binding assay, such as radioimmunoassay (RIA) or enzyme-linked immunoabsorbent assay (ELISA). Such techniques and assays are known in the art. The binding affinity of the monoclonal antibody can, for example, be determined by the Scatchard analysis of Munson and Pollard, Anal. Biochem., 107:220 (1980).

[0240] After the desired hybridoma cells are identified, the clones may be subcloned by limiting dilution procedures and grown by standard methods [Goding, supra]. Suitable culture media for this purpose include, for example, Dulbecco's Modified Eagle's Medium and RPMI-1640 medium. Alternatively, the hybridoma cells may be grown in vivo as ascites in a mammal.

[0241] The monoclonal antibodies secreted by the subclones may be isolated or purified from the culture medium or ascites fluid by conventional immunoglobulin purification procedures such as, for example, protein A-Sepharose, hydroxylapatite chromatography, gel electrophoresis, dialysis, or affinity chromatography.

[0242] The monoclonal antibodies may also be made by recombinant DNA methods, such as those described in U.S. Pat. No. 4,816,567. DNA encoding the monoclonal antibodies of the invention can be readily isolated and sequenced using conventional procedures (e.g., by using oligonucleotide probes that are capable of binding specifically to genes encoding the heavy and light chains of murine antibodies). The hybridoma cells of the invention serve as a preferred source of such DNA. Once isolated, the DNA may be placed into expression vectors, which are then transfected into host cells such as simian COS cells, Chinese hamster ovary (CHO) cells, or myeloma cells that do not otherwise produce immunoglobulin protein, to obtain the synthesis of monoclonal antibodies in the recombinant host cells. The DNA also may be modified, for example, by substituting the coding sequence for human heavy and light chain constant domains in place of the homologous murine sequences [U.S. Pat. No. 4,816,567; Morrison et al., supra] or by covalently joining to the immunoglobulin coding sequence all or part of the coding sequence for a non-immunoglobulin polypeptide. Such a non-immunoglobulin polypeptide can be substituted for the constant domains of an antibody of the invention, or can be substituted for the variable domains of one antigen-combining site of an antibody of the invention to create a chimeric bivalent antibody.

[0243] The antibodies may be monovalent antibodies. Methods for preparing monovalent antibodies are well known in the art. For example, one method involves recombinant expression of immunoglobulin light chain and modified heavy chain. The heavy chain is truncated generally at any point in the Fc region so as to prevent heavy chain crosslinking. Alternatively, the relevant cysteine residues are substituted with another amino acid residue or are deleted so as to prevent crosslinking.

[0244] In vitro methods are also suitable for preparing monovalent antibodies. Digestion of antibodies to produce fragments thereof, particularly, Fab fragments, can be accomplished using routine techniques known in the art

[0245] 3. Human and Humanized Antibodies

[0246] The anti-PRO antibodies of the invention may further comprise humanized antibodies or human antibodies. Humanized forms of non-human (e.g., murine) antibodies are chimeric immunoglobulins, immunoglobulin chains or fragments thereof (such as Fv, Fab, Fab′, F(ab′)₂ or other antigen-binding subsequences of antibodies) which contain minimal sequence derived from non-human immunoglobulin. Humanized antibodies include human immunoglobulins (recipient antibody) in which residues from a complementary determining region (CDR) of the recipient are replaced by residues from a CDR of a non-human species (donor antibody) such as mouse, rat or rabbit having the desired specificity, affinity and capacity. In some instances, Fv framework residues of the human immunoglobulin are replaced by corresponding non-human residues. Humanized antibodies may also comprise residues which are found neither in the recipient antibody nor in the imported CDR or framework sequences. In general, the humanized antibody will comprise substantially all of at least one, and typically two, variable domains, in which all or substantially all of the CDR regions correspond to those of a non-human immunoglobulin and all or substantially all of the FR regions are those of a human immunoglobulin consensus sequence. The humanized antibody optimally also will comprise at least a portion of an immunoglobulin constant region (Fc), typically that of a human immunoglobulin [Jones et al., Nature, 321:522-525 (1986); Riechmann et al., Nature, 332:323-329 (1988); and Presta, Curr. Op. Struct. Biol., 2:593-596 (1992)].

[0247] Methods for humanizing non-human antibodies are well known in the art. Generally, a humanized antibody has one or more amino acid residues introduced into it from a source which is non-human. These non-human amino acid residues are often referred to as “import” residues, which are typically taken from an “import” variable domain. Humanization can be essentially performed following the method of Winter and co-workers [Jones et al., Nature, 321:522-525 (1986); Riechmann et al., Nature, 332:323-327 (1988); Verhoeyen et al., Science, 239:1534-1536 (1988)], by substituting rodent CDRs or CDR sequences for the corresponding sequences of a human antibody. Accordingly, such “humanized” antibodies are chimeric antibodies (U.S. Pat. No. 4,816,567), wherein substantially less than an intact human variable domain has been substituted by the corresponding sequence from a non-human species. In practice, humanized antibodies are typically human antibodies in which some CDR residues and possibly some FR residues are substituted by residues from analogous sites in rodent antibodies.

[0248] Human antibodies can also be produced using various techniques known in the art, including phage display libraries [Hoogenboom and Winter, J. Mol. Biol., 227:381 (1991); Marks et al., J. Mol. Biol., 222:581 (1991)]. The techniques of Cole et al. and Boerner et al. are also available for the preparation of human monoclonal antibodies (Cole et al., Monoclonal Antibodies and Cancer Therapy, Alan R. Liss, p. 77 (1985) and Boerner et al., J. Immunol., 147(1):86-95 (1991)]. Similarly, human antibodies can be made by introducing of human immunoglobulin loci into transgenic animals, e.g., mice in which the endogenous immunoglobulin genes have been partially or completely inactivated. Upon challenge, human antibody production is observed, which closely resembles that seen in humans in all respects, including gene rearrangement, assembly, and antibody repertoire. This approach is described, for example, in U.S. Pat. Nos. 5,545,807; 5,545,806; 5,569,825; 5,625,126; 5,633,425; 5,661,016, and in the following scientific publications: Marks et al., Bio/Technology 10, 779-783 (1992); Lonberg et al., Nature 368 856-859 (1994); Morrison, Nature 368, 812-13 (1994); Fishwild et al., Nature Biotechnology 14, 845-51 (1996); Neuberger, Nature Biotechnology 14, 826 (1996); Lonberg and Huszar, Intern. Rev. Immunol. 13 65-93 (1995).

[0249] The antibodies may also be affinity matured using known selection and/or mutagenesis methods as described above. Preferred affinity matured antibodies have an affinity which is five times, more preferably 10 times, even more preferably 20 or 30 times greater than the starting antibody (generally murine, humanized or human) from which the matured antibody is prepared.

[0250] 4. Bispecific Antibodies

[0251] Bispecific antibodies are monoclonal, preferably human or humanized, antibodies that have binding specificities for at least two different antigens. In the present case, one of the binding specificities is for the PRO, the other one is for any other antigen, and preferably for a cell-surface protein or receptor or receptor subunit.

[0252] Methods for making bispecific antibodies are known in the art Traditionally, the recombinant production of bispecific antibodies is based on the co-expression of two immunoglobulin heavy-chain/light-chain pairs, where the two heavy chains have different specificities [Milstein and Cuello, Nature, 305:537-539 (1983)]. Because of the random assortment of immunoglobulin heavy and light chains, these hybridomas (quadromas) produce a potential mixture of ten different antibody molecules, of which only one has the correct bispecific structure. The purification of the correct molecule is usually accomplished by affinity chromatography steps. Similar procedures are disclosed in WO 93/08829, published 13 May 1993, and in Traunecker et al., EMBO J., 10:3655-3659 (1991).

[0253] Antibody variable domains with the desired binding specificities (antibody-antigen combining sites) can be fused to immunoglobulin constant domain sequences. The fusion preferably is with an immunoglobulin heavy-chain constant domain, comprising at least part of the hinge, CH2, and CH3 regions. It is preferred to have the first heavy-chain constant region (CH1) containing the site necessary for light-chain binding present in at least one of the fusions. DNAs encoding the immunoglobulin heavy-chain fusions and, if desired, the immunoglobulin light chain, are inserted into separate expression vectors, and are co-transfected into a suitable host organism. For further details of generating bispecific antibodies see, for example, Suresh et al., Methods in Enzymology, 121:210 (1986).

[0254] According to another approach described in WO 96/27011, the interface between a pair of antibody molecules can be engineered to maximize the percentage of heterodimers which are recovered from recombinant cell culture. The preferred interface comprises at least a part of the CH3 region of an antibody constant domain. In this method, one or more small amino acid side chains from the interface of the first antibody molecule are replaced with larger side chains (e.g. tyrosine or tryptophan). Compensatory “cavities” of identical or similar size to the large side chain(s) are created on the interface of the second antibody molecule by replacing large amino acid side chains with smaller ones (e.g. alanine or threonine). This provides a mechanism for increasing the yield of the heterodimer over other unwanted end-products such as homodimers.

[0255] Bispecific antibodies can be prepared as full length antibodies or antibody fragments (e.g. F(ab′)₂ bispecific antibodies). Techniques for generating bispecific antibodies from antibody fragments have been described in the literature. For example, bispecific antibodies can be prepared can be prepared using chemical linkage. Brennan et al., Science 229:81 (1985) describe a procedure wherein intact antibodies are proteolyticaly cleaved to generate F(ab′)₂ fragments. These fragments are reduced in the presence of the dithiol complexing agent sodium arsenite to stabilize vicinal dithiols and prevent intermolecular disulfide formation. The Fab′ fragments generated are then converted to thionitrobenzoate (TNB) derivatives. One of the Fab′-TNB derivatives is then reconverted to the Fab′-thiol by reduction with mercaptoethylamine and is mixed with an equimolar amount of the other Fab′-TNB derivative to form the bispecific antibody. The bispecific antibodies produced can be used as agents for the selective immobilization of enzymes.

[0256] Fab′ fragments may be directly recovered from E. coli and chemically coupled to form bispecific antibodies. Shalaby et al., J. Exp. Med. 175:217-225 (1992) describe the production of a fully humanized bispecific antibody F(ab′)₂ molecule. Each Fab′ fragment was separately secreted from E. coli and subjected to directed chemical coupling in vitro to form the bispecific antibody. The bispecific antibody thus formed was able to bind to cells overexpressing the ErbB2 receptor and normal human T cells, as well as trigger the lytic activity of human cytotoxic lymphocytes against human breast tumor targets.

[0257] Various technique for making and isolating bispecific antibody fragments directly from recombinant cell culture have also been described. For example, bispecific antibodies have been produced using leucine zippers. Kostelny et al., J. Immunol. 148(5):1547-1553 (1992). The leucine zipper peptides from the Fos and Jun proteins were linked to the Fab′ portions of two different antibodies by gene fusion. The antibody homodimers were reduced at the hinge region to form monomers and then re-oxidized to form the antibody heterodimers. This method can also be utilized for the production of antibody homodimers. The “diabody” technology described by Hollinger et al., Proc. Natl. Acad. Sci. USA 90:6444-6448 (1993) has provided an alternative mechanism for making bispecific antibody fragments. The fragments comprise a heavy-chain variable domain (V_{H}) connected to a light-chain variable domain (V_{L}) by a linker which is too short to allow pairing between the two domains on the same chain. Accordingly, the V_{H} and V_{L} domains of one fragment are forced to pair with the complementary V_{L} and V_{H} domains of another fragment, thereby forming two antigen-binding sites. Another strategy for making bispecific antibody fragments by the use of single-chain Fv (sFv) dimers has also been reported. See, Gruber et al., J. Immunol. 152:5368 (1994). Antibodies with more than two valencies are contemplated. For example, trispecific antibodies can be prepared. Tutt et al., J. Immunol. 147:60 (1991).

[0258] Exemplary bispecific antibodies may bind to two different epitopes on a given PRO polypeptide herein. Alternatively, an anti-PRO polypeptide arm may be combined with an arm which binds to a triggering molecule on a leukocyte such as a T-cell receptor molecule (e.g. CD2, CD3, CD28, or B7), or Fc receptors for IgG (FcγR), such as FcγRI (CD64), FcγRII (CD32) and FcγRIII (CD16) so as to focus cellular defense mechanisms to the cell expressing the particular PRO polypeptide. Bispecific antibodies may also be used to localize cytotoxic agents to cells which express a particular PRO polypeptide. These antibodies possess a PRO-binding arm and an arm which binds a cytotoxic agent or a radionuclide chelator, such as EOTUBE, DPTA, DOTA, or TETA. Another bispecific antibody of interest binds the PRO polypeptide and further binds tissue factor (TF).

[0259] 5. Heteroconjugate Antibodies

[0260] Heteroconjugate antibodies are also within the scope of the present invention. Heteroconjugate antibodies are composed of two covalently joined antibodies. Such antibodies have, for example, been proposed to target immune system cells to unwanted cells [U.S. Pat. No. 4,676,980], and for treatment of HIV infection [WO 91/00360; WO 92/200373; EP 03089]. It is contemplated that the antibodies may be prepared in vitro using known methods in synthetic protein chemistry, including those involving crosslinking agents. For example, immunotoxins may be constructed using a disulfide exchange reaction or by forming a thioether bond. Examples of suitable reagents for this purpose include iminothiolate and methyl-4-mercaptobutyrimidate and those disclosed, for example, in U.S. Pat. No. 4,676,980.

[0261] 6. Effector Function Engineering

[0262] It may be desirable to modify the antibody of the invention with respect to effector function, so as to enhance, e.g., the effectiveness of the antibody in treating cancer. For example, cysteine residue(s) may be introduced into the Fc region, thereby allowing interchain disulfide bond formation in this region. The homodimeric antibody thus generated may have improved internalization capability and/or increased complement-mediated cell killing and antibody-dependent cellular cytotoxicity (ADCC). See Caron et al., J. Exp Med., 176: 1191-1195 (1992) and Shopes, J. Immunol., 148: 2918-2922 (1992). Homodimeric antibodies with enhanced anti-tumor activity may also be prepared using heterobifunctional cross-linkers as described in Wolff et al. Cancer Research, 53: 2560-2565 (1993). Alternatively, an antibody can be engineered that has dual Fc regions and may thereby have enhanced complement lysis and ADCC capabilities. See Stevenson et al., Anti-Cancer Drug Design. 3: 219-230 (1989).

[0263] 7. Immunoconjugates

[0264] The invention also pertains to immunoconjugates comprising an antibody conjugated to a cytotoxic agent such as a chemotherapeutic agent, toxin (e.g., an enzymatically active toxin of bacterial, fungal, plant, or animal origin, or fragments thereof), or a radioactive isotope (i.e., a radioconjugate).

[0265] Chemotherapeutic agents useful in the generation of such immunoconjugates have been described above. Enzymatically active toxins and fragments thereof that can be used include diphtheria A chain, nonbinding active fragments of diphtheria toxin, exotoxin A chain (from Pseudomonas aeruginosa), ricin A chain, abrin A chain, modeccin A chain, alpha-sarcin, Aleurites fordii proteins, dianthin proteins, Phytolaca americana proteins (PAPI, PAPII, and PAP-S), momordica charantia inhibitor, curcin, crotin, sapaonaria officinalis inhibitor, gelonin, mitogellin, restrictocin, phenomycin, enomycin, and the tricothecenes. A variety of radionuclides are available for the production of radioconjugated antibodies. Examples include ²¹²Bi, ¹³¹I, ¹³¹In, ⁹⁰Y, and ¹⁸⁶Re.

[0266] Conjugates of the antibody and cytotoxic agent are made using a variety of bifunctional protein-coupling agents such as N-succinimidyl-3-(2-pyridyldithiol)propionate (SPDP), iminothiolane (IT), bifunctional derivatives of imidoesters (such as dimethyl adipimidate HCL), active esters (such as disuccinimidyl suberate), aldehydes (such as glutareldehyde), bis-azido compounds (such as bis(p-azidobenzoyl)hexanediamine), bis-diazonium derivatives (such as bis-(p-diazoniumbenzoyl)ethylenediamine), diisocyanates (such as tolyene 2,6-diisocyanate), and bis-active fluorine compounds (such as 1,5-difluoro-2,4-dinitrobenzene). For example, a ricin immunotoxin can be prepared as described in Vitetta et al., Science, 238: 1098 (1987). Carbon-14-labeled 1-isothiocyanatobenzyl-3-methyldiethylene triaminepentaacetic acid (MX-DTPA) is an exemplary chelating agent for conjugation of radionucleotide to the antibody. See WO94/11026.

[0267] In another embodiment, the antibody may be conjugated to a “receptor” (such streptavidin) for utilization in tumor pretargeting wherein the antibody-receptor conjugate is administered to the patient, followed by removal of unbound conjugate from the circulation using a clearing agent and then administration of a “ligand” (e.g., avidin) that is conjugated to a cytotoxic agent (e.g., a radionucleotide).

[0268] 8. Immunoliposomes

[0269] The antibodies disclosed herein may also be formulated as immunoliposomes. Liposomes containing the antibody are prepared by methods known in the art, such as described in Epstein et al., Proc. Natl. Acad. Sci. USA, 82: 3688 (1985); Hwang et al., Proc. Natl. Acad. Sci. USA, 77: 4030 (1980); and U.S. Pat. Nos. 4,485,045 and 4,544,545. Liposomes with enhanced circulation time are disclosed in U.S. Pat. No. 5,013,556.

[0270] Particularly useful liposomes can be generated by the reverse-phase evaporation method with a lipid composition comprising phosphatidylcholine, cholesterol, and PEG-derivatized phosphatidylethanolamine (PEG-PE). Liposomes are extruded through filters of defined pore size to yield liposomes with the desired diameter. Fab′ fragments of the antibody of the present invention can be conjugated to the liposomes as described in Martin et al., J. Biol. Chem. 257: 286-288 (1982) via a disulfide-interchange reaction. A chemotherapeutic agent (such as Doxorubicin) is optionally contained within the liposome. See Gabizon et al., J. National Cancer Inst., 81(19): 1484 (1989).

[0271] M. Pharmaceutical Compositions

[0272] The active PRO molecules of the invention (e.g., PRO polypeptides, anti-PRO antibodies, and/or variants of each) as well as other molecules identified by the screening assays disclosed above, can be administered for the treatment of immune related diseases, in the form of pharmaceutical compositions.

[0273] Therapeutic formulations of the active PRO molecule, preferably a polypeptide or antibody of the invention, are prepared for storage by mixing the active molecule having the desired degree of purity with optional pharmaceutically acceptable carriers, excipients or stabilizers (Remington's Pharmaceutical Sciences 16th edition, Osol, A. Ed. [1980]), in the form of lyophilized formulations or aqueous solutions. Acceptable carriers, excipients, or stabilizers are nontoxic to recipients at the dosages and concentrations employed, and include buffers such as phosphate, citrate, and other organic acids; antioxidants including ascorbic acid and methionine; preservatives (such as octadecyldimethylbenzyl ammonium chloride; hexamethonium chloride; benzalkonium chloride, benzethonium chloride; phenol, butyl or benzyl alcohol; alkyl parabens such as methyl or propyl paraben; catechol; resorcinol; cyclohexanol; 3-pentanol; and m-cresol); low molecular weight (less than about 10 residues) polypeptides; proteins, such as serum albumin, gelatin, or immunoglobulins; hydrophilic polymers such as polyvinylpyrrolidone; amino acids such as glycine, glutamine, asparagine, histidine, arginine, or lysine; monosaccharides, disaccharides, and other carbohydrates including glucose, mannose, or dextrins; chelating agents such as EDTA; sugars such as sucrose, mannitol, trehalose or sorbitol; salt-forming counter-ions such as sodium; metal complexes (e.g., Zn-protein complexes); and/or non-ionic surfactants such as TWEEN™, PLURONICS™ or polyethylene glycol (PEG).

[0274] Compounds identified by the screening assays disclosed herein can be formulated in an analogous manner, using standard techniques well known in the art.

[0275] Lipofections or liposomes can also be used to deliver the PRO molecule into cells. Where antibody fragments are used, the smallest inhibitory fragment which specifically binds to the binding domain of the target protein is preferred. For example, based upon the variable region sequences of an antibody, peptide molecules can be designed which retain the ability to bind the target protein sequence. Such peptides can be synthesized chemically and/or produced by recombinant DNA technology (see, e.g., Marasco et al., Proc. Natl. Acad. Sci. USA 90, 7889-7893 [1993]).

[0276] The formulation herein may also contain more than one active compound as necessary for the particular indication being treated, preferably those with complementary activities that do not adversely affect each other. Alternatively, or in addition, the composition may comprise a cytotoxic agent, cytokine or growth inhibitory agent Such molecules are suitably present in combination in amounts that are effective for the purpose intended.

[0277] The active PRO molecules may also be entrapped in microcapsules prepared, for example, by coacervation techniques or by interfacial polymerization, for example, hydroxymethylcellulose or gelatin-microcapsules and poly-(methylmethacylate) microcapsules, respectively, in colloidal drug delivery systems (for example, liposomes, albumin microspheres, microemulsions, nano-particles and nanocapsules) or in macroemulsions. Such techniques are disclosed in Remington's Pharmaceutical Sciences 16th edition, Osol, A. Ed. (1980).

[0278] The formulations to be used for in vivo administration must be sterile. This is readily accomplished by filtration through sterile filtration membranes.

[0279] Sustained-release preparations or the PRO molecules may be prepared. Suitable examples of sustained-release preparations include semipermeable matrices of solid hydrophobic polymers containing the antibody, which matrices are in the form of shaped articles, e.g., films, or microcapsules. Examples of sustained-release matrices include polyesters, hydrogels (for example, poly(2-hydroxyethyl-methacrylate), or poly(vinylalcohol)), polylactides (U.S. Pat. No. 3,773,919), copolymers of L-glutamic acid and γ-ethyl-L-glutamate, non-degradable ethylene-vinyl acetate, degradable lactic acid-glycolic acid copolymers such as the LUPRON DEPOT™ (injectable microspheres composed of lactic acid-glycolic acid copolymer and leuprolide acetate), and poly-D-(−)-3-hydroxybutyric acid. While polymers such as ethylene-vinyl acetate and lactic acid-glycolic acid enable release of molecules for over 100 days, certain hydrogels release proteins for shorter time periods. When encapsulated antibodies remain in the body for a long time, they may denature or aggregate as a result of exposure to moisture at 37° C., resulting in a loss of biological activity and possible changes in immunogenicity. Rational strategies can be devised for stabilization depending on the mechanism involved. For example, if the aggregation mechanism is discovered to be intermolecular S—S bond formation through thio-disulfide interchange, stabilization may be achieved by modifying sulfhydryl residues, lyophilizing from acidic solutions, controlling moisture content, using appropriate additives, and developing specific polymer matrix compositions.

[0280] N. Methods of Treatment

[0281] It is contemplated that the polypeptides, antibodies and other active compounds of the present invention may be used to treat various immune related diseases and conditions, such as T cell mediated diseases, including those characterized by infiltration of inflammatory cells into a tissue, stimulation of T-cell proliferation, inhibition of T-cell proliferation, increased or decreased vascular permeability or the inhibition thereof.

[0282] Exemplary conditions or disorders to be treated with the polypeptides, antibodies and other compounds of the invention, include, but are not limited to systemic lupus erythematosis, rheumatoid arthritis, juvenile chronic arthritis, osteoarthritis, spondyloarthropathies, systemic sclerosis (scleroderma), idiopathic inflammatory myopathies (dermatomyositis, polymyositis), Sjögren's syndrome, systemic vasculitis, sarcoidosis, autoimmune hemolytic anemia (immune pancytopenia, paroxysmal nocturnal hemoglobinuria), autoimmune thrombocytopenia (idiopathic thrombocytopenic purpura, immune-mediated thrombocytopenia), thyroiditis (Grave's disease, Hashimoto's thyroiditis, juvenile lymphocytic thyroiditis, atrophic thyroiditis), diabetes mellitus, immune-mediated renal disease (glomerulonephritis, tubulointerstitial nephritis), demyelinating diseases of the central and peripheral nervous systems such as multiple sclerosis, idiopathic demyelinating polyneuropathy or Guillain-Barré syndrome, and chronic inflammatory demyelinating polyneuropathy, hepatobiliary diseases such as infectious hepatitis (hepatitis A, B, C, D, EB and other non-hepatotropic viruses), autoimmune chronic active hepatitis, primary biliary cirrhosis, granulomatous hepatitis, and sclerosing cholangitis, inflammatory bowel disease (ulcerative colitis: Crohn's disease), gluten-sensitive enteropathy, and Whipple's disease, autoimmune or immune-mediated skin diseases including bullous skin diseases, erythema multiforme and contact dermatitis, psoriasis, allergic diseases such as asthma, allergic rhinitis, atopic dermatitis, food hypersensitivity and urticaria, immunologic diseases of the lung such as eosinophilic pneumonias, idiopathic pulmonary fibrosis and hypersensitivity pneumonitis, transplantation associated diseases including graft rejection and graft-versus-host-disease.

[0283] In systemic lupus erythematosus, the central mediator of disease is the production of auto-reactive antibodies to self proteins/tissues and the subsequent generation of immune-mediated inflammation. Antibodies either directly or indirectly mediate tissue injury. Though T lymphocytes have not been shown to be directly involved in tissue damage, T lymphocytes are required for the development of auto-reactive antibodies. The genesis of the disease is thus T lymphocyte dependent. Multiple organs and systems are affected clinically including kidney, lung, musculoskeletal system, mucocutaneous, eye, central nervous system, cardiovascular system, gastrointestinal tract, bone marrow and blood.

[0284] Rheumatoid arthritis (RA) is a chronic systemic autoimmune inflammatory disease that mainly involves the synovial membrane of multiple joints with resultant injury to the articular cartilage. The pathogenesis is T lymphocyte dependent and is associated with the production of rheumatoid factors, auto-antibodies directed against self IgG, with the resultant formation of immune complexes that attain high levels in joint fluid and blood. These complexes in the joint may induce the marked infiltrate of lymphocytes and monocytes into the synovium and subsequent marked synovial changes; the joint space/fluid if infiltrated by similar cells with the addition of numerous neutrophils. Tissues affected are primarily the joints, often in symmetrical pattern. However, extra-articular disease also occurs in two major forms. One form is the development of extra-articular lesions with ongoing progressive joint disease and typical lesions of pulmonary fibrosis, vasculitis, and cutaneous ulcers. The second form of extra-articular disease is the so called Felty's syndrome which occurs late in the RA disease course, sometimes after joint disease has become quiescent, and involves the presence of neutropenia, thrombocytopenia and splenomegaly. This can be accompanied by vasculitis in multiple organs with formations of infarcts, skin ulcers and gangrene. Patients often also develop rheumatoid nodules in the subcutis tissue overlying affected joints; the nodules late stage have necrotic centers surrounded by a mixed inflammatory cell infiltrate. Other manifestations which can occur in RA include: pericarditis, pleuritis, coronary arteritis, intestitial pneumonitis with pulmonary fibrosis, keratoconjunctivitis sicca, and rhematoid nodules.

[0285] Juvenile chronic arthritis is a chronic idiopathic inflammatory disease which begins often at less than 16 years of age. Its phenotype has some similarities to RA; some patients which are rhematoid factor positive are classified as juvenile rheumatoid arthritis. The disease is sub-classified into three major categories: pauciarticular, polyarticular, and systemic. The arthritis can be severe and is typically destructive and leads to joint ankylosis and retarded growth. Other manifestations can include chronic anterior uveitis and systemic amyloidosis.

[0286] Spondyloarthropathies are a group of disorders with some common clinical features and the common association with the expression of HLA-B27 gene product. The disorders include: ankylosing sponylitis, Reiter's syndrome (reactive arthritis), arthritis associated with inflammatory bowel disease, spondylitis associated with psoriasis, juvenile onset spondyloarthropathy and undifferentiated spondyloarthropathy. Distinguishing features include sacroileitis with or without spondylitis; inflammatory asymmetric arthritis; association with HLA-B27 (a serologically defined allele of the HLA-B locus of class I MHC); ocular inflammation, and absence of autoantibodies associated with other rheumatoid disease. The cell most implicated as key to induction of the disease is the CD8+ T lymphocyte, a cell which targets antigen presented by class I MHC molecules. CD8+ T cells may react against the class I MHC allele HLA-B27 as if it were a foreign peptide expressed by MHC class I molecules. It has been hypothesized that an epitope of HLA-B27 may mimic a bacterial or other microbial antigenic epitope and thus induce a CD8+ T cells response.

[0287] Systemic sclerosis (scleroderma) has an unknown etiology. A hallmark of the disease is induration of the skin; likely this is induced by an active inflammatory process. Scleroderma can be localized or systemic; vascular lesions are common and endothelial cell injury in the microvasculature is an early and important event in the development of systemic sclerosis; the vascular injury may be immune mediated. An immunologic basis is implied by the presence of mononuclear cell infiltrates in the cutaneous lesions and the presence of anti-nuclear antibodies in many patients. ICAM-1 is often upregulated on the cell surface of fibroblasts in skin lesions suggesting that T cell interaction with these cells may have a role in the pathogenesis of the disease. Other organs involved include: the gastrointestinal tract: smooth muscle atrophy and fibrosis resulting in abnormal peristalsis/motility; kidney: concentric subendothelial intimal proliferation affecting small arcuate and interlobular arteries with resultant reduced renal cortical blood flow, results in proteinuria, azotemia and hypertension; skeletal muscle: atrophy, interstitial fibrosis; inflammation; lung: interstitial pneumonitis and interstitial fibrosis; and heart: contraction band necrosis, scarring/fibrosis.

[0288] Idiopathic inflammatory myopathies including dermatomyositis, polymyositis and others are disorders of chronic muscle inflammation of unknown etiology resulting in muscle weakness. Muscle injury/inflammation is often symmetric and progressive. Autoantibodies are associated with most forms. These myositis-specific autoantibodies are directed against and inhibit the function of components, proteins and RNA's, involved in protein synthesis.

[0289] Sjögren's syndrome is due to immune-mediated inflammation and subsequent functional destruction of the tear glands and salivary glands. The disease can be associated with or accompanied by inflammatory connective tissue diseases. The disease is associated with autoantibody production against Ro and La antigens, both of which are small RNA-protein complexes. Lesions result in keratoconjunctivitis sicca, xerostomia, with other manifestations or associations including bilary cirrhosis, peripheral or sensory neuropathy, and palpable purpura.

[0290] Systemic vasculitis are diseases in which the primary lesion is inflammation and subsequent damage to blood vessels which results in ischemia/necrosis/degeneration to tissues supplied by the affected vessels and eventual end-organ dysfunction in some cases. Vasculitides can also occur as a secondary lesion or sequelae to other immune-inflammatory mediated diseases such as rheumatoid arthritis, systemic sclerosis, etc., particularly in diseases also associated with the formation of immune complexes. Diseases in the primary systemic vasculitis group include: systemic necrotizing vasculitis: polyarteritis nodosa, allergic angiitis and granulomatosis, polyangiitis; Wegener's granulomatosis; lymphomatoid granulomatosis; and giant cell arteritis. Miscellaneous vasculitides include: mucocutaneous lymph node syndrome (MLNS or Kawasaki's disease), isolated CNS vasculitis, Behet's disease, thromboangiitis obliterans (Buerger's disease) and cutaneous necrotizing venulitis. The pathogenic mechanism of most of the types of vasculitis listed is believed to be primarily due to the deposition of immunoglobulin complexes in the vessel wall and subsequent induction of an inflammatory response either via ADCC, complement activation, or both.

[0291] Sarcoidosis is a condition of unknown etiology which is characterized by the presence of epithelioid granulomas in nearly any tissue in the body; involvement of the lung is most common. The pathogenesis involves the persistence of activated macrophages and lymphoid cells at sites of the disease with subsequent chronic sequelae resultant from the release of locally and systemically active products released by these cell types.

[0292] Autoimmune hemolytic anemia including autoimmune hemolytic anemia, immune pancytopenia, and paroxysmal noctural hemoglobinuria is a result of production of antibodies that react with antigens expressed on the surface of red blood cells (and in some cases other blood cells including platelets as well) and is a reflection of the removal of those antibody coated cells via complement mediated lysis and/or ADCC/Fc-receptor-mediated mechanisms.

[0293] In autoimmune thrombocytopenia including thrombocytopenic purpura, and immune-mediated thrombocytopenia in other clinical settings, platelet destruction/removal occurs as a result of either antibody or complement attaching to platelets and subsequent removal by complement lysis, ADCC or FC-receptor mediated mechanisms.

[0294] Thyroiditis including Grave's disease, Hashimoto's thyroiditis, juvenile lymphocytic thyroiditis, and atrophic thyroiditis, are the result of an autoimmune response against thyroid antigens with production of antibodies that react with proteins present in and often specific for the thyroid gland. Experimental models exist including spontaneous models: rats (BUF and BB rats) and chickens (obese chicken strain); inducible models: immunization of animals with either thyroglobulin, thyroid microsomal antigen (thyroid peroxidase).

[0295] Type I diabetes mellitus or insulin-dependent diabetes is the autoimmune destruction of pancreatic islet β cells; this destruction is mediated by auto-antibodies and auto-reactive T cells. Antibodies to insulin or the insulin receptor can also produce the phenotype of insulin-non-responsiveness.

[0296] Immune mediated renal diseases, including glomerulonephritis and tubulointerstitial nephritis, are the result of antibody or T lymphocyte mediated injury to renal tissue either directly as a result of the production of autoreactive antibodies or T cells against renal antigens or indirectly as a result of the deposition of antibodies and/or immune complexes in the kidney that are reactive against other, non-renal antigens. Thus other immune-mediated diseases that result in the formation of immune-complexes can also induce immune mediated renal disease as an indirect sequelae. Both direct and indirect immune mechanisms result in inflammatory response that produces/induces lesion development in renal tissues with resultant organ function impairment and in some cases progression to renal failure. Both humoral and cellular immune mechanisms can be involved in the pathogenesis of lesions.

[0297] Demyelinating diseases of the central and peripheral nervous systems, including Multiple Sclerosis; idiopathic demyelinating polyneuropathy or Guillain-Barré syndrome; and Chronic Inflammatory Demyelinating Polyneuropathy, are believed to have an autoimmune basis and result in nerve demyelination as a result of damage caused to oligodendrocytes or to myelin directly. In MS there is evidence to suggest that disease induction and progression is dependent on T lymphocytes. Multiple Sclerosis is a demyelinating disease that is T lymphocyte-dependent and has either a relapsing-remitting course or a chronic progressive course. The etiology is unknown; however, viral infections, genetic predisposition, environment, and autoimmunity all contribute. Lesions contain infiltrates of predominantly T lymphocyte mediated, microglial cells and infiltrating macrophages; CD4+ T lymphocytes are the predominant cell type at lesions. The mechanism of oligodendrocyte cell death and subsequent demyelination is not known but is likely T lymphocyte driven.

[0298] Inflammatory and Fibrotic Lung Disease, including Eosinophilic Pneumonias; Idiopathic Pulmonary Fibrosis, and Hypersensitivity Pneumonitis may involve a disregulated immune-inflammatory response. Inhibition of that response would be of therapeutic benefit.

[0299] Autoimmune or Immune-mediated Skin Disease including Bullous Skin Diseases, Erythema Multiforme, and Contact Dermatitis are mediated by auto-antibodies, the genesis of which is T lymphocyte-dependent.

[0300] Psoriasis is a T lymphocyte-mediated inflammatory disease. Lesions contain infiltrates of T lymphocytes, macrophages and antigen processing cells, and some neutrophils.

[0301] Allergic diseases, including asthma; allergic rhinitis; atopic dermatitis; food hypersensitivity; and urticaria are T lymphocyte dependent These diseases are predominantly mediated by T lymphocyte induced inflammation, IgE mediated-inflammation or a combination of both.

[0302] Transplantation associated diseases, including Graft rejection and Graft-Versus-Host-Disease (GVHD) are T lymphocyte-dependent; inhibition of T lymphocyte function is ameliorative.

[0303] Other diseases in which intervention of the immune and/or inflammatory response have benefit are infectious disease including but not limited to viral infection (including but not limited to AIDS, hepatitis A, B, C, D, E and herpes) bacterial infection, fungal infections, and protozoal and parasitic infections (molecules (or derivatives/agonists) which stimulate the MLR can be utilized therapeutically to enhance the immune response to infectious agents), diseases of immunodeficiency (molecules/derivatives/agonists) which stimulate the MLR can be utilized therapeutically to enhance the immune response for conditions of inherited, acquired, infectious induced (as in HIV infection), or iatrogenic (i.e., as from chemotherapy) immunodeficiency, and neoplasia.

[0304] It has been demonstrated that some human cancer patients develop an antibody and/or T lymphocyte response to antigens on neoplastic cells. It has also been shown in animal models of neoplasia that enhancement of the immune response can result in rejection or regression of that particular neoplasm. Molecules that enhance the T lymphocyte response in the MLR have utility in vivo in enhancing the immune response against neoplasia Molecules which enhance the T lymphocyte proliferative response in the MLR (or small molecule agonists or antibodies that affected the same receptor in an agonistic fashion) can be used therapeutically to treat cancer. Molecules that inhibit the lymphocyte response in the MLR also function in vivo during neoplasia to suppress the immune response to a neoplasm; such molecules can either be expressed by the neoplastic cells themselves or their expression can be induced by the neoplasm in other cells. Antagonism of such inhibitory molecules (either with antibody, small molecule antagonists or other means) enhances immune-mediated tumor rejection.

[0305] Additionally, inhibition of molecules with proinflammatory properties may have therapeutic benefit in reperfusion injury; stroke; myocardial infarction; atherosclerosis; acute lung injury; hemorrhagic shock; burn; sepsis/septic shock; acute tubular necrosis; endometriosis; degenerative joint disease and pancreatis.

[0306] The compounds of the present invention, e.g., polypeptides or antibodies, are administered to a mammal, preferably a human, in accord with known methods, such as intravenous administration as a bolus or by continuous infusion over a period of time, by intramuscular, intraperitoneal, intracerobrospinal, subcutaneous, intra-articular, intrasynovial, intrathecal, oral, topical, or inhalation (intranasal, intrapulmonary) routes. Intravenous or inhaled administration of polypeptides and antibodies is preferred.

[0307] In immunoadjuvant therapy, other therapeutic regimens, such administration of an anti-cancer agent, may be combined with the administration of the proteins, antibodies or compounds of the instant invention. For example, the patient to be treated with a the immunoadjuvant of the invention may also receive an anti-cancer agent (chemotherapeutic agent) or radiation therapy. Preparation and dosing schedules for such chemotherapeutic agents may be used according to manufacturers' instructions or as determined empirically by the skilled practitioner. Preparation and dosing schedules for such chemotherapy are also described in Chemotherapy Service Ed., M. C. Perry, Williams & Wilkins, Baltimore, Md. (1992). The chemotherapeutic agent may precede, or follow administration of the immunoadjuvant or may be given simultaneously therewith. Additionally, an anti-estrogen compound such as tamoxifen or an anti-progesterone such as onapristone (see, EP 616812) may be given in dosages known for such molecules.

[0308] It may be desirable to also administer antibodies against other immune disease associated or tumor associated antigens, such as antibodies which bind to CD20, CD11a, CD18, ErbB2, EGFR, ErbB3, ErbB4, or vascular endothelial factor (VEGF). Alternatively, or in addition, two or more antibodies binding the same or two or more different antigens disclosed herein may be coadministered to the patient. Sometimes, it may be beneficial to also administer one or more cytokines to the patient. In one embodiment, the PRO polypeptides are coadministered with a growth inhibitory agent. For example, the growth inhibitory agent may be administered first, followed by a PRO polypeptide. However, simultaneous administration or administration first is also contemplated. Suitable dosages for the growth inhibitory agent are those presently used and may be lowered due to the combined action (synergy) of the growth inhibitory agent and the PRO polypeptide.

[0309] For the treatment or reduction in the severity of immune related disease, the appropriate dosage of an a compound of the invention will depend on the type of disease to be treated, as defined above, the severity and course of the disease, whether the agent is administered for preventive or therapeutic purposes, previous therapy, the patient's clinical history and response to the compound, and the discretion of the attending physician. The compound is suitably administered to the patient at one time or over a series of treatments.

[0310] For example, depending on the type and severity of the disease, about 1 μg/kg to 15 mg/kg (e.g., 0.1-20 mg/kg) of polypeptide or antibody is an initial candidate dosage for administration to the patient, whether, for example, by one or more separate administrations, or by continuous infusion. A typical daily dosage might range from about 1 μg/kg to 100 mg/kg or more, depending on the factors mentioned above. For repeated administrations over several days or longer, depending on the condition, the treatment is sustained until a desired suppression of disease symptoms occurs. However, other dosage regimens may be useful. The progress of this therapy is easily monitored by conventional techniques and assays.

[0311] O. Articles of Manufacture

[0312] In another embodiment of the invention, an article of manufacture containing materials (e.g., comprising a PRO molecule) useful for the diagnosis or treatment of the disorders described above is provided. The article of manufacture comprises a container and an instruction. Suitable containers include, for example, bottles, vials, syringes, and test tubes. The containers may be formed from a variety of materials such as glass or plastic. The container holds a composition which is effective for diagnosing or treating the condition and may have a sterile access port (for example the container may be an intravenous solution bag or a vial having a stopper pierceable by a hypodermic injection needle). The active agent in the composition is usually a polypeptide or an antibody of the invention. An instruction or label on, or associated with, the container indicates that the composition is used for diagnosing or treating the condition of choice. The article of manufacture may further comprise a second container comprising a pharmaceutically-acceptable buffer, such as phosphate-buffered saline, Ringer's solution and dextrose solution. It may further include other materials desirable from a commercial and user standpoint, including other buffers, diluents, filters, needles, syringes, and package inserts with instructions for use.

[0313] P. Diagnosis and Prognosis of Immune Related Disease

[0314] Cell surface proteins, such as proteins which are overexpressed in certain immune related diseases, are excellent targets for drug candidates or disease treatment. The same proteins along with secreted proteins encoded by the genes amplified in immune related disease states find additional use in the diagnosis and prognosis of these diseases. For example, antibodies directed against the protein products of genes amplified in multiple sclerosis, rheumatoid arthritis, or another immune related disease, can be used as diagnostics or prognostics.

[0315] For example, antibodies, including antibody fragments, can be used to qualitatively or quantitatively detect the expression of proteins encoded by amplified or overexpressed genes (“marker gene products”). The antibody preferably is equipped with a detectable, e.g., fluorescent label, and binding can be monitored by light microscopy, flow cytometry, fluorimetry, or other techniques known in the art. These techniques are particularly suitable, if the overexpressed gene encodes a cell surface protein Such binding assays are performed essentially as described above.

[0316] In situ detection of antibody binding to the marker gene products can be performed, for example, by immunofluorescence or immunoelectron microscopy. For this purpose, a histological specimen is removed from the patient, and a labeled antibody is applied to it, preferably by overlaying the antibody on a biological sample. This procedure also allows for determining the distribution of the marker gene product in the tissue examined. It will be apparent for those skilled in the art that a wide variety of histological methods are readily available for in situ detection.

[0317] The following examples are offered for illustrative purposes only, and are not intended to limit the scope of the present invention in any way.

[0318] All patent and literature references cited in the present specification are hereby incorporated by reference in their entirety.

### EXAMPLES

[0319] Commercially available reagents referred to in the examples were used according to manufacturer's instructions unless otherwise indicated. The source of those cells identified in the following examples, and throughout the specification, by ATCC accession numbers is the American Type Culture Collection, Manassas, Va.

### Example 1

### Microarray Analysis of Stimulated T-Cells

[0320] Nucleic acid microarrays, often containing thousands of gene sequences, are useful for identifying differentially expressed genes in diseased tissues as compared to their normal counterparts. Using nucleic acid microarrays, test and control mRNA samples from test and control tissue samples are reverse transcribed and labeled to generate cDNA probes. The cDNA probes are then hybridized to an array of nucleic acids immobilized on a solid support. The array is configured such that the sequence and position of each member of the array is known. For example, a selection of genes known to be expressed in certain disease states may be arrayed on a solid support Hybridization of a labeled probe with a particular array member indicates that the sample from which the probe was derived expresses that gene. If the hybridization signal of a probe from a test (in this instance, activated CD4+ T cells) sample is greater than hybridization signal of a probe from a control (in this instance, non-stimulated CD4+ T cells) sample, the gene or genes overexpressed in the test tissue are identified. The implication of this result is that an overexpressed protein in a test tissue is useful not only as a diagnostic marker for the presence of the disease condition, but also as a therapeutic target for treatment of the disease condition.

[0321] The methodology of hybridization of nucleic acids and microarray technology is well known in the art In one example, the specific preparation of nucleic acids for hybridization and probes, slides, and hybridization conditions are all detailed in PCT Patent Application Serial No. PCT/US01/10482, filed on Mar. 30, 2001 and which is herein incorporated by reference.

[0322] In this experiment, CD4+ T cells were purified from a single donor using the RossetteSep™ protocol from (Stem Cell Technologies, Vancouver BC) which contains anti-CD8, anti-CD16, anti-CD19, anti-CD36 and anti-CD56 antibodies used to produce a population of isolated CD4+ T cells. Isolated CD4+ T cells were activated with an anti-CD3 antibody (used at a concentration that does not stimulate proliferation) together with either ICAM-1 or anti-CD28 antibody. At 24 or 72 hours cells were harvested, RNA extracted and analysis run on Affimax (Affymetrix Inc. Santa Clara, Calif.) microarray chips. Non-stimulated (resting) cells were harvested immediately after purification, and subjected to the same analysis. Genes were compared whose expression was upregulated at either of the two timepoints in activated vs. resting cells.

[0323] Below are the results of these experiments, demonstrating that various PRO polypeptides of the present invention are differentially expressed in isolated CD4+ T cells activated by anti-CD3/ICAM-1 or anti-CD3/anti-CD28 as compared to isolated resting CD4+ T cells. As described above, these data demonstrate that the PRO polypeptides of the present invention are useful not only as diagnostic markers for the presence of one or more immune disorders, but also serve as therapeutic targets for the treatment of those immune disorders.

[0324] The results of this experment are FIGS. 1-7589 show increase or decrease in expression upon stimulation with anti-CD3/ICAM1 and also show increase or decrease in expression upon stimulation with anti-CD3/anti-CD28. The nucleic acids and encoded proteins of FIG. 946, FIG. 1520, FIG. 1574, FIG. 1622, FIG. 1816, FIG. 2433, FIG. 2986, FIG. 3220, FIG. 4120 and FIG. 5421 are significantly overexpressed in isolated CD4+ T cells activated by anti-CD3/ICAM-1 or anti-CD3/anti-CD28 as compared to isolated resting CD4+ T cells.

### Example 2

### Use of PRO as a Hybridization Probe

[0325] The following method describes use of a nucleotide sequence encoding PRO as a hybridization probe.

[0326] DNA comprising the coding sequence of full-length or mature PRO as disclosed herein is employed as a probe to screen for homologous DNAs (such as those encoding naturally-occurring variants of PRO) in human tissue cDNA libraries or human tissue genomic libraries.

[0327] Hybridization and washing of filters containing either library DNAs is performed under the following high stringency conditions. Hybridization of radiolabeled PRO-derived probe to the filters is performed in a solution of 50% formamide, 5×SSC, 0.1% SDS, 0.1% sodium pyrophosphate, 50 mM sodium phosphate, pH 6.8, 2× Denhardt's solution, and 10% dextran sulfate at 42° C. for 20 hours. Washing of the filters is performed in an aqueous solution of 0.1×SSC and 0.1% SDS at 42° C.

[0328] DNAs having a desired sequence identity with the DNA encoding full-length native sequence PRO can then be identified using standard techniques known in the art.

### Example 3

### Expression of PRO in E. coli

[0329] This example illustrates preparation of an unglycosylated form of PRO by recombinant expression in E. coli.

[0330] The DNA sequence encoding PRO is initially amplified using selected PCR primers. The primers should contain restriction enzyme sites which correspond to the restriction enzyme sites on the selected expression vector. A variety of expression vectors may be employed. An example of a suitable vector is pBR322 (derived from E. coli; see Bolivar et al., Gene, 2:95 (1977)) which contains genes for ampicillin and tetracycline resistance. The vector is digested with restriction enzyme and dephosphorylated. The PCR amplified sequences are then ligated into the vector. The vector will preferably include sequences which encode for an antibiotic resistance gene, a trp promoter, a polyhis leader (including the first six STII codons, polyhis sequence, and enterokinase cleavage site), the PRO coding region, lambda transcriptional terminator, and an argU gene.

[0331] The ligation mixture is then used to transform a selected E. coli strain using the methods described in Sambrook et al., supra. Transformants are identified by their ability to grow on LB plates and antibiotic resistant colonies are then selected. Plasmid DNA can be isolated and confirmed by restriction analysis and DNA sequencing.

[0332] Selected clones can be grown overnight in liquid culture medium such as LB broth supplemented with antibiotics. The overnight culture may subsequently be used to inoculate a larger scale culture. The cells are then grown to a desired optical density, during which the expression promoter is turned on.

[0333] After culturing the cells for several more hours, the cells can be harvested by centrifugation. The cell pellet obtained by the centrifugation can be solubilized using various agents known in the art, and the solubilized PRO protein can then be purified using a metal chelating column under conditions that allow tight binding of the protein.

[0334] PRO may be expressed in E. coli in a poly-His tagged form, using the following procedure. The DNA encoding PRO is initially amplified using selected PCR primers. The primers will contain restriction enzyme sites which correspond to the restriction enzyme sites on the selected expression vector, and other useful sequences providing for efficient and reliable translation initiation, rapid purification on a metal chelation column, and proteolytic removal with enterokinase. The PCR-amplified, poly-His tagged sequences are then ligated into an expression vector, which is used to transform an E. coli host based on strain 52 (W3110 fuhA(tonA) lon galE rpoHts(htpRts) clpP(lacIq). Transformants are first grown in LB containing 50 mg/ml carbenicillin at 30° C. with shaking until an O.D.600 of 3-5 is reached. Cultures are then diluted 50-100 fold into CRAP media (prepared by mixing 3.57 g (NH₄)₂SO₄, 0.71 g sodium citrate•2H2O, 1.07 g KCl, 5.36 g Difco yeast extract, 5.36 g Sheffield hycase SF in 500 mL water, as well as 110 mM MPOS, pH 7.3, 0.55% (w/v) glucose and 7 mM MgSO₄) and grown for approximately 20-30 hours at 30° C. with shaking. Samples are removed to verify expression by SDS-PAGE analysis, and the bulk culture is centrifuged to pellet the cells. Cell pellets are frozen until purification and refolding.

[0335] E. coli paste from 0.5 to 1 L fermentations (6-10 g pellets) is resuspended in 10 volumes (w/v) in 7 M guanidine, 20 mM Tris, pH 8 buffer. Solid sodium sulfite and sodium tetrathionate is added to make final concentrations of 0.1M and 0.02 M, respectively, and the solution is stirred overnight at 4° C. This step results in a denatured protein with all cysteine residues blocked by sulfitolization. The solution is centrifuged at 40,000 rpm in a Beckman Ultracentifuge for 30 min. The supernatant is diluted with 3-5 volumes of metal chelate column buffer (6 M guanidine, 20 mM Tris, pH 7.4) and filtered through 0.22 micron filters to clarify. The clarified extract is loaded onto a 5 ml Qiagen Ni-NTA metal chelate column equilibrated in the metal chelate column buffer. The column is washed with additional buffer containing 50 mM imidazole (Calbiochem, Utrol grade), pH 7.4. The protein is eluted with buffer containing 250 mM imidazole. Fractions containing the desired protein are pooled and stored at 4° C. Protein concentration is estimated by its absorbance at 280 nm using the calculated extinction coefficient based on its amino acid sequence.

[0336] The proteins are refolded by diluting the sample slowly into freshly prepared refolding buffer consisting of: 20 mM Tris, pH 8.6, 0.3 M NaCl, 2.5 M urea, 5 mM cysteine, 20 mM glycine and 1 mM EDTA. Refolding volumes are chosen so that the final protein concentration is between 50 to 100 micrograms/ml. The refolding solution is stirred gently at 4° C. for 12-36 hours. The refolding reaction is quenched by the addition of TFA to a final concentration of 0.4% (pH of approximately 3). Before further purification of the protein, the solution is filtered through a 0.22 micron filter and acetonitrile is added to 2-10% final concentration. The refolded protein is chromatographed on a Poros R1/H reversed phase column using a mobile buffer of 0.1% TFA with elution with a gradient of acetonitrile from 10 to 80%. Aliquots of fractions with A280 absorbance are analyzed on SDS polyacrylamide gels and fractions containing homogeneous refolded protein are pooled. Generally, the properly refolded species of most proteins are eluted at the lowest concentrations of acetonitrile since those species are the most compact with their hydrophobic interiors shielded from interaction with the reversed phase resin. Aggregated species are usually eluted at higher acetonitrile concentrations. In addition to resolving misfolded forms of proteins from the desired form, the reversed phase step also removes endotoxin from the samples.

[0337] Fractions containing the desired folded PRO polypeptide are pooled and the acetonitrile removed using a gentle stream of nitrogen directed at the solution. Proteins are formulated into 20 mM Hepes, pH 6.8 with 0.14 M sodium chloride and 4% mannitol by dialysis or by gel filtration using G25 Superfine (Pharmacia) resins equilibrated in the formulation buffer and sterile filtered.

[0338] Many of the PRO polypeptides disclosed herein were successfully expressed as described above.

### Example 4

### Expression of PRO in Mammalian Cells

[0339] This example illustrates preparation of a potentially glycosylated form of PRO by recombinant expression in mammalian cells.

[0340] The vector, pRK5 (see EP 307,247, published Mar. 15, 1989), is employed as the expression vector. Optionally, the PRO DNA is ligated into pRK5 with selected restriction enzymes to allow insertion of the PRO DNA using ligation methods such as described in Sambrook et al., supra. The resulting vector is called pRK5-PRO.

[0341] In one embodiment, the selected host cells may be 293 cells. Human 293 cells (ATCC CCL 1573) are grown to confluence in tissue culture plates in medium such as DMEM supplemented with fetal calf serum and optionally, nutrient components and/or antibiotics. About 10 μg pRK5-PRO DNA is mixed with about 1 μg DNA encoding the VA RNA gene [Thimmappaya et al., Cell. 31:543 (1982)] and dissolved in 500 μl of 1 mM Tris-HCl, 0.1 mM EDTA, 0.227 M CaCl₂. To this mixture is added, dropwise, 500 μl of 50 mM HEPES (pH 7.35), 280 mM NaCl, 1.5 mM NaPO₄, and a precipitate is allowed to form for 10 minutes at 25° C. The precipitate is suspended and added to the 293 cells and allowed to settle for about four hours at 37° C. The culture medium is aspirated off and 2 ml of 20% glycerol in PBS is added for 30 seconds. The 293 cells are then washed with serum free medium, fresh medium is added and the cells are incubated for about 5 days.

[0342] Approximately 24 hours after the transfections, the culture medium is removed and replaced with culture medium (alone) or culture medium containing 200 μCi/ml ³⁵S-cysteine and 200 μCi/ml ³⁵S-methionine. After a 12 hour incubation, the conditioned medium is collected, concentrated on a spin filter, and loaded onto a 15% SDS gel. The processed gel may be dried and exposed to film for a selected period of time to reveal the presence of PRO polypeptide. The cultures containing transfected cells may undergo further incubation (in serum free medium) and the medium is tested in selected bioassays.

[0343] In an alternative technique, PRO may be introduced into 293 cells transiently using the dextran sulfate method described by Somparyrac et al., Proc. Natl. Acad. Sci., 12:7575 (1981). 293 cells are grown to maximal density in a spinner flask and 700 μg pRK5-PRO DNA is added. The cells are first concentrated from the spinner flask by centrifugation and washed with PBS. The DNA-dextran precipitate is incubated on the cell pellet for four hours. The cells are treated with 20% glycerol for 90 seconds, washed with tissue culture medium, and re-introduced into the spinner flask containing tissue culture medium, 5 μg/ml bovine insulin and 0.1 μg/ml bovine transferrin. After about four days, the conditioned media is centrifuged and filtered to remove cells and debris. The sample containing expressed PRO can then be concentrated and purified by any selected method, such as dialysis and/or column chromatography.

[0344] In another embodiment, PRO can be expressed in CHO cells. The pRK5-PRO can be transfected into CHO cells using known reagents such as CaPO₄ or DEAE-dextran. As described above, the cell cultures can be incubated, and the medium replaced with culture medium (alone) or medium containing a radiolabel such as ³⁵S-methionine. After determining the presence of PRO polypeptide, the culture medium may be replaced with serum free medium. Preferably, the cultures are incubated for about 6 days, and then the conditioned medium is harvested. The medium containing the expressed PRO can then be concentrated and purified by any selected method.

[0345] Epitope-tagged PRO may also be expressed in host CHO cells. The PRO may be subcloned out of the pRK5 vector. The subclone insert can undergo PCR to fuse in frame with a selected epitope tag such as a poly-his tag into a Baculovirus expression vector. The poly-his tagged PRO insert can then be subcloned into a SV40 promoter/enhancer containing vector containing a selection marker such as DHFR for selection of stable clones. Finally, the CHO cells can be transfected (as described above) with the SV40 promoter/enhancer containing vector. Labeling may be performed, as described above, to verify expression. The culture medium containing the expressed poly-His tagged PRO can then be concentrated and purified by any selected method, such as by Ni²⁺-chelate affinity chromatography.

[0346] PRO may also be expressed in CHO and/or COS cells by a transient expression procedure or in CHO cells by another stable expression procedure.

[0347] Stable expression in CHO cells is performed using the following procedure. The proteins are expressed as an IgG construct (immunoadhesin), in which the coding sequences for the soluble forms (e.g. extracellular domains) of the respective proteins are fused to an IgG1 constant region sequence containing the hinge, CH2 and CH2 domains and/or is a poly-His tagged form.

[0348] Following PCR amplification, the respective DNAs are subcloned in a CHO expression vector using standard techniques as described in Ausubel et al., Current Protocols of Molecular Biology, Unit 3.16, John Wiley and Sons (1997). CHO expression vectors are constructed to have compatible restriction sites 5′ and 3′ of the DNA of interest to allow the convenient shuttling of cDNA's. The vector used expression in CHO cells is as described in Lucas et al., Nucl. Acids Res. 24:9 (1774-1779 (1996), and uses the SV40 early promoter/enhancer to drive expression of the cDNA of interest and dihydrofolate reductase (DHFR). DHFR expression permits selection for stable maintenance of the plasmid following transfection.

[0349] Twelve micrograms of the desired plasmid DNA is introduced into approximately 10 million CHO cells using commercially available transfection reagents Superfect® (Quiagen), Dosper® or Fugene® (Boehringer Mannheim). The cells are grown as described in Lucas et al., supra Approximately 3×10⁻⁷ cells are frozen in an ampule for further growth and production as described below.

[0350] The ampules containing the plasmid DNA are thawed by placement into water bath and mixed by vortexing. The contents are pipetted into a centrifuge tube containing 10 mL of media and centrifuged at 1000 rpm for 5 minutes. The supernatant is aspirated and the cells are resuspended in 10 mL of selective media (0.2 μm filtered PS20 with 5% 0.2 μm diafiltered fetal bovine serum). The cells are then aliquoted into a 100 mL spinner containing 90 mL of selective media. After 1-2 days, the cells are transferred into a 250 mL spinner filled with 150 mL selective growth medium and incubated at 37° C. After another 2-3 days, 250 mL, 500 mL and 2000 mL spinners are seeded with 3×10⁵ cells/mL. The cell media is exchanged with fresh media by centrifugation and resuspension in production medium. Although any suitable CHO media may be employed, a production medium described in U.S. Pat. No. 5,122,469, issued Jun. 16, 1992 may actually be used. A 3 L production spinner is seeded at 1.2×10⁶ cells/mL. On day 0, pH is determined. On day 1, the spinner is sampled and sparging with filtered air is commenced. On day 2, the spinner is sampled, the temperature shifted to 33° C., and 30 mL of 500 g/L glucose and 0.6 mL of 10% antifoam (e.g., 35% polydimethylsiloxane emulsion, Dow Corning 365 Medical Grade Emulsion) taken. Throughout the production, the pH is adjusted as necessary to keep it at around 7.2. After 10 days, or until the viability dropped below 70%, the cell culture is harvested by centrifugation and filtering through a 0.22 μm filter. The filtrate was either stored at 4° C. or immediately loaded onto columns for purification.

[0351] For the poly-His tagged constructs, the proteins are purified using a Ni-NTA column (Qiagen). Before purification, imidazole is added to the conditioned media to a concentration of 5 mM. The conditioned media is pumped onto a 6 ml Ni-NTA column equilibrated in 20 mM Hepes, pH 7.4, buffer containing 0.3 M NaCl and 5 mM imidazole at a flow rate of 4-5 ml/min. at 4° C. After loading, the column is washed with additional equilibration buffer and the protein eluted with equilibration buffer containing 0.25 M imidazole. The highly purified protein is subsequently desalted into a storage buffer containing 10 mM Hepes, 0.14 M NaCl and 4% mannitol, pH 6.8, with a 25 ml G25 Superfine (Pharmacia) column and stored at −80° C.

[0352] Immunoadhesin (Fc-containing) constructs are purified from the conditioned media as follows. The conditioned medium is pumped onto a 5 ml Protein A column (Pharmacia) which had been equilibrated in 20 mM Na phosphate buffer, pH 6.8. After loading, the column is washed extensively with equilibration buffer before elution with 100 mM citric acid, pH 3.5. The eluted protein is immediately neutralized by collecting 1 ml fractions into tubes containing 275 μl of 1 M Tris buffer, pH 9. The highly purified protein is subsequently desalted into storage buffer as described above for the poly-His tagged proteins. The homogeneity is assessed by SDS polyacrylamide gels and by N-terminal amino acid sequencing by Edman degradation.

[0353] Many of the PRO polypeptides disclosed herein were successfully expressed as described above.

### Example 5

### Expression of PRO in Yeast

[0354] The following method describes recombinant expression of PRO in yeast.

[0355] First, yeast expression vectors are constructed for intracellular production or secretion of PRO from the ADH2/GAPDH promoter. DNA encoding PRO and the promoter is inserted into suitable restriction enzyme sites in the selected plasmid to direct intracellular expression of PRO. For secretion, DNA encoding PRO can be cloned into the selected plasmid, together with DNA encoding the ADH2/GAPDH promoter, a native PRO signal peptide or other mammalian signal peptide, or, for example, a yeast alpha-factor or invertase secretory signal/leader sequence, and linker sequences (if needed) for expression of PRO.

[0356] Yeast cells, such as yeast strain AB110, can then be transformed with the expression plasmids described above and cultured in selected fermentation media. The transformed yeast supernatants can be analyzed by precipitation with 10% trichloroacetic acid and separation by SDS-PAGE, followed by staining of the gels with Coomassie Blue stain.

[0357] Recombinant PRO can subsequently be isolated and purified by removing the yeast cells from the fermentation medium by centrifugation and then concentrating the medium using selected cartridge filters. The concentrate containing PRO may further be purified using selected column chromatography resins.

[0358] Many of the PRO polypeptides disclosed herein were successfully expressed as described above.

### Example 6

### Expression of PRO in Baculovirus-Infected Insect Cells

[0359] The following method describes recombinant expression of PRO in Baculovirus-infected insect cells.

[0360] The sequence coding for PRO is fused upstream of an epitope tag contained within a baculovirus expression vector. Such epitope tags include poly-his tags and immunoglobulin tags (like Fc regions of IgG). A variety of plasmids may be employed, including plasmids derived from commercially available plasmids such as pVL1393 (Novagen). Briefly, the sequence encoding PRO or the desired portion of the coding sequence of PRO such as the sequence encoding the extracellular domain of a transmembrane protein or the sequence encoding the mature protein if the protein is extracellular is amplified by PCR with primers complementary to the 5′ and 3′ regions. The 5′ primer may incorporate flanking (selected) restriction enzyme sites. The product is then digested with those selected restriction enzymes and subcloned into the expression vector.

[0361] Recombinant baculovirus is generated by co-transfecting the above plasmid and BaculoGold™ virus DNA (Pharmingen) into Spodoptera frugiperda (“Sf9”) cells (ATCC CRL 1711) using lipofectin (commercially available from GIBCO-BRL). After 4-5 days of incubation at 28° C., the released viruses are harvested and used for further amplifications. Viral infection and protein expression are performed as described by O'Reilley et al., Baculovirus expression vectors: A Laboratory Manual, Oxford: Oxford University Press (1994).

[0362] Expressed poly-his tagged PRO can then be purified, for example, by Ni²⁺-chelate affinity chromatography as follows. Extracts are prepared from recombinant virus-infected Sf9 cells as described by Rupert et al., Nature, 362:175-179 (1993). Briefly, Sf9 cells are washed, resuspended in sonication buffer (25 mL Hepes, pH 7.9; 12.5 mM MgCl₂; 0.1 mM EDTA; 10% glycerol; 0.1% NP-40; 0.4 M KCl), and sonicated twice for 20 seconds on ice. The sonicates are cleared by centrifugation, and the supernatant is diluted 50-fold in loading buffer (50 mM phosphate, 300 mM NaCl, 10% glycerol, pH 7.8) and filtered through a 0.45 μm filter. A Ni²⁺-NTA agarose column (commercially available from Qiagen) is prepared with a bed volume of 5 mL, washed with 25 mL of water and equilibrated with 25 mL of loading buffer. The filtered cell extract is loaded onto the column at 0.5 mL per minute. The column is washed to baseline A₂₈₀ with loading buffer, at which point fraction collection is started. Next, the column is washed with a secondary wash buffer (50 mM phosphate; 300 mM NaCl, 10% glycerol, pH 6.0), which elutes nonspecifically bound protein. After reaching A₂₈₀ baseline again, the column is developed with a 0 to 500 mM Imidazole gradient in the secondary wash buffer. One mL fractions are collected and analyzed by SDS-PAGE and silver staining or Western blot with Ni²⁺-NTA-conjugated to alkaline phosphatase (Qiagen). Fractions containing the eluted His₁₀-tagged PRO are pooled and dialyzed against loading buffer.

[0363] Alternatively, purification of the IgG tagged (or Fc tagged) PRO can be performed using known chromatography techniques, including for instance, Protein A or protein G column chromatography.

[0364] Many of the PRO polypeptides disclosed herein were successfully expressed as described above.

### Example 7

### Preparation of Antibodies that Bind PRO

[0365] This example illustrates preparation of monoclonal antibodies which can specifically bind PRO.

[0366] Techniques for producing the monoclonal antibodies are known in the art and are described, for instance, in Goding, supra Immunogens that may be employed include purified PRO, fusion proteins containing PRO, and cells expressing recombinant PRO on the cell surface. Selection of the immunogen can be made by the skilled artisan without undue experimentation.

[0367] Mice, such as Balb/c, are immunized with the PRO immunogen emulsified in complete Freund's adjuvant and injected subcutaneously or intraperitoneally in an amount from 1-100 micrograms. Alternatively, the immunogen is emulsified in MPL-TDM adjuvant (Ribi Immunochemical Research, Hamilton, Mont.) and injected into the animal's hind foot pads. The immunized mice are then boosted 10 to 12 days later with additional immunogen emulsified in the selected adjuvant. Thereafter, for several weeks, the mice may also be boosted with additional immunization injections. Serum samples may be periodically obtained from the mice by retro-orbital bleeding for testing in ELISA assays to detect anti-PRO antibodies.

[0368] After a suitable antibody titer has been detected, the animals “positive” for antibodies can be injected with a final intravenous injection of PRO. Three to four days later, the mice are sacrificed and the spleen cells are harvested. The spleen cells are then fused (using 35% polyethylene glycol) to a selected murine myeloma cell line such as P3X63AgU.1, available from ATCC, No. CRL 1597. The fusions generate hybridoma cells which can then be plated in 96 well tissue culture plates containing HAT (hypoxanthine, aminopterin, and thymidine) medium to inhibit proliferation of non-fused cells, myeloma hybrids, and spleen cell hybrids.

[0369] The hybridoma cells will be screened in an ELISA for reactivity against PRO. Determination of “positive” hybridoma cells secreting the desired monoclonal antibodies against PRO is within the skill in the art.

[0370] The positive hybridoma cells can be injected intraperitoneally into syngeneic Balb/c mice to produce ascites containing the anti-PRO monoclonal antibodies. Alternatively, the hybridoma cells can be grown in tissue culture flasks or roller bottles. Purification of the monoclonal antibodies produced in the ascites can be accomplished using ammonium sulfate precipitation, followed by gel exclusion chromatography. Alternatively, affinity chromatography based upon binding of antibody to protein A or protein G can be employed.

### Example 8

### Purification of PRO Polypeptides Using Specific Antibodies

[0371] Native or recombinant PRO polypeptides may be purified by a variety of standard techniques in the art of protein purification. For example, pro-PRO polypeptide, mature PRO polypeptide, or pre-PRO polypeptide is purified by immunoaffinity chromatography using antibodies specific for the PRO polypeptide of interest. In general, an immunoaffinity column is constructed by covalently coupling the anti-PRO polypeptide antibody to an activated chromatographic resin.

[0372] Polyclonal immunoglobulins are prepared from immune sera either by precipitation with ammonium sulfate or by purification on immobilized Protein A (Pharmacia LKB Biotechnology, Piscataway, N.J.). Likewise, monoclonal antibodies are prepared from mouse ascites fluid by ammonium sulfate precipitation or chromatography on immobilized Protein A. Partially purified immunoglobulin is covalently attached to a chromatographic resin such as CnBr-activated SEPHAROSE™ (Pharmacia LKB Biotechnology). The antibody is coupled to the resin, the resin is blocked, and the derivative resin is washed according to the manufacturer's instructions.

[0373] Such an immunoaffinity column is utilized in the purification of PRO polypeptide by preparing a fraction from cells containing PRO polypeptide in a soluble form. This preparation is derived by solubilization of the whole cell or of a subcellular fraction obtained via differential centrifugation by the addition of detergent or by other methods well known in the art Alternatively, soluble PRO polypeptide containing a signal sequence may be secreted in useful quantity into the medium in which the cells are grown.

[0374] A soluble PRO polypeptide-containing preparation is passed over the immunoaffinity column, and the column is washed under conditions that allow the preferential absorbance of PRO polypeptide (e.g., high ionic strength buffers in the presence of detergent). Then, the column is eluted under conditions that disrupt antibody/PRO polypeptide binding (e.g., a low pH buffer such as approximately pH 2-3, or a high concentration of a chaotrope such as urea or thiocyanate ion), and PRO polypeptide is collected.

### Example 9

### Drug Screening

[0375] This invention is particularly useful for screening compounds by using PRO polypeptides or binding fragment thereof in any of a variety of drug screening techniques. The PRO polypeptide or fragment employed in such a test may either be free in solution, affixed to a solid support, borne on a cell surface, or located intracellularly. One method of drug screening utilizes eukaryotic or prokaryotic host cells which are stably transformed with recombinant nucleic acids expressing the PRO polypeptide or fragment. Drugs are screened against such transformed cells in competitive binding assays. Such cells, either in viable or fixed form, can be used for standard binding assays. One may measure, for example, the formation of complexes between PRO polypeptide or a fragment and the agent being tested. Alternatively, one can examine the diminution in complex formation between the PRO polypeptide and its target cell or target receptors caused by the agent being tested.

[0376] Thus, the present invention provides methods of screening for drugs or any other agents which can affect a PRO polypeptide-associated disease or disorder. These methods comprise contacting such an agent with an PRO polypeptide or fragment thereof and assaying (I) for the presence of a complex between the agent and the PRO polypeptide or fragment, or (ii) for the presence of a complex between the PRO polypeptide or fragment and the cell, by methods well known in the art. In such competitive binding assays, the PRO polypeptide or fragment is typically labeled. After suitable incubation, free PRO polypeptide or fragment is separated from that present in bound form, and the amount of free or uncomplexed label is a measure of the ability of the particular agent to bind to PRO polypeptide or to interfere with the PRO polypeptide/cell complex.

[0377] Another technique for drug screening provides high throughput screening for compounds having suitable binding affinity to a polypeptide and is described in detail in WO 84/03564, published on Sep. 13, 1984. Briefly stated, large numbers of different small peptide test compounds are synthesized on a solid substrate, such as plastic pins or some other surface. As applied to a PRO polypeptide, the peptide test compounds are reacted with PRO polypeptide and washed. Bound PRO polypeptide is detected by methods well known in the art. Purified PRO polypeptide can also be coated directly onto plates for use in the aforementioned drug screening techniques. In addition, non-neutralizing antibodies can be used to capture the peptide and immobilize it on the solid support.

[0378] This invention also contemplates the use of competitive drug screening assays in which neutralizing antibodies capable of binding PRO polypeptide specifically compete with a test compound for binding to PRO polypeptide or fragments thereof. In this manner, the antibodies can be used to detect the presence of any peptide which shares one or more antigenic determinants with PRO polypeptide.

### Example 10

### Rational Drug Design

[0379] The goal of rational drug design is to produce structural analogs of biologically active polypeptide of interest (i.e., a PRO polypeptide) or of small molecules with which they interact, e.g., agonists, antagonists, or inhibitors. Any of these examples can be used to fashion drugs which are more active or stable forms of the PRO polypeptide or which enhance or interfere with the function of the PRO polypeptide in vivo (c.f., Hodgson, Bio/Technology, 9: 19-21 (1991)).

[0380] In one approach, the three-dimensional structure of the PRO polypeptide, or of a PRO polypeptide-inhibitor complex, is determined by x-ray crystallography, by computer modeling or, most typically, by a combination of the two approaches. Both the shape and charges of the PRO polypeptide must be ascertained to elucidate the structure and to determine active site(s) of the molecule. Less often, useful information regarding the structure of the PRO polypeptide may be gained by modeling based on the structure of homologous proteins. In both cases, relevant structural information is used to design analogous PRO polypeptide-like molecules or to identify efficient inhibitors. Useful examples of rational drug design may include molecules which have improved activity or stability as shown by Braxton and Wells, Biochemistry, 31:7796-7801 (1992) or which act as inhibitors, agonists, or antagonists of native peptides as shown by Athauda et al., J. Biochem., 113:742-746 (1993).

[0381] It is also possible to isolate a target-specific antibody, selected by functional assay, as described above, and then to solve its crystal structure. This approach, in principle, yields a pharmacore upon which subsequent drug design can be based. It is possible to bypass protein crystallography altogether by generating anti-idiotypic antibodies (anti-ids) to a functional, pharmacologically active antibody. As a mirror image of a mirror image, the binding site of the anti-ids would be expected to be an analog of the original receptor. The anti-id could then be used to identify and isolate peptides from banks of chemically or biologically produced peptides. The isolated peptides would then act as the pharmacore.

[0382] By virtue of the present invention, sufficient amounts of the PRO polypeptide may be made available to perform such analytical studies as X-ray crystallography. In addition, knowledge of the PRO polypeptide amino acid sequence provided herein will provide guidance to those employing computer modeling techniques in place of or in addition to x-ray crystallography.

[0383] The foregoing written specification is considered to be sufficient to enable one skilled in the art to practice the invention. The present invention is not to be limited in scope by the construct deposited, since the deposited embodiment is intended as a single illustration of certain aspects of the invention and any constructs that are functionally equivalent are within the scope of this invention. The deposit of material herein does not constitute an admission that the written description herein contained is inadequate to enable the practice of any aspect of the invention, including the best mode thereof, nor is it to be construed as limiting the scope of the claims to the specific illustrations that it represents. Indeed, various modifications of the invention in addition to those shown and described herein will become apparent to those skilled in the art from the foregoing description and fall within the scope of the appended claims.

The application's sequence listing, which the Patent Office published only in electronic form, follows.

SEQUENCE LISTING (6621 sequences)

SEQ ID NO: 1 - DNA, 568 bp, Homo sapien
gaaccgccatcttccagtaattcgccaaaatgacgaacacaaagggaaagaggagaggcacccgatatatgttctctaggccttttagaaaacatggagttgttcctttggccacatatatgcgaatctataagaaaggtgatattgtagacatcaagggaatgggtactgttcaaaaaggaatgccccacaagtgttaccatggcaaaactggaagagtctacaatgttacccagcatgctgttggcattgttgtaaacaaacaagttaagggcaagattcttgccaagagaattaatgtgcgtattgagcacattaagcactctaagagccgagatagcttcctgaaacgtgtgaaggaaaatgatcagaaaaagaaagaagccaaagagaaaggtacctgggttcaactaaagcgccagcctgctccacccagagaagcacactttgtgagaaccaatgggaaggagcctgagctgctggaacctattccctatgaattcatggcataataggtgttaaaaaaaaaaataaaggacctctgggctacaaaaaaaaaaaaaaaaaa

SEQ ID NO: 2 - protein, 160 aa, Homo sapien [sequence omitted]

SEQ ID NO: 3 - DNA, 2789 bp, Homo sapien
ggtgggcggggggaggaggcggccctagcgccattttgtgggagcgaagcggtggctgggctgcgcttgggtccgtcgctgcttcggtgtccctgtcgggcttcccagcagcggcctagcgggaaaagtaaaagatgtctgaatatattcgggtaaccgaagatgagaacgatgagcccattgaaataccatcggaagacgatgggacggtgctgctctccacggttacagcccagtttccaggggcgtgtgggcttcgctacaggaatccagtgtctcagtgtatgagaggtgtccggctggtagaaggaattctgcatgccccagatgctggctggggaaatctggtgtatgttgtcaactatccaaaagataacaaaagaaaaatggatgagacagatgcttcatcagcagtgaaagtgaaaagagcagtccagaaaacatccgatttaatagtgttgggtctcccatggaaaacaaccgaacaggacctgaaagagtattttagtacctttggagaagttcttatggtgcaggtcaagaaagatcttaagactggtcattcaaaggggtttggctttgttcgttttacggaatatgaaacacaagtgaaagtaatgtcacagcgacatatgatagatggacgatggtgtgactgcaaacttcctaattctaagcaaagccaagatgagcctttgagaagcagaaaagtgtttgtggggcgctgtacagaggacatgactgaggatgagctgcgggagttcttctctcagtacggggatgtgatggatgtcttcatccccaagccattcagggcctttgcctttgttacatttgcagatgatcagattgcgcagtctctttgtggagaggacttgatcattaaaggaatcagcgttcatatatccaatgccgaacctaagcacaatagcaatagacagttagaaagaagtggaagatttggtggtaatccaggtggctttgggaatcagggtggatttggtaatagcagagggggtggagctggtttgggaaacaatcaaggtagtaatatgggtggtgggatgaactttggtgcgttcagcattaatccagccatgatggctgccgcccaggcagcactacagagcagttggggtatgatgggcatgttagccagccagcagaaccagtcaggcccatcgggtaataaccaaaaccaaggcaacatgcagagggagccaaaccaggccttcggttctggaaataactcttatagtggctctaattctggtgcagcaattggttggggatcagcatccaatgcagggtcgggcagtggttttaatggaggctttggctcaagcatggattctaagtcttctggctggggaatgtagacagtggggttgtggttggttggtatagaatggtgggaattcaaatttttctaaactcatggtaagtatattgtaaaatacatatgtactaagaattttcaaaattggtttgttcagtgtggagtatattcagcagtatttttgacatttttctttagaaaaaggaagagctaaaggaattttataagttttgttacatgaaaggttgaaatattgagtggttgaaagtgaactgctgtttgcctgattggtaaaccaacacactacaattgatatcaaaaggtttctcctgtaatattttatccctggacttgtcaagtgaattctttgcatgttcaaaacggaaaccattgattagaactacattctttaccccttgttttaatttgaaccccaccatatggatttttttccttaagaaaatctccttttaggagatcatggtgtcacagtgtttggttcttttgttttgttttttaacacttgtctcccctcatacacaaaagtacaatatgaagccttcatttaatctctgcagttcatctcatttcaaatgtttatggaagaagcacttcattgaaagtagtgctgtaaatattctgccataggaatactgtctacatgctttctcattcaagaattcgtcatcacgcatcacaggccgcgtctttgacggtgggtgtcccatttttatccgctactctttatttcatggagtcgtatcaacgctatgaacgcaaggctgtgatatggaaccagaaggctgtctgaacttttgaaaccttgtgtgggattgatggtggtgccgaggcatgaaaggctagtatgagcgagaaaaggagagagcgcgtgcagagacttggtggtgcataatggatattttttaacttggcgagatgtgtctctcaatcctgtggctttggtgagagagtgtgcagagagcaatgatagcaaataatgtacgaatgttttttgcattcaaaggacatccacatctgttggaagacttttaagtgagtttttgttcttagataacccacattagatgaatgtgttaagtgaaatgatacttgtactccccctacccctttgtcaactgctgtgaatgctgtatggtgtgtgttctcttctgttactgatatgtaagtgtggcaatgtgaactgaagctgatgggctgagaacatggactgagcttgtggtgtgctttgcaggaggacttgaagcagagttcaccagtgagctcaggtgtctcaaagaagggtggaagttctaatgtctgttagctacccataagaatgctgtttgctgcagttctgtgtcctgtgcttggatgctttttataagagttgtcattgttggaaattcttaaataaaactgatttaaataataaaaaaaaaaaaaaaaaaaa

SEQ ID NO: 4 - protein, 414 aa, Homo sapien
MSEYIRVTEDENDEPIEIPSEDDGTVLLSTVTAQFPGACGLRYRNPVSQCMRGVRLVEGILHAPDAGWGNLVYVVNYPKDNKRKMDETDASSAVKVKRAVQKTSDLIVLGLPWKTTEQDLKEYFSTFGEVLMVQVKKDLKTGHSKGFGFVRFTEYETQVKVMSQRHMIDGRWCDCKLPNSKQSQDEPLRSRKVFVGRCTEDMTEDELREFFSQYGDVMDVFIPKPFRAFAFVTFADDQIAQSLCGEDLIIKGISVHISNAEPKHNSNRQLERSGRFGGNPGGFGNQGGFGNSRGGGAGLGNNQGSNMGGGMNFGAFSINPAMMAAAQAALQSSWGMMGMLASQQNQSGPSGNNQNQGNMQREPNQAFGSGNNSYSGSNSGAAIGWGSASNAGSGSGFNGGFGSSMDSKSSGWGM

SEQ ID NO: 5 - DNA, 725 bp, Homo sapien
ggcggcgcgtggtctacgccgagtgacagagacgctcaggctgtgttctcaggatgaccgagtgggagacagcagcaccagcggtggcagagaccccagacatcaagctctttgggaagtggagcaccgatgatgtgcagatcaatgacatttccctgcaggattacattgcagtgaaggagaagtatgccaagtacctgcctcacagtgcagggcggtatgccgccaaacgcttccgcaaagctcagtgtcccattgtggagcgcctcactaactccatgatgatgcacggccgcaacaacggcaagaagctcatgactgtgcgcatcgtcaagcatgccttcgagatcatacacctgctcacaggcgagaaccctctgcaggtcctggtgaacgccatcatcaacagtggtccccgggaggactccacacgcattgggcgcgccgggactgtgagacgacaggctgtggatgtgtcccccctgcgccgtgtgaaccaggccatctggctgctgtgcacaggcgctcgtgaggctgccttccggaacattaagaccattgctgagtgcctggcagatgagctcatcaatgctgccaagggctcctcgaactcctatgccattaagaagaaggacgagctggagcgtgtggccaagtccaaccgctgattttcccagctgctgcccaataaacctgtctgccctttggggcagtcccagccaaaa

SEQ ID NO: 6 - protein, 204 aa, Homo sapien [sequence omitted]

SEQ ID NO: 7 - DNA, 513 bp, Rattus norvegicus
tccttctttcctttttgctgtaggcccgggtggttgctgccgaaatgggcaagttcatgaaacctgggaaggtggtgcttgtcctggctggacgctactccggacgcaaagctgtcatcgtgaagaacattgatgatggcacctcagatcgcccctacagccatgctctggtggctggaattgaccgctacccccgcaaagtgacagctgccatgggcaagaagaagatcgccaagagatcaaagataaaatcttttgtgaaagtgtataactacaatcacctaatgcccacaaggtactctgtggatatccccttggacaaaactgtcgtcaataaggatgtcttcagagatcctgctcttaaacgcaaggcccgacgggaggccaaggtcaagtttgaagagagatacaagacaggcaagaacaagtggttcttccagaaactgcggttttagatgctttgttttgatcattaaaaattataaagaaaaaaaaaaaaaaaaaaaaaaaaaa

SEQ ID NO: 8 - protein, 136 aa, Rattus norvegicus [sequence omitted]

SEQ ID NO: 9 - DNA, 869 bp, Homo sapien
ccgaggagctgaggaagcctagagctctcagaagcagtcctttgagctggtgtaggggcactcagaatggtccagcgtttgacataccgacgtaggctttcctacaatacagcctctaacaaaactaggctgtcccgaacccctggtaatagaattgtttacctttataccaagaaggttgggaaagcaccaaaatctgcatgtggtgtgtgcccaggcagacttcgaggggttcgtgctgtaagacctaaagttcttatgagattgtccaaaacaaagaaacatgtcagcagggcctatggtggttccatgtgtgctaaatgtgttcgtgacaggatcaagcgtgctttccttatcgaggagcagaaaatcgttgtgaaagtgttgaaggcacaagcacagagtcagaaagctaaataaaaaaatgaaacttttttgagtaataaaaatgaaaagacgctgtccaatagaaaaagttggtgtgctggagctacctcacctcagcttgagagagccagttgtgtgcatctctttccagttttgcatccagtgacgtctgcttggcatcttgagattgttatggtgagagtatttacacctcagcaaatgctgcaaaatcctgttttcccccagagagctggaggttaaatactaccagcacatccctagatactactcaagttacagtatatgatcactaatatagtatgctcttggtaccaggagctctgatatatatctggtacatgtttgataatgacttgattgttattataagtacttattaatacttcgattctgtaaagagtttagggtttgattttataaaatccaaaatgagccttttattgaaaaaaaaaaaaaaaaaa

SEQ ID NO: 10 - protein, 117 aa, Homo sapien [sequence omitted]

SEQ ID NO: 11 - DNA, 2714 bp, Homo sapien
ccgacatgttgagtcataagacgcgtcggtgttgcagtctgtgtccttggaggtgaccagggccactgcaggcatggtgctagcagagctgtacgtctctgaccgagagggaagcgatgccacgggagatggaaccaaggagaaaccatttaaaacaggtctaaaggctttgatgacagtagggaaagaaccatttcctaccatttacgtagattcacaaaaagaaaatgagaggtggaatgttatttctaaatcacagttgaagaacattaaaaagatgtggcatagggaacaaatgaagagtgaatcccgggaaaagaaagaggcagaagatagtttacgaagagaaaagaacctggaagaagcaaagaagattaccattaaaaatgatccaagtctcccagagccaaaatgtgtgaagattggtgcgttagaaggatatagaggccaaagagtaaaggtgtttggctgggtccacaggctgcgcaggcaaggaaagaatttaatgtttctggtgttgcgagatggtacaggttatcttcagtgtgtcttggcggatgagttgtgtcagtgctacaatggagttctcttgtccacggagagcagtgttgcagtgtatggaatgctaaatcttaccccaaagggcaagcaggctccaggtggccatgagctgagttgtgacttctgggaactaattgggttggcccctgctggaggagctgacaacctgatcaatgaggagtctgacgttgatgtccagctcaacaacagacacatgatgatccgaggagaaaacatgtccaaaatcctaaaagcacgatccatggtcaccaggtgctttagagatcacttctttgatagggggtactatgaagttactcctccaacattagtgcaaacacaagtagaaggtggtgccacactcttcaagcttgactattttggggaagaggcatttttgactcaatcctctcagttgtacttggagacctgcctcccagccctgggagatgttttttgtattgctcagtcataccgggcagagcagtccagaacacgaaggcacctggctgagtacactcacgtggaagctgagtgtcctttcctgacttttgacgacctcctgaaccggttggaggacttggtttgtgatgtggtagatcgaatattgaagtcacctgcagggagcatagtgcatgagctcaacccgaactttcagccccccaaacggcctttcaaacggatgaactattcagatgctatcgtttggctaaaagaacatgatgtaaagaaagaagatggaactttctatgaatttggagaagatatcccagaagctcctgagagactgatgacagacaccattaatgaaccaatcttgctgtgtcgatttcctgtggagatcaagtccttctacatgcagcgatgtcctgaggattcccgtcttactgaatctgtcgacgtgttgatgcccaatgttggtgagattgtgggaggctcaatgcgtatctttgatagtgaagaaatactggcaggttataaaagggaagggattgaccccactccctattactggtatacggatcagagaaaatacggtacatgtccccatggaggatatggcttgggcttggaacgattcttaacgtggattctgaataggtatcacatccgagacgtgtgcttataccctcgatttgtccagcgttgcacgccataaccattttctccagaagcgtggaggaaagattatgaaaggaacaggctctttaaaaaagaaaacaaaaagccagaatcttccttttttttgtttcattggggtttctctttctgtttttctttctactaccataaaaactatctcaaatcacctgaacatcaagtgatattaaggttgtcatcttaagaaaaaatatccatttttttcttaagttcgggaaacaaagttcggggaaaatacctggcatgaaactgtagttagggatacatttcagcattttactcactttatccaagttattcattttattcaagttatatgtatgtataattcaacaattttagattatggtgtaagatactccagtaacttatctttctgtccttttaagtgtacctggaattctttgatttattttattgcatcaatgaattaaaacaaaaatcttgggggaagaaattggcaatatcgtataaaaatctgctcatattagaacacagtataattcagcagtaaacactagaatcaaatgaatagccttttgtatcagttattaatcttttctaactctgcttagctgctaataatcctgaggcatagaaattgaagaatttgtaaaaatagaattgccttaaaggatttgaagtaagaacataattttggggagagttttttagtgattcacagtatccctcttagcattaatttaaggtaaagaggcagattgattttccctctttcctggtaattcctaagtaattaagaataaataagttccaaaagaaattgtagctggaatcttaataacaattgtgagtggctgtttgagttgcccccaccatgtccttagatctaatctgtgctaccttattaactcacagcaggcttactgaatggcttcatttcagatttagttgatttctccaccaaatgcatgtcatgtattctcaataggctgtattcccagcagtcaataaatgaacacccgtaaaaa

SEQ ID NO: 12 - protein, 548 aa, Homo sapien
MVLAELYVSDREGSDATGDGTKEKPFKTGLKALMTVGKEPFPTIYVDSQKENERWNVISKSQLKNIKKMWHREQMKSESREKKEAEDSLRREKNLEEAKKITIKNDPSLPEPKCVKIGALEGYRGQRVKVFGWVHRLRRQGKNLMFLVLRDGTGYLQCVLADELCQCYNGVLLSTESSVAVYGMLNLTPKGKQAPGGHELSCDFWELIGLAPAGGADNLINEESDVDVQLNNRHMMIRGENMSKILKARSMVTRCFRDHFFDRGYYEVTPPTLVQTQVEGGATLFKLDYFGEEAFLTQSSQLYLETCLPALGDVFCIAQSYRAEQSRTRRHLAEYTHVEAECPFLTFDDLLNRLEDLVCDVVDRILKSPAGSIVHELNPNFQPPKRPFKRMNYSDAIVWLKEHDVKKEDGTFYEFGEDIPEAPERLMTDTINEPILLCRFPVEIKSFYMQRCPEDSRLTESVDVLMPNVGEIVGGSMRIFDSEEILAGYKREGIDPTPYYWYTDQRKYGTCPHGGYGLGLERFLTWILNRYHIRDVCLYPRFVQRCTP

SEQ ID NO: 13 - DNA, 850 bp, Homo sapien
ctgcaggcgtcgcgccaatcttcgctctgaggtgctgtctcaccggtgagacctggaagcgggcgagtctcgtgctgtgtcggacctgcagcccctggccttccgccaccatggagtacctcatcggtatccaaggccccgactatgttcttgtcgcctccgaccgggtggccgccagcaatattgtccagatgaaggacgatcatgacaagatgtttaagatgagtgaaaagatattactcctgtgtgttggagaggctggagacactgtacagtttgcagaatatattcagaaaaacgtgcaactttataagatgcgaaatggatatgaattgtctcccacggcagcagctaacttcacacgccgaaacctggctgactgtcttcggagtcggaccccatatcatgtgaacctcctcctggctggctatgatgagcatgaagggccagcgctgtattacatggactacctggcagccttggccaaggccccttttgcagcccacggctatggtgccttcctgactctcagtatcctcgaccgatactacacaccgactatctcacgtgagagggcagtggaactccttaggaaatgtctggaggagctccagaaacgcttcatcctgaatctgccaaccttcagtgttcgaatcattgacaaaaatggcatccatgacctggataacatttccttccccaaacagggctcctaacatcatgtcctccctcccacttgccagggaacttttttttgatgggctcctttatttttttctactcttttcaggcgcactcttgataaatggttaattcagaataaaggtgactatggatataattgaaaaaa

SEQ ID NO: 14 - protein, 201 aa, Homo sapien
MEYLIGIQGPDYVLVASDRVAASNIVQMKDDHDKMFKMSEKILLLCVGEAGDTVQFAEYIQKNVQLYKMRNGYELSPTAAANFTRRNLADCLRSRTPYHVNLLLAGYDEHEGPALYYMDYLAALAKAPFAAHGYGAFLTLSILDRYYTPTISRERAVELLRKCLEELQKRFILNLPTFSVRIIDKNGIHDLDNISFPKQGS

SEQ ID NO: 15 - DNA, 2005 bp, Homo sapien
gctctgagaagccggactacgcggcagcggctcttcaaagcggagccgggagtttttgctacagttttcgccaccatgagtcgcagctataatgatgagctgcagttcttggagaagatcaataaaaactgctggaggatcaagaagggcttcgtgcccaacatgcaggttgaaggtgttttctatgtgaatgatgctctggagaaattgatgtttgaggaattaaggaatgcctgtcgaggtggtggtgttggtggcttcctgccagccatgaaacagattggcaatgtggcagccctgcctggaattgttcatcgatctattgggcttcctgatgtccattcaggatatgggtttgctattgggaacatggcagcctttgatatgaatgaccctgaagcagtagtatccccaggtggtgtcgggtttgacatcaactgtggtgtccgcttgctaagaaccaatttagatgaaagtgatgtccagcctgtgaaggagcaacttgcccaagctatgtttgaccacattcctgttggggtggggtcaaaaggtgtcatcccaatgaatgccaaagacttggaggaggccttggagatgggggtggactggtccttaagagaagggtatgcctgggctgaagacaaggagcactgcgaggagtacggaaggatgctgcaggctgaccccaataaagtttctgcaagggcgaagaaaagaggccttcctcagttggggaccctgggagcaggcaaccattatgcagaaatccaggttgtggatgagattttcaatgagtatgctgctaaaaaaatgggcatcgaccataagggacaggtgtgtgtgatgatccacagtggaagcagaggcttgggccaccaagtagccacagatgcgctggtagctatggagaaggccatgaagagagacaagattatagtcaatgatcggcagttggcttgtgctcgaatcgcttccccagagggtcaagactatctgaagggaatggcagctgctgggaactatgcctgggtcaaccgctcttccatgaccttcttaacccgtcaggctttcgccaaggtcttcaacacaacccctgatgacttggacctacatgtgatctatgatgtttctcacaacattgccaaagtggagcagcatgtggtggacggaaaggaacggacactgttagtacacaggaagggatccacccgcgctttccctcctcaccatcccctcattgctgttgattaccaactcactggacagccagtgctcattggtggcaccatgggaacctgtagttatgttcttactggcactgaacagggcatgactgagacctttggaacaacctgtcatggagcgggccgtgcattgtcccgagcaaaatctcgacgtaatttagatttccaggatgtcttagacaaattggcagatatgggaattgcgatccgtgttgcctcacccaaactggttatggaagaggctcctgagtcctataagaatgtgacagatgtggtaaatacctgccatgatgctggaatcagcaagaaagccattaaactgagaccaattgctgtgatcaaaggatagaaccttggacagcagggctgcctgacaccaccaaccctctctgaagtggaagtggactgacatgctcttctgacatcagactcaaggcgggacaagttgcaaagtgtgcagctgtaactgctcacgccaaaatggctgatggggaggctgctgctttcaggggcccgtgcttgtaaaataaccttccaggaagaggcacattgcccacctttggaaagggaggaatatgccttctccttggttgttccacagagttttaggaaaatctgttagggatgggtagatgtcaaactgccttacgcagtcatactgatctttagccatcagattgatcttcttcacaccaagctctgtttacattccgagaggtgtcatgaagaaagttctgttcaataaggttttggaatgtttc

SEQ ID NO: 16 - protein, 505 aa, Homo sapien
MSRSYNDELQFLEKINKNCWRIKKGFVPNMQVEGVFYVNDALEKLMFEELRNACRGGGVGGFLPAMKQIGNVAALPGIVHRSIGLPDVHSGYGFAIGNMAAFDMNDPEAVVSPGGVGFDINCGVRLLRTNLDESDVQPVKEQLAQAMFDHIPVGVGSKGVIPMNAKDLEEALEMGVDWSLREGYAWAEDKEHCEEYGRMLQADPNKVSARAKKRGLPQLGTLGAGNHYAEIQVVDEIFNEYAAKKMGIDHKGQVCVMIHSGSRGLGHQVATDALVAMEKAMKRDKIIVNDRQLACARIASPEGQDYLKGMAAAGNYAWVNRSSMTFLTRQAFAKVFNTTPDDLDLHVIYDVSHNIAKVEQHVVDGKERTLLVHRKGSTRAFPPHHPLIAVDYQLTGQPVLIGGTMGTCSYVLTGTEQGMTETFGTTCHGAGRALSRAKSRRNLDFQDVLDKLADMGIAIRVASPKLVMEEAPESYKNVTDVVNTCHDAGISKKAIKLRPIAVIKG

SEQ ID NO: 17 - DNA, 3141 bp, Homo sapien
gcgccgacttggagagccagccccatcgggttccccgccgccggaagcggaaatagcaccgggcgccgccacagtagctgtaactgccaccgcgatgccgaaggcgcccaagcagcagccgccggagcccgagtggatcggggacggagagagcacgagcccatcagacaaagtggtgaagaaagggaagaaggacaagaagatcaaaaaaacgttctttgaagagctggcagtagaagataaacaggctggggaagaagagaaagtgctcaaggagaaggagcagcagcagcagcaacagcaacagcagcaaaaaaaaaagcgagatacccgaaaaggcaggcggaagaaggatgtggatgatgatggagaagagaaagagctcatggagcgtcttaagaagctctcagtgccaaccagtgatgaggaggatgaagtacccgccccaaaaccccgcggagggaagaaaaccaagggtggtaatgtttttgcagccctgattcaggatcagagtgaggaagaggaggaggaagaaaaacatcctcctaagcctgccaagccggagaagaatcggatcaataaggccgtatctgaggaacagcagcctgcactcaagggcaaaaagggaaaggaagagaagtcaaaagggaaggctaagcctcaaaataaattcgctgctctggacaatgaagaggaggataaagaagaagaaattataaaggaaaaggagcctcccaaacaagggaaggagaaggccaagaaggcagagcagatggagtatgagcgccaagtggcttcattaaaagcagccaatgcagctgaaaatgacttctccgtgtcccaggcggagatgtcctcccgccaagccatgttagaaaatgcatctgacatcaagctggagaagttcagcatctccgctcatggcaaggagctgttcgtcaatgcagacctgtacattgtagccggccgccgctacgggctggtaggacccaatggcaagggcaagaccacactcctcaagcacattgccaaccgagccctgagcatccctcccaacattgatgtgttgctgtgtgagcaggaggtggtagcagatgagacaccagcagtccaggctgttcttcgagctgacaccaagcgattgaagctgctggaagaggagcggcggcttcagggacagctggaacaaggggatgacacagctgctgagaggctagagaaggtgtatgaggaattgcgggccactggggcggcagctgcagaggccaaagcacggcggatcctggctggcctgggctttgaccctgaaatgcagaatcgacccacacagaagttctcagggggctggcgcatgcgtgtctccctggccagggcactgttcatggagcccacactgctgatgctggatgagcccaccaaccacctggacctcaacgctgtcatctggcttaataactacctccagggctggcggaagaccttgctgatcgtctcccatgaccagggcttcttggatgatgtctgcactgatatcatccacctcgatgcccagcggctccactactataggggcaattacatgaccttcaaaaagatgtaccagcagaagcagaaagaactgctgaaacagtatgagaagcaagagaaaaagctgaaggagctgaaggcaggcgggaagtccaccaagcaggcggaaaaacaaacgaaggaagccctgactcggaagcagcagaaatgccgacggaaaaaccaagatgaggaatcccaggaggcccctgagctcctgaagcgccctaaggagtacactgtgcgcttcacttttccagaccccccaccactcagccctccagtgctgggtctgcatggtgtgacattcggctaccagggacagaaaccactctttaagaacttggattttggcatcgacatggattcaaggatttgcattgtgggccctaatggtgtggggaagagtacgctactcctgctgctgactggcaagctgacaccgacccatggggaaatgagaaagaaccaccggctgaaaattggcttcttcaaccagcagtatgcagagcagctgcgcatggaggagacgcccactgagtacctgcagcggggcttcaacctgccctaccaggatgcccgcaagtgcctgggccgcttcggcctggagagtcacgcccacaccatccagatctgcaaactctctggtggtcagaaggcgcgagttgtgtttgctgagctggcctgtcgggaacctgatgtcctcatcttggacgagccaaccaataacctggacatagagtctattgatgctctaggggaggccatcaatgaatacaagggtgctgtgatcgttgtcagccatgatgcccgactcatcacagaaaccaattgccagctgtgggtggtggaggagcagagtgttagccaaatcgatggtgactttgaagactacaagcgggaggtgttggaggccctgggtgaagtcatggtcagccggccccgagagtgaagctttccttcccagaagtctcccgagagacatatttgtgtggcctagaagtcctctgtggtctcccctcctctgaagactgcctctggcctgcagctgacctggcaaccattcaggcacatgaaggtggagtgtgaccttgatgtgaccgggatcccactctgattgcatccatttctctgaaagacttgtttgttctgcttctcttcatataactgagctggccttatccttggcatccccctaaacaaacaagaggtgaccaccttattgtgaggttccatccagccaagtttatgtggcctattgtctcaggactctcatcactcagaagcctgcctctgatttaccctacagcttcaggcccagctgccccccagtctttgggtggtgctgttcttttctggtggatttaatgctgactcactggtacaaacagctgttgaagctcagagctggaggtgagcttctgaggcctttgccattatccagcccaagatttggtgcctgcagcctcttgtctggttgaggacttggggcaggaaaggaatgctgctgaacttgaatttccctttacaaggggaagaaataaaggaaaggagttgctgccgaaaaaaaaaaaa

SEQ ID NO: 18 - protein, 807 aa, Homo sapien
MPKAPKQQPPEPEWIGDGESTSPSDKVVKKGKKDKKIKKTFFEELAVEDKQAGEEEKVLKEKEQQQQQQQQQQKKKRDTRKGRRKKDVDDDGEEKELMERLKKLSVPTSDEEDEVPAPKPRGGKKTKGGNVFAALIQDQSEEEEEEEKHPPKPAKPEKNRINKAVSEEQQPALKGKKGKEEKSKGKAKPQNKFAALDNEEEDKEEEIIKEKEPPKQGKEKAKKAEQMEYERQVASLKAANAAENDFSVSQAEMSSRQAMLENASDIKLEKFSISAHGKELFVNADLYIVAGRRYGLVGPNGKGKTTLLKHIANRALSIPPNIDVLLCEQEVVADETPAVQAVLRADTKRLKLLEEERRLQGQLEQGDDTAAERLEKVYEELRATGAAAAEAKARRILAGLGFDPEMQNRPTQKFSGGWRMRVSLARALFMEPTLLMLDEPTNHLDLNAVIWLNNYLQGWRKTLLIVSHDQGFLDDVCTDIIHLDAQRLHYYRGNYMTFKKMYQQKQKELLKQYEKQEKKLKELKAGGKSTKQAEKQTKEALTRKQQKCRRKNQDEESQEAPELLKRPKEYTVRFTFPDPPPLSPPVLGLHGVTFGYQGQKPLFKNLDFGIDMDSRICIVGPNGVGKSTLLLLLTGKLTPTHGEMRKNHRLKIGFFNQQYAEQLRMEETPTEYLQRGFNLPYQDARKCLGRFGLESHAHTIQICKLSGGQKARVVFAELACREPDVLILDEPTNNLDIESIDALGEAINEYKGAVIVVSHDARLITETNCQLWVVEEQSVSQIDGDFEDYKREVLEALGEVMVSRPRE

SEQ ID NO: 19 - DNA, 1552 bp, Homo sapien
cggttggtgcggcctccattgttcgtgttttaaggcgccatgaggggtgacagaggccgtggtcgtggtgggcgctttggttccagaggaggcccaggaggagggttcaggccctttgtaccacatatcccatttgacttctatttgtgtgaaatggcctttccccgggtcaagccagcacctgatgaaacttccttcagtgaggccttgctgaagaggaatcaggacctggctcccaattctgctgaacaggcatctatcctttctctggtgacaaaaataaacaatgtgattgataatctgattgtggctccagggacatttgaagtgcaaattgaagaagttcgacaggtgggatcctataaaaaggggacaatgactacaggacacaatgtggctgacctggtggtgatactcaagattctgccaacgttggaagctgttgctgccctggggaacaaagtcgtggaaagcctaagagcacaggatccttctgaagttttaaccatgctgaccaacgaaactggctttgaaatcagttcttctgatgctacagtgaagattctcattacaacagtgccacccaatcttcgaaaactggatccagaactccatttggatatcaaagtattgcagagtgccttagcagccatccgacatgcccgctggttcgaggaaaatgcttctcagtccacagttaaagttctcatcagactactgaaggacttgaggattcgttttcctggctttgagcccctcacaccctggatccttgacctactaggccattatgctgtgatgaacaaccccaccagacagcctttggccctaaacgttgcatacaggcgctgcttgcagattctggctgcaggactgttcctgccaggttcagtgggtatcactgacccctgtgagagtggcaactttagagtacacacagtcatgaccctagaacagcaggacatggtctgctatacagctcagactctcgtccgaatcctctcacatggtggctttaggaagatccttggccaggagggtgatgccagctatcttgcttctgaaatatctacctgggatggagtgatagtaacaccttcagaaaaggcttatgagaagccaccagagaagaaggaaggagaggaagaagaggagaatacagaaagaaccacctcaaggagaggaagaagaaagcatggaaactcaggagtgacattcccttcactccttttcctacccaagggaaagactggagcctaagctgcctgctactggctttacatggtgacagacattccgtggataggaagatagcaggagaaagtaactccatagagtgtcattccactggttgatattggcttagctgccagtctcccatttgtgacctatgccatccatctataatggaggataccaacatttcttcctaatattctataatctccaactcctgaaaacccctctctcaactaatactttgctgttgaaatgttgtgaaatgttaagtgtctggaaatttttttttctaagaaaaactattaaagtactt

SEQ ID NO: 20 - protein, 406 aa, Homo sapien
MRGDRGRGRGGRFGSRGGPGGGFRPFVPHIPFDFYLCEMAFPRVKPAPDETSFSEALLKRNQDLAPNSAEQASILSLVTKINNVIDNLIVAPGTFEVQIEEVRQVGSYKKGTMTTGHNVADLVVILKILPTLEAVAALGNKVVESLRAQDPSEVLTMLTNETGFEISSSDATVKILITTVPPNLRKLDPELHLDIKVLQSALAAIRHARWFEENASQSTVKVLIRLLKDLRIRFPGFEPLTPWILDLLGHYAVMNNPTRQPLALNVAYRRCLQILAAGLFLPGSVGITDPCESGNFRVHTVMTLEQQDMVCYTAQTLVRILSHGGFRKILGQEGDASYLASEISTWDGVIVTPSEKAYEKPPEKKEGEEEEENTERTTSRRGRRKHGNSGVTFPSLLFLPKGKTGA

SEQ ID NO: 21 - DNA, 2567 bp, Homo sapien
ctccggcgcagtgttgggactgtctgggtatcggaaagcaagcctacgttgctcactattacgtataatccttttcttttcaagatgcctgaggaagtgcaccatggagaggaggaggtggagacttttgcctttcaggcagaaattgcccaactcatgtccctcatcatcaataccttctattccaacaaggagattttccttcgggagttgatctctaatgcttctgatgccttggacaagattcgctatgagagcctgacagacccttcgaagttggacagtggtaaagagctgaaaattgacatcatccccaaccctcaggaacgtaccctgactttggtagacacaggcattggcatgaccaaagctgatctcataaataatttgggaaccattgccaagtctggtactaaagcattcatggaggctcttcaggctggtgcagacatctccatgattgggcagtttggtgttggcttttattctgcctacttggtggcagagaaagtggttgtgatcacaaagcacaacgatgatgaacagtatgcttgggagtcttctgctggaggttccttcactgtgcgtgctgaccatggtgagcccattggcaggggtaccaaagtgatcctccatcttaaagaagatcagacagagtacctagaagagaggcgggtcaaagaagtagtgaagaagcattctcagttcataggctatcccatcaccctttatttggagaaggaacgagagaaggaaattagtgatgatgaggcagaggaagagaaaggtgagaaagaagaggaagataaagatgatgaagaaaaacccaagatcgaagatgtgggttcagatgaggaggatgacagcggtaaggataagaagaagaaaactaagaagatcaaagagaaatacattgatcaggaagaactaaacaagaccaagcctatttggaccagaaaccctgatgacatcacccaagaggagtatggagaattctacaagagcctcactaatgactgggaagaccacttggcagtcaagcacttttctgtagaaggtcagttggaattcagggcattgctatttattcctcgtcgggctccctttgacctttttgagaacaagaagaaaaagaacaacatcaaactctatgtccgccgtgtgttcatcatggacagctgtgatgagttgataccagagtatctcaattttatccgtggtgtggttgactctgaggatctgcccctgaacatctcccgagaaatgctccagcagagcaaaatcttgaaagtcattcgcaaaaacattgttaagaagtgccttgagctcttctctgagctggcagaagacaaggagaattacaagaaattctatgaggcattctctaaaaatctcaagcttggaatccacgaagactccactaaccgccgccgcctgtctgagctgctgcgctatcatacctcccagtctggagatgagatgacatctctgtcagagtatgtttctcgcatgaaggagacacagaagtccatctattacatcactggtgagagcaaagagcaggtggccaactcagcttttgtggagcgagtgcggaaacggggcttcgaggtggtatatatgaccgagcccattgacgagtactgtgtgcagcagctcaaggaatttgatgggaagagcctggtctcagttaccaaggagggtctggagctgcctgaggatgaggaggagaagaagaagatggaagagagcaaggcaaagtttgagaacctctgcaagctcatgaaagaaatcttagataagaaggttgagaaggtgacaatctccaatagacttgtgtcttcaccttgctgcattgtgaccagcacctacggctggacagccaatatggagcggatcatgaaagcccaggcacttcgggacaactccaccatgggctatatgatggccaaaaagcacctggagatcaaccctgaccaccccattgtggagacgctgcggcagaaggctgaggccgacaagaatgataaggcagttaaggacctggtggtgctgctgtttgaaaccgccctgctatcttctggcttttcccttgaggatccccagacccactccaaccgcatctatcgcatgatcaagctaggtctaggtattgatgaagatgaagtggcagcagaggaacccaatgctgcagttcctgatgagatcccccctctcgagggcgatgaggatgcgtctcgcatggaagaagtcgattaggttaggagttcatagttggaaaacttgtgcccttgtatagtgtccccatgggctcccactgcagcctcgagtgcccctgtcccacctggctccccctgctggtgtctagtgtttttttccctctcctgtccttgtgttgaaggcagtaaactaagggtgtcaagccccattccctctctactcttgacagcaggattggatgttgtgtattgtggtttattttattttcttcattttgttctgaaattaaagtatgcaaaataaagaatatgccgttttaaaaaaaaaaaaaaaaaaaaaaaaaaaaa

SEQ ID NO: 22 - protein, 724 aa, Homo sapien
MPEEVHHGEEEVETFAFQAEIAQLMSLIINTFYSNKEIFLRELISNASDALDKIRYESLTDPSKLDSGKELKIDIIPNPQERTLTLVDTGIGMTKADLINNLGTIAKSGTKAFMEALQAGADISMIGQFGVGFYSAYLVAEKVVVITKHNDDEQYAWESSAGGSFTVRADHGEPIGRGTKVILHLKEDQTEYLEERRVKEVVKKHSQFIGYPITLYLEKEREKEISDDEAEEEKGEKEEEDKDDEEKPKIEDVGSDEEDDSGKDKKKKTKKIKEKYIDQEELNKTKPIWTRNPDDITQEEYGEFYKSLTNDWEDHLAVKHFSVEGQLEFRALLFIPRRAPFDLFENKKKKNNIKLYVRRVFIMDSCDELIPEYLNFIRGVVDSEDLPLNISREMLQQSKILKVIRKNIVKKCLELFSELAEDKENYKKFYEAFSKNLKLGIHEDSTNRRRLSELLRYHTSQSGDEMTSLSEYVSRMKETQKSIYYITGESKEQVANSAFVERVRKRGFEVVYMTEPIDEYCVQQLKEFDGKSLVSVTKEGLELPEDEEEKKKMEESKAKFENLCKLMKEILDKKVEKVTISNRLVSSPCCIVTSTYGWTANMERIMKAQALRDNSTMGYMMAKKHLEINPDHPIVETLRQKAEADKNDKAVKDLVVLLFETALLSSGFSLEDPQTHSNRIYRMIKLGLGIDEDEVAAEEPNAAVPDEIPPLEGDEDASRMEEVD

SEQ ID NO: 23 - DNA, 1997 bp, Homo sapien
gtactatcctccttacttttgggtcgggccctccgggaagatggcggccgtgcaggcggccgaggtgaaagtggatggcagcgagccgaaactgagcaagaatgagctgaagagacgcctgaaagctgagaagaaagtagcagagaaggaggccaaacagaaagagctcagtgagaaacagctaagccaagccactgctgctgccaccaaccacaccactgataatggtgtgggtcctgaggaagagagcgtggacccaaatcaatactacaaaatccgcagtcaagcaattcatcagctgaaggtcaatggggaagacccatacccacacaagttccatgtagacatctcactcactgacttcatccaaaaatatagtcacctgcagcctggggatcacctgactgacatcaccttaaaggtggcaggtaggatccatgccaaaagagcttctgggggaaagctcatcttctatgatcttcgaggagagggggtgaagttgcaagtcatggccaattccagaaattataaatcagaagaagaatttattcatattaataacaaactgcgtcggggagacataattggagttcaggggaatcctggtaaaaccaagaagggtgagctgagcatcattccgtatgagatcacactgctgtctccctgtttgcatatgttacctcatcttcactttgggctcaaagacaaggaaacaaggtatcgccagagatacttggacttgatcctgaatgactttgtgaggcagaaatttatcatccgctctaagatcatcacatatataagaagtttcttagatgagctgggattcctagagattgaaactcccatgatgaacatcatcccagggggagccgtggccaagcctttcatcacttatcacaacgagctggacatgaacttatatatgagaattgctccagaactctatcataagatgcttgtggttggtggcatcgaccgggtttatgaaattggacgccagttccggaatgaggggattgatttgacgcacaatcctgagttcaccacctgtgagttctacatggcctatgcagactatcacgatctcatggaaatcacggagaagatggtttcagggatggtgaagcatattacaggcagttacaaggtcacctaccacccagatggcccagagggccaagcctacgatgttgacttcaccccacccttccggcgaatcaacatggtagaagagcttgagaaagccctggggatgaagctgccagaaacgaacctctttgaaactgaagaaactcgcaaaattcttgatgatatctgtgtggcaaaagctgttgaatgccctccacctcggaccacagccaggctccttgacaagcttgttggggagttcctggaagtgacttgcatcaatcctacattcatctgtgatcacccacagataatgagccctttggctaaatggcaccgctctaaagagggtctgactgagcgctttgagctgtttgtcatgaagaaagagatatgcaatgcgtatactgagctgaatgatcccatgcggcagcggcagctttttgaagaacaggccaaggccaaggctgcaggtgatgatgaggccatgttcatagatgaaaacttctgtactgccctggaatatgggctgccccccacagctggctggggcatgggcattgatcgagtcgccatgtttctcacggactccaacaacatcaaggaagtacttctgtttcctgccatgaaacccgaagacaagaaggagaatgtagcaaccactgatacactggaaagcacaacagttggcacttctgtctagaaaataataattgcaagttgtataactcaggcgtctttgcatttctgcgaaagatcaaggtctgcaagggaattcttgtgtgctgctttccatttgacaccgcagttctgttcagccatcagaagagagacaaggaattaaaaatttctttttaatcctgtta

SEQ ID NO: 24 - protein, 597 aa, Homo sapien
MAAVQAAEVKVDGSEPKLSKNELKRRLKAEKKVAEKEAKQKELSEKQLSQATAAATNHTTDNGVGPEEESVDPNQYYKIRSQAIHQLKVNGEDPYPHKFHVDISLTDFIQKYSHLQPGDHLTDITLKVAGRIHAKRASGGKLIFYDLRGEGVKLQVMANSRNYKSEEEFIHINNKLRRGDIIGVQGNPGKTKKGELSIIPYEITLLSPCLHMLPHLHFGLKDKETRYRQRYLDLILNDFVRQKFIIRSKIITYIRSFLDELGFLEIETPMMNIIPGGAVAKPFITYHNELDMNLYMRIAPELYHKMLVVGGIDRVYEIGRQFRNEGIDLTHNPEFTTCEFYMAYADYHDLMEITEKMVSGMVKHITGSYKVTYHPDGPEGQAYDVDFTPPFRRINMVEELEKALGMKLPETNLFETEETRKILDDICVAKAVECPPPRTTARLLDKLVGEFLEVTCINPTFICDHPQIMSPLAKWHRSKEGLTERFELFVMKKEICNAYTELNDPMRQRQLFEEQAKAKAAGDDEAMFIDENFCTALEYGLPPTAGWGMGIDRVAMFLTDSNNIKEVLLFPAMKPEDKKENVATTDTLESTTVGTSV

SEQ ID NO: 25 - DNA, 1709 bp, Homo sapien
caatttgagtttccatttctcggatttgggaactggtataagcattgtctgtgatgtaaacaaagtcttcaatatttggagaaaacatctcctcatacttgagagcacaagaggaagagagagaccctcactgctggggagtccctgccacactcagtcccccaccacactgaatcggaattccgagagggaagaggaggcgcgagaatggaggtggaggccgtctgtggtggcgcgggcgaggtggaggcccaggactctgaccctgcccctgccttcagcaaggcccccggcagcgccggccactacgaactgccgtgggttgaaaaatataggccagtaaagctgaatgaaattgtcgggaatgaagacaccgtgagcaggctagaggtctttgcaagggaaggaaatgtgcccaacatcatcattgcgggccctccaggaaccggcaagaccacaagcattctgtgcttggcccgggccctgctgggcccagcactcaaagatgccatgttggaactcaatgcttcaaatgacaggggcattgacgttgtgaggaataaaattaaaatgtttgctcaacaaaaagtcactcttcccaaaggccgacataagatcatcattctggatgaagcagacagcatgaccgacggagcccagcaagccttgaggagaaccatggaaatctactctaaaaccactcgcttcgcccttgcttgtaatgcttcggataagatcatcgagcccattcagtcccgctgtgcagtcctccggtacacaaagctgaccgacgcccagatcctcaccaggctgatgaatgttatcgagaaggagagggtaccctacactgatgacggcctagaagccatcatcttcacggcccagggagacatgaggcaggcgctgaacaacctgcagtccaccttctcaggatttggcttcattaacagtgagaacgtgttcaaggtctgtgacgagccccacccactgctggtaaaggagatgatccagcactgtgtgaatgccaacattgacgaagcctacaagattcttgctcacttgtggcatctgggctactcaccagaagatatcattggcaacatctttcgagtgtgtaaaactttccaaatggcagaatacctgaaactggagtttatcaaggaaattggatacactcacatgaaaatagcggaaggagtgaactctcttttgcagatggcaggcctcctggcaaggctgtgtcagaagacaatggccccggtggccagttagagcagagacttcactgactgacttacaggtgccctattctgaggtacaggagccgcggctttctgatgggggaaaatgcgccttaggctgagccaacatgactgtcccccaaactccagtggctggccaggcgcggtagtcacgcctgtaatcccaacactttgggaggccgaggcaggtggatcacctgaggtcagaagttcaagaccagcctggccaacatggggaaaccctgtctttactaaaaatataaaaattagctgggtgtggtggcgggcacctgtaatcccagctactcgggaggctgtggcaggcgaaatcgcttgaacccaggaggaggaggtggaggttgcagtgagccaagatcacaccattgcactccagcctgggcgacagagactccatctggggaaaaaaattaaataaataaactcccg

SEQ ID NO: 26 - protein, 354 aa, Homo sapien
MEVEAVCGGAGEVEAQDSDPAPAFSKAPGSAGHYELPWVEKYRPVKLNEIVGNEDTVSRLEVFAREGNVPNIIIAGPPGTGKTTSILCLARALLGPALKDAMLELNASNDRGIDVVRNKIKMFAQQKVTLPKGRHKIIILDEADSMTDGAQQALRRTMEIYSKTTRFALACNASDKIIEPIQSRCAVLRYTKLTDAQILTRLMNVIEKERVPYTDDGLEAIIFTAQGDMRQALNNLQSTFSGFGFINSENVFKVCDEPHPLLVKEMIQHCVNANIDEAYKILAHLWHLGYSPEDIIGNIFRVCKTFQMAEYLKLEFIKEIGYTHMKIAEGVNSLLQMAGLLARLCQKTMAPVAS

SEQ ID NO: 27 - DNA, 2116 bp, Homo sapien
cggttctccaagcacccagcatcctgctagacgcgccgcgcaccgacggaggggacatgggcagagcaatggtggccaggctggggctggggctgctgctgctggcactgctcctacccacgcagatttattccagtgaaacaacaactggaacttcaagtaactcctcccagagtacttccaactctgggttggccccaaatccaactaatgccaccaccaaggcggctggtggtgccctgcagtcaacagccagtctcttcgtggtctcactctctcttctgcatctctactcttaagagactcaggccaagaaacgtcttctaaatttccccatcttctaaacccaatccaaatggcgtctggaagtccaatgtggcaaggaaaaacaggtcttcatcgaatctactaattccacaccttttattgacacagaaaatgttgagaatcccaaatttgattgatttgaagaacatgtgagaggtttgactagatgatgaatgccaatattaaatctgctggagtttcatgtacaagatgaaggagaggcaacatccaaaatagttaagacatgatttccttgaatgtggcttgagaaatatggacacttaatactaccttgaaaataagaatagaaataaaggatgggattgtggaatggagattcagttttcattggttcattaattctataaggccataaaacaggtaatataaaaagcttccatcgatctatttatatgtacatgagaaggaatccccaggtgttactgtaattcctcaacgtattgtttcgacggcactaatttaatgccgatatactctagatgaatgtttacattgttgagctattgctgttctcttgggaactgaactcactttcctcctgaggctttggatttgacattgcatttgaccttttaggtagtaattgacatgtgccagggcaatgatgaatgagaatctaccccagatccaagcatcctgagcaactcttgattatccatattgagtcaaatggtaggcatttcctatcacctgtttccattcaacaagagcactacattcttttagctaaacggattccaaagagtagaattgcattgaccacgactaatttcaaaatgctttttattattattattttttagacagtctcactttgtcgcccaggccggagtgcagtggtgcgatctcagatcagtgtaccatttgcctcccgggctcaagcgattctcctgcctcagcctcccaagtagctgggattacaggcacctgccaccatgcccggctaatttttgtaattttagtagagacagggtttcaccatgttgcccaggctggtttagaactcctgacctcaggtgatccacccgcctcggcctcccaaagtgctgggattacaggcttgagcccccgcgcccagccatcaaaatgctttttatttctgcatatgtttgaatactttttacaatttaaaaaaatgatctgttttgaaggcaaaattgcaaatcttgaaattaagaaggcaaaatgtaaaggagtcaaactataaatcaagtatttgggaagtgaagactggaagctaatttgcataaattcacaaacttttatactctttctgtatatacattttttttctttaaaaaacaactatggatcagaatagcaacatttagaacactttttgttatcagtcaatatttttagatagttagaacctggtcctaagcctaaaagtgggcttgattctgcagtaaatcttttacaactgcctcgacacacataaacctttttaaaaatagacactccccgaagtcttttgtttgtatggtcacacactgatgcttagatgttccagtaatctaatatggccacagtagtcttgatgaccaaagtcctttttttccatctttagaaaactacatgggaacaaacagatcgaacagttttgaagctactgtgtgtgtgaatgaacactcttgctttattccagaatgctgtacatctattttggattgtatattgtggttgtgtatttacgctttgattcatagtaacttcttatggaattgatttgcattgaacgacaaactgtaaataaaaagaaacggtg

SEQ ID NO: 28 - protein, 80 aa, Homo sapien
MGRAMVARLGLGLLLLALLLPTQIYSSETTTGTSSNSSQSTSNSGLAPNPTNATTKAAGGALQSTASLFVVSLSLLHLYS

SEQ ID NO: 29 - DNA, 3319 bp, Homo sapien
ggcccggcccgcggcggcggcaaaggggcggaggggttcgctgccagcaattgccaagctgctgcggtcgtggcgggatggtatagccgggcctgagggcgggcggcggggcgcgggcgggggcgaggcggccgggaagggccgacgccgcctgactggcttgggagcagcggcagcaagctgagggggcgtcgccgccgccggcccccggcgccgccgcgggaggccgcgcccgccatggcggcccgggcggtgctggacgagttcactgcgccagctgagaaggcggagctgctggagcagagccgcggccgtatcgagggcctgtttggcgtgagcctagccgtgctcggcgcgctaggggctgaggagccgctgcccgcgcgcatctggctgcagctctgcggggcgcaggaggcggagcacagcgccaaggaatatattaaaggaatctgtgaacctgaactagaagaaagagaatgttaccccaaggacatgcactgcatttttgttggggcagagagcctgtttctgaaaagcttgattcaggatacttgtgctgacctctgcattctggacattggccttcttggcatcagaggaagtgctgaggctgtggtcatggctaggagtcacattcaacaatttgtaaagctctttgaaaataaagagaacctacccagtagtcagaaagaatcagaggtgaaaagggaattcaaacaatttgttgaagcccatgcagacaattacacaatggatttgttgattttgcccacttccttgaaaaaagaacttttgacactcacacaaggtgaggagaatctctttgaaacaggagatgatgaggttattgaaatgagagattctcaacaaacagagtttacacagaatgctgccacagggctgaatatttctagagatgaaactgttttgcaggaagaggcaagaaataaagctgggactcctgtttctgagcttacaaaacaaatggacacagtcctttctagctcaccagatgtgctttttgatccaataaatggtctaaccccagatgaagaggcactttccaatgagagaatttgtcagaaaaggagattttctgattctgaagaaaggcatacgaagaagcagttttctttggaaaatgttcaggagggggagattttacacgatgctaagacattggctggaaatgtaatagctgacctatctgattcttctgctgattctgaaaatttaagtccagatataaaagaaactactgaggaaatggaatacaacatcctcgtaaacttttttaaaaccatgggctactcccaagaaattgttgaaaaggtcattaaggtgtatggaccatctactgaaccattattgctcttagaggaaattgaaaaagaaaataaaagattccaagaagacagagaattttcagctggtacagtgtatccagagaccaacaaaaccaaaaataaaggtgtttatagcagcacaaatgagcttacaactgattccactccaaagaaaacacaggctcacacacagcaaaatatggtagaaaaattttctcagttaccattcaaagtggaagctaaaccatgtacctcaaattgtagaattaatactttcagaacagtgccaatagaacagaaacatgaagtctggggttcaaaccagaactacatttgtaacacagaccctgaaactgatggcctttcaccttctgttgcctctccaagtcccaaagaagtcaattttgtttcaaggggagcttcaagtcaccagcccagagttccactttttcctgaaaatggtttacaccagcagccagaacccttgcttccaaataatatgaaatctgcctgtgaaaaacgtttaggatgttgtagttctcctcattctaagccaaattgctcaaccctttctccaccaatgccactgccccagctgttaccttcggttactgatgcaaggtcggcaggaccttctgatcatattgattcctcagttactggggttcaaaggtttcgagatactctaaaaataccctacaagctggaattaaaaaatgaaccagggagaacggatttgaaacacattgttatagatgggagcaatgttgcaattacccatggtctgaaaaagttcttttcttgtcgtggaattgcaattgcagttgaatatttttggaagcttggcaacagaaacatcactgtatttgtccctcagtggagaacaaggcgtgatcctaatgtcacagaacagcacttcttaacccagctccaggagctcggaatattatctttaactcctgcccggatggtctttggagaaagaattgcttctcatgatgacaggtttctactacacttagcggacaaaactggtggcataattgtgacaaatgataatttcagagaatttgtgaatgagtcagtctcttggagagaaattattacaaaaaggctgctgcagtacacgttcgtgggggacatatttatggttcccgatgatcctctgggaagaagtggacctcgattagaggagtttcttcagaaggaagtctgtcttagagatatgcagcccctactcagtgccctgccaaatgtgggcatgtttgaccccagcttcagagtccctggcacccaggcagccagcaccagccaccagcctccgacccggattcagggagccccttcaagccactggctccctcagcagccccacttcccactgctgccagccctccccagtctccagcagaacctgcccatgccagctcagagatcttctgcagaaaccaacgagctgagggaagcccttctgaagatcttccctgactcagagcaaagactgaaaatagaccagatcttggtggcccacccatacatgaaagatctaaatgcgctttctgccatggtgttggattgaagattgtgctgagcgctgagcttgcgctcagggctggctgatcaaactcaagctcacacctgtacctgatgggaatgaacataatgtgaagaaacttatttcccagtgtaaacgcagttgtacagaaaaaaaatgttttgggtataaatctgggttttcaaaaccagcttttttctatatataaattatgctgctattacagatttaacattttctgttaaaggaaagtctacattttctgcctgttcagaactgtttaatagcagttactcttgagtgtatttacctttttatgttttttaaactattttccttaaagccgaaaatattgacaaatggatatggttagcctttataaataaataaaaaaaaaagtgttgctttcttaagg

SEQ ID NO: 30 - protein, 896 aa, Homo sapien
MAARAVLDEFTAPAEKAELLEQSRGRIEGLFGVSLAVLGALGAEEPLPARIWLQLCGAQEAEHSAKEYIKGICEPELEERECYPKDMHCIFVGAESLFLKSLIQDTCADLCILDIGLLGIRGSAEAVVMARSHIQQFVKLFENKENLPSSQKESEVKREFKQFVEAHADNYTMDLLILPTSLKKELLTLTQGEENLFETGDDEVIEMRDSQQTEFTQNAATGLNISRDETVLQEEARNKAGTPVSELTKQMDTVLSSSPDVLFDPINGLTPDEEALSNERICQKRRFSDSEERHTKKQFSLENVQEGEILHDAKTLAGNVIADLSDSSADSENLSPDIKETTEEMEYNILVNFFKTMGYSQEIVEKVIKVYGPSTEPLLLLEEIEKENKRFQEDREFSAGTVYPETNKTKNKGVYSSTNELTTDSTPKKTQAHTQQNMVEKFSQLPFKVEAKPCTSNCRINTFRTVPIEQKHEVWGSNQNYICNTDPETDGLSPSVASPSPKEVNFVSRGASSHQPRVPLFPENGLHQQPEPLLPNNMKSACEKRLGCCSSPHSKPNCSTLSPPMPLPQLLPSVTDARSAGPSDHIDSSVTGVQRFRDTLKIPYKLELKNEPGRTDLKHIVIDGSNVAITHGLKKFFSCRGIAIAVEYFWKLGNRNITVFVPQWRTRRDPNVTEQHFLTQLQELGILSLTPARMVFGERIASHDDRFLLHLADKTGGIIVTNDNFREFVNESVSWREIITKRLLQYTFVGDIFMVPDDPLGRSGPRLEEFLQKEVCLRDMQPLLSALPNVGMFDPSFRVPGTQAASTSHQPPTRIQGAPSSHWLPQQPHFPLLPALPSLQQNLPMPAQRSSAETNELREALLKIFPDSEQRLKIDQILVAHPYMKDLNALSAMVLD

SEQ ID NO: 31 - DNA, 6949 bp, Homo sapien
aaacaagaagaatgggattgatatttccgcagaagtttggaagttatgtaacagagcaggttgagatcctaccttttaggagcagcctgccccttttgaaggggtaaagggagtgggtgcagtgccctctcttctgttgtagtggcttatccctctaaggcatgacccttggataggggttacctgcctcggaaagtccccacttccttgtgggagtttaaaatagattggcatatgtgagagatggagacaaggtgggaaatcggatcctgtcttaggatttctcatcaggagatgctgatacttggtgtttcagcttgataaattgagaaggtgccatgaaaccaggtcctggaacagaatccctggttgctctgtcttttagctgctctgaccctctgccctgcagagcatgcattttgcatgtgcctggcaggaggccctcctgcttgagccctgctgtatttgtctgtgttgacaacgtgactgccagccattaagcttggtcagtccacagacacactaggaaagcagaggcagctcttggtttctctggaacagagctgcaagaagtctctgggcatctgcatggccaggagcttatgcttaactgttgagtgacctgcagccataagggcattaattctgccttccagaggtgggaatgacttggctttaaacagtgatttgtgtgagaattcttcaaatcccataaggtagaaggcatggtggagtggaggagaaatcttggctcatatctgcctcttccattgaccagctgtgtgaccttgggcctgttacttttaacctacctgaccctccatttcctcatttatcagaagtgtctaactgtacacaagttaaactgtaaggattacatgaggtagtagtcaatcctggtgtttctctgtatcttctcacttctcactggtgttggaaatatgatcttgcgaccctagatggcagccactctggggcagaagagacagtgaccaccttttgaagagctcaaaggagaatattgccccacagggcttagtgggtcccccaggctgaggctggggaggagggccacctttgcctacagcaagtggcatatcattgttctaggggttctcttgacggcagaactttgcctctagctcattttccacagcctagattttccaatcttgccaatccagttgacttctgtcttctcatttccaagccattgttctctctctttcactatctacatggattatccttcattcaaactgctttgtcccggccgggtgcggtggctcatgcctgtagtcctagcactttgggaggccgaggcgggtggatcacgaggtcaggagatcgagaccatcctggctaacatggtgaaaccccgtctctactaaaattaaaaaaattagccgggcgtggtggcaggcgcctgtggtcccggctacttgggaggctgaggcgggagaatggcatgaacccgggaggtggagcttgcagtgggtggagatcgcgccactgcactccagcctgggcgacagagcgagactccgtctgaaaaaaaaaacaaaaaaactgctttgtcctgtaggaatcctgtgcgggttatgtgcacctccctcaatccttaccttgaagctgaggtttcccctcagctctcaagtactcagtttgcactgcaggtagtccctattttaacgaaagttatacggtccagctcagggaatcctgaaaagctgcccttgcttccatggtaatcaaaaggcagttctcatggaataaaagctacctgaagcctgagttgggacctttggctggggaaggtggttgaggacgttctctgattagatgcttggcatgaggtttgctactggaactgctagtgtagaatgtttcagccccctagagttgtccctgtgatgtggctacctcctttctctgggatttctcttaaagtctggggagcccctgcttctcatttcctggaatttatcttcccagtctccctttctggctgaaaatttctagtatcttacagaacagcggtgggatacactggagcacatcatattaccactaagtatgtctaataaatgatgtcctctgatttgacatttcctaaatgtgaagctcctgattttatacaattttgaaattagtaagcttgttagttttgtttgaaattctaggcattggatacacttaacatgagggctacatgtgcatcaacatactctggtttccttccctctgtatcttttttttttttgagatggagtctcactgtctcctaggctggagtgcagtggtgtgatcatggctcactgcagccccaaccttcagggctcaggtgatcctcccgcctcagccacccaagtggctgggaccgcaggtgcatgccaccatgcctggctaacttatttttatatattgtagagacggagtctccctatgttgcctaggctgaccttgagctcttgggctcaggtgatcctcccgccttggcctcccaaagtgttgggattataggcgtgagccactgtgtccagccttttcctctgtatcttgtatccattccccagagcgatactgtgtatccttgaacagacggtttcttgaagtcagagtctatctcctctgtcacttctcccccttcattatctaagactgaggttgtggtttatatgcttagagttgaaagcatggggtccaacgtgttctgtactctgtagttccccagactctccagggaaactacttagctctcaggtggttcttttctgtttttctcagagcaagttatctaataactgaagaggactctgccctttggcctgttcctgactttctaactccttttgctggaggaaggggaggttgaggggggtgccctgtggtgtgaaagccccacttgccctctcctctatactttcttccaatgcagacgggagaaagtatcataaatgtagtgactgtgggtcaggggagctctgagaggccagcacaggaaaccagaaacaaaatgagtcagttcgtaggtggcgatcagaggcaccctgctgagggtgcaaggccacaggtgatgcctcctcagtaggcccaggagcatcaaaacgggaacagtccctttcagccttcaggagcctcccaaatgtcacttagtgatgtcccattcacctgcttaaaggccctgcatcctgccaggtagttggtttgtccatagcatcctgagctctgcttgggtgagccagacaaaaagaatgattcctggccagagtagtgataccagggcccagacagaggcagagagtccggatagaagatcctgtaagctggggtagggagccgaggaggccatggagccaggggaatcattgaagtgagggacaatttctggaggagggaaactgagtaaggaaggcctggccaaggaccaagaaggggacagtatcctgatctatgaaagaagactcaagtggggattgacagagccagattgggtggagtccaagctttgggcaggtgagtgtccaggagatgagggctgagaatgggccttcagagcccagccagaaggggaaagcacaaagctccaccctccttcttcacatccctccatgctgctcaaatcccaggtcttcaggcaccatggaggacaaacgcaacatccagatcatcgagtgggaacacctggacaagaagaagttctacgtgtttggtgtggcaatgacaatgatgatccgtgtcagtgtctacccattcaccctcatccgcacccggttgcaagttcagaaggggaagagcctctaccatgggaccttcgatgccttcatcaagatcctgcgagcagatggtatcactggcctctaccgagggttcctggtcaataccttcaccctcatctctggccagtgttatgtcaccacttatgagctcacccggaagtttgtagctgactacagccagagtaacacagtcaaatcactggtggctggtggctcagcctcccttgtggcccagagcatcacagtgcccattgatgtagtctcccagcacctgatgatgcaacgcaagggtgagaaaatgggccgctttcaggtgcgggggaacccagagggacaaggggtagttgcctttggccaaaccaaggacatcatcaggcagatcctgcaggctgatggacttcgcggcttctatcgaggctatgtggcttcactgcttacctatatcccaaacagtgctgtctggtggcccttctatcacttctatgcagagcagctctcctacctgtgtcctaaggagtgccctcacattgtctttcaagctgtctcggggcccctggctgcagccactgcctccatcctcaccaatcccatggatgtcatacgaacccgtgtgcaggttgagggcaagaactccatcatcctgaccttcagacagctgatggcagaagaagggccttggggcctcatgaagggcctctcggccagaatcatctcagccacaccttccaccattgtcattgtggtgggctatgagagcctcaagaaactcagcctccgacctgagctggtggactcgagacactggtaaccagtggtggggagagaagcctgctgttttccacactaccgtgggtcaggggcagagtggagaggacagcaccctctccaggtgctcccaccacacacccagccctgccctgggccaagtggcctatctgggatagggatagagactttgaactgctcttgctgaagaggctccacgcctggatcccttgcccccactatttaaaattctcttctgagccgggctccctcactcagtccctgtatttgatactggcctaaagaccccaccccccaccctgccagcccttcttctggcttccccttccatctgtgtccctgagaccctgagaagagctgtacatagagcttgcttactaccactggttcttcctcttgggctttcagcccagactccaagcagctgctatcaaccctctctcccttcatctcttagccttgcttatttttattttgggaccgagctgcccactagatgactctgcttttccctgcatttggggctaaggtgccaggtacttatttgcacagggagcaggagcagcaaaaaatctctggttctccagagcactcgtcctctctttggaggggttattaggttgggagaaatgttgatacttttgttttgtgtgtgtgtgtgtgtgtgtgtgtgtgtgtgtgtgtgtgtgtgttttaacatctgtgaaccaggctattagtcctgctaaagcgccaatcctgctgtcagagctcacccccttcctaagacaggtagaaaaatgtaatgtagctttttccacaagccagttccctgtcccttcagtctcaggagccctaggagagtctaagctggggcatcccctggcccagaggactcccgtggtgggcacagttctaagtggatcaggctgtcttgggtgcactggacttggagcactaccttgagaagtcaggttgagaaagtagttgatctagaaggcaacaagtgggcatgtgttccccagcacattacccaggccagcagagccaaacctaggagagggcagtgggtagattctctgccccaggcagccatgacatacacataaataccccaatcactcagacttacggcaacaagtgttgtctcactatggtgatctctaagatccacatcactggatgcgtagtcatcccagtcatggtaccctgtggaggaatgctggaagaacataaagagcagttcagaaagtcacccaataccaggaccactgcatttaccagcctgatactgccaagattatctgatgctctcctcaggagctaggagaggagtgctccttcctccctaccgctactctccccaagcctgtgttgcaggtagagaggtgcagcaaatagagaaggcatgtcaaaccctgcatttctacctgagagtgtgacctggatgatcctccaaaccctattggtcccaccccctgggaaaggccatggtgccagtttgaaaggtgctagctacctgaagccttgatatttcttcatggctgccgcacattcttccaccttggccagaacaggttctgaaaaccgcttctctaccttcaccaccaccactgcccatcttgatctctttgagggttttcccatttcacttgatcttatttttgtttatcccttcctgcactttgtcaagagagtcctccagtttctatccaggaatgttcacatccaaagggttggacccacggatcattctgaatcttcctgcccctcctcactgcttaaccctgagaaccacaaatataatggaagcagttccccccaccctcaccccatctctttaagctcatcctagcaagacctctagagaccctagagactcgactttagccttccccgccatggcacagtggggaaggtgtcaatggggagtgtcacggacaggaggtaggatcctgccgctcgcgtcttagtgtttctccctcaagactttccttctgttttgttgtcttgtgcagtattttacagcccctcttgtgtttttctttatttctcgtacacacacgcagttttaagggtgatgtgtgtataattaaaaggacccttggcccatactttcctaattctttagggactgggattgggtttgactgaaatatgttttggtggggatgggacggtggacttccattctccctaaactggagttttggtcggtaatcaaaactaaaagaaacctctgggagactggaaacctgattggagcactgaggaacaagggaatgaaaaggcagactctctgaacgtttgatgaaatggactcttgtgaaaattaacagtgaatattcactgttgcactgtacgaagtctctgaaatgtaattaaaagtttttattgagcccccg

SEQ ID NO: 32 - protein, 368 aa, Homo sapien
QSQIGWSPSFGQVSVQEMRAENGPSEPSQKGKAQSSTLLLHIPPCCSNPRSSGTMEDKRNIQIIEWEHLDKKKFYVFGVAMTMMIRVSVYPFTLIRTRLQVQKGKSLYHGTFDAFIKILRADGITGLYRGFLVNTFTLISGQCYVTTYELTRKFVADYSQSNTVKSLVAGGSASLVAQSITVPIDVVSQHLMMQRKGEKMGRFQVRGNPEGQGVVAFGQTKDIIRQILQADGLRGFYRGYVASLLTYIPNSAVWWPFYHFYAEQLSYLCPKECPHIVFQAVSGPLAAATASILTNPMDVIRTRVQVEGKNSIILTFRQLMAEEGPWGLMKGLSARIISATPSTIVIVVGYESLKKLSLRPELVDSRHW

SEQ ID NO: 33 - DNA, 3299 bp, Homo sapien
ggctgctttagaagaacaagctggtttggcagctacctcagagaagcaggaccctgggcagcgtgaaagggcctctgcccccagggtggctgggctttggatcctggatccgtgggtcctggaggggcaggagtggttcaggaaacagctctcccagtgaagtgatatcactgcctctgtggacaagacacctccaggagcccagctcacagccaccggtaccttcttccagggctgctgttatagtttctgcatggaaagcacttggaacaatgcctggttgttcccctctttggccctctcagggccctaggagcctttgtgtgtcctgctcacattgtctccagggcctcggacagggcctggtacagaacatatgactgagtttctggagtcccacaggccagcgttggagtcctgacacctcagtatagctgtgcacctctgggcaaatagtttctctgctctgagccccaggacaagctgggggcctccatgggcgcctgagggccaggcgccagggccgtgggcacgagtatggtgagacaccagcccctgcagtactacgagccacagctgtgcctctcctgcctcacgggcatctacggctgccgttggaagcgctaccagcgctcccatgatgataccacaccgtgggagcgcctctggttcctgctcctcaccttcacctttggcctcacgctcacctggctttacttctggtgggaagtccacaatgactatgatgaattcaactggtacctctacaaccgcatgggctactggagcgactggcccgtacccatccttgtgaccacagctgctgccttcgcatacatcgctggcctcctggtcctggcactatgtcacattgccgtggggcagcagatgaacctgcactggctgcacaagatcgggctggtggtcatcctggcttccacggtggtggccatgtcggccgtggcccagctgtgggaggacgagtgggaggtgctgctgatctccctgcagggcacagcgccattcctgcatgtgggggctgtggcagcagtcaccatgctctcctggatcgtggcaggacagttcgcccgtgcagagcggacctcctcccaggtgaccattctctgtaccttcttcaccgtggtgtttgccctctacctggcccctctcaccatctcctctccctgcatcatggagaagaaagacctcggccccaagcctgctctcattggccaccgcggggcccccatgctggctccagagcacacgctcatgtccttccggaaggccctcgagcagaagctgtacgggctccaggctgacattaccatcagcctggacggcgtgcccttcctcatgcatgacaccaccctgcggcgcaccaccaacgtggaggaggagttcccggagctggcccgcaggcctgcctccatgcttaactggaccaccctgcagagactcaacgctggccagtggttcctgaagactgaccccttctggacagccagctccctgtcaccctccgaccacagagaggcccagaaccagtccatctgcagcctggcagagctcctggagctggccaagggcaatgccacactgctgctcaacctgcgtgacccgccccgggagcacccctaccgcagcagttttatcaacgtgactctggaggccgtgctgcactccggcttcccccagcaccaggtcatgtggctgcctagcaggcagaggcccctggtgcggaaggtggctcccggcttccaacagacatcaggctccaaggaggcagtcgccagcctgcggagaggccacatccagcggctgaacctgcgctacactcaggtgtcccgccaggagctcagggactacgcgtcctggaacctgagtgtgaacctctacacagtcaacgcaccgtggctcttctccctgctgtggtgtgcgggggtcccatccgtcacctctgacaactcccacaccctgtcccaggtgccttcccccctctggatcatgcccccggacgagtactgtctcatgtgggtcactgccgacctggtctccttcaccctcatcgtgggcatcttcgtgctccagaagtggcgcctgggtggcatacggagctacaaccctgagcagatcatgctgagtgctgcggtgcgccggaccagccgggacgtcagcatcatgaaggagaagcttattttctcagagatcagcgatggtgtagaggtctccgatgtgctctccgtatgttcagacaacagttatgacacatatgccaacagcaccgccacccctgtgggcccccgagggggtggcagccacaccaagaccctcatagagcggagtgggcgttagctgaagacatgtctgtcccacctgtacctgacacagaagctggggagcctaggagagctggtggaagtgtgtctgaactcggagtgctctgggagcgggctccacagcctccttgtgggctccagccccttgtcagccgcagcctctcttgagggggactccctgtctcctgaggcccagctgggccaggactccatcctttcagatgcccctgcaggcctggggctccttctgggaagtatggggcctagggcttggtccccctcttctgaggccctctcctgtatcccgacctggaagctttgatgggtcatgggccatgccataccccctgtggcaatggagtgtgtggatgctcacctgtgccatctgtcctcctgtctgtgccaggaggcacctgagttctctgctgttatcctgccccaagggcctgggccgagcctctacctgaagcaactctgctcttcctgtcagtctcaaagcacaaggaggttcagcccaggaggaagccagctgcaatgtggagacacgtcctcctccccaacccacctcatgccaccgccaaccccctgccccaggagcgggcctgagccacgtcccctaggagcagctggagatggccaaaagagtgagctcaggactactggatcccatgcccaggtgtccagcagacctcaaggcagaagggtcacctaacccaggagtccacagactgatgtgacctcaggttcccacatcagtggccacagggcagggcccacctggtagaagtgttctggatatggccagggtgggtgtgtggctaagtgggcctgaacagagggaacctagggcccttggccaatgtgattaaagctgccatcttgaaaaaaaaaaaaaaaaaaaaaaaaaaaaaaaaaaaaaaaaaaaaaaaaaaaaaaaaaaaaaaaaaaaaaaaaaaaaaa

SEQ ID NO: 34 - protein, 387 aa, Homo sapien
MEKKDLGPKPALIGHRGAPMLAPEHTLMSFRKALEQKLYGLQADITISLDGVPFLMHDTTLRRTTNVEEEFPELARRPASMLNWTTLQRLNAGQWFLKTDPFWTASSLSPSDHREAQNQSICSLAELLELAKGNATLLLNLRDPPREHPYRSSFINVTLEAVLHSGFPQHQVMWLPSRQRPLVRKVAPGFQQTSGSKEAVASLRRGHIQRLNLRYTQVSRQELRDYASWNLSVNLYTVNAPWLFSLLWCAGVPSVTSDNSHTLSQVPSPLWIMPPDEYCLMWVTADLVSFTLIVGIFVLQKWRLGGIRSYNPEQIMLSAAVRRTSRDVSIMKEKLIFSEISDGVEVSDVLSVCSDNSYDTYANSTATPVGPRGGGSHTKTLIERSGR

SEQ ID NO: 35 - DNA, 2230 bp, Homo sapien
ggcacgaggcacgagggcccgggccgcgagcagccgcggctgtcccggtcgccacccttagcagcggtcgaggtcggtgccgaagcggtgttccccgccttagccgctggcgcctcccaagagagcggccggtgggccctcgtcctgtcagtggcgtcggaggccggcgctgcggtggccgcgcccttctggtgctcggacaccgctgaggagccggggccgggcacggctggctgacggctccgggcagctaaggctgcccgaggagaaggcggcggccgcggcgtaggcgcacgtccggcgggctcctggagcctggaggaggccgaggggaccatgtccgggaggcgcttccacctctccaccaccgaccgcgtcatcaaagctgtcccctttcctccaacccaacggcttactttcaaggaagtatttgagaatgggaaacctaaagttgatgttttaaaaaaccatttggtaaaggaaggacgactggaagaggaagtagccttaaagataatcaatgatggggctgccatcctgaggcaagagaagactatgatagaagtagatgctccaatcacagtatgtggtgatattcatggacaattctttgacctaatgaagttatttgaagttggaggatcacctagtaacacacgctacctctttctgggtgactatgtggacagaggctatttcagtatagagtgtgtgctgtatttatggagtttaaagattaatcatcccaaaacattgtttctgcttcggggaaatcatgaatgcaggcatcttacagactatttcaccttcaaacaggaatgtcgaatcaaatattcggaacaggtgtatgatgcctgtatggagacatttgactgtcttcctcttgctgccctcttaaaccagcagtttctctgtgtacatggaggaatgtcacctgaaattacttctttagatgacattaggaaattagacaggtttacggaacctcccgcctttggacctgtgtgtgacctgctttggtctgatccctcagaggattatggcaatgagaagaccttggagcactatacccacaacactgtccgagggtgctcttatttctacagttaccctgcagtttgtgaatttttgcagaacaataatttactatcaattatcagagcccatgaagcccaagatgctgggtatcgaatgtacaggaagagccaagccacaggctttccatcacttattacaattttctctgcccccaattacctagatgtctataacaataaagctgctgtgttgaaatatgaaaacaatgtcatgaatatcaggcagtttaactgttctccacacccctactggcttccaaactttatggatgttttcacatggtctttgccttttgttggggaaaaagtcacagagatgctggtaaatgtgctcaacatatgctctgatgacgaactgatttctgatgatgaagcagaaggaagcactacagttcgtaaggagatcatcaggaataagatcagagccattgggaagatggcacgggtcttttcaattcttcggcaagaaagtgagagtgtgctgactctcaagggcctgactcccacaggcacactccctctgggcgtcctctcaggaggcaagcagactatcgagacagccacagtagaagcggtagaggcccgggaagccatcagagggttctcgcttcagcacaagatccggagttttgaagaagcgcgaggtctggaccgaattaatgagcgaatgccaccccgaaaggatagcatacacgctggtgggccaatgaaatctgtaacctcagcacactcacatgctgcgcacaggagcgaccaagggaagaaagcccattcatgacttagagtcctgccgtggctcaggtggatctaaaactcaagaacaaattctatttatttattattggaaaatgaaaagcaactcaaaacaacttcaacctggaggtgcatttataattcagtctgcatttattctgtaaaaaggtgactgttttataaattcttttaatttatgttcaatatatataaaaagtgcatctgttttgtttttcccttttttctccataattttaagaaatgaatctgattgttgtcaacacatttgtgaagtcttgtgctataaaggggaacttcccctaataaaagggccttggaaacctcaaaaaaaaaaaaaaaaaaaaaaaaaaaaaaaaaaa

SEQ ID NO: 36 - protein, 512 aa, Homo sapien
MSGRRFHLSTTDRVIKAVPFPPTQRLTFKEVFENGKPKVDVLKNHLVKEGRLEEEVALKIINDGAAILRQEKTMIEVDAPITVCGDIHGQFFDLMKLFEVGGSPSNTRYLFLGDYVDRGYFSIECVLYLWSLKINHPKTLFLLRGNHECRHLTDYFTFKQECRIKYSEQVYDACMETFDCLPLAALLNQQFLCVHGGMSPEITSLDDIRKLDRFTEPPAFGPVCDLLWSDPSEDYGNEKTLEHYTHNTVRGCSYFYSYPAVCEFLQNNNLLSIIRAHEAQDAGYRMYRKSQATGFPSLITIFSAPNYLDVYNNKAAVLKYENNVMNIRQFNCSPHPYWLPNFMDVFTWSLPFVGEKVTEMLVNVLNICSDDELISDDEAEGSTTVRKEIIRNKIRAIGKMARVFSILRQESESVLTLKGLTPTGTLPLGVLSGGKQTIETATVEAVEAREAIRGFSLQHKIRSFEEARGLDRINERMPPRKDSIHAGGPMKSVTSAHSHAAHRSDQGKKAHS

SEQ ID NO: 37 - DNA, 983 bp, Homo sapien
ggcacgaggcctgacatggagcctgccagctccgtcagccctgactcggcccggagctgagctccccacctgccggtagcccaggagatggagcagcccagcccacgtgcccggccttccgcccctgacttcacttgataacaaactagaaactgaaacagggtcgggatgccgatgccggcttggagttagagatgagtcaccgctgagagcagctgcagtagctgagcagtggcagcagagaggcagacgtgagctgagggcgcagaggcaggcagcatctctgagggtccccaaggagcatggctgggagccgtgaggtggtggccatggactgcgagatggtggggctggggccccaccgggagagtggcctggctcgttgcagcctcgtgaacgtccacggtgctgtgctgtacgacaagttcatccggcctgagggagagatcaccgattacagaacccgggtcagcggggtcacccctcagcacatggtgggggccacaccatttgccgtggccaggctagagatcctgcagctcctgaaaggcaagctggtggtgggtcatgacctgaagcacgacttccaggcactgaaagaggacatgagcggctacacaatctacgacacgtccactgacaggctgttgtggcgtgaggccaagctggaccactgcaggcgtgtctccctgcgggtgctgagtgagcgcctcctgcacaagagcatccagaacagcctgcttggacacagctcggtggaagatgcgagggcaacgatggagctctatcaaatctcccagagaatccgagcccgccgagggctgccccgcctggctgtgtcagactgaagccccatccagcccgttccgcagggactagaggctttcggctttttgggacagcaactaccttgcttttggaaaatacatttttaatagtaaagtggctctatattttctctacgcaaaaaaaaaaaaaaaaaa

SEQ ID NO: 38 - protein, 181 aa, Homo sapien
MAGSREVVAMDCEMVGLGPHRESGLARCSLVNVHGAVLYDKFIRPEGEITDYRTRVSGVTPQHMVGATPFAVARLEILQLLKGKLVVGHDLKHDFQALKEDMSGYTIYDTSTDRLLWREAKLDHCRRVSLRVLSERLLHKSIQNSLLGHSSVEDARATMELYQISQRIRARRGLPRLAVSD

SEQ ID NO: 39 - DNA, 2124 bp, Homo sapien
attccgctcttgctttccggcaggtgatggcgccccccgcggcctagaggtccagcgcccgccgcgagcagcggacagtcctcctgttgtgtccgaccgagagtcctggtgactttgaacatgctggtgccgctagccaagctgtcctgcctggcatatcagtgctttcatgccttaaaaattaagaaaaattatctacctctatgtgctataagatggtcttcaacttctactgtgcctcgaattactacccattatactatttatccccgggataaggacaagagatgggaaggagtgaacatggaaaggtttgcagaagaagcagatgttgtaatagttggtgcaggccctgcagggctctctgcagctgttcgtctaaaacagttggctgtggcacatgaaaaggacatccgtgtgtgtctagtggagaaagctgcccagataggagctcatactctctcaggggcttgccttgatccaggtgcttttaaagaactcttcccagactggaaagagaagggggctccacttaacactcctgtaacagaagacagatttggaattttaacagagaaatacagaattcctgtgccaattcttccagggcttccaatgaataatcatggcaattacattgtacgcttgggacatttagtgagctggatgggcgaacaagcagaagcccttggtgttgaagtataccctggttatgcagctgctgaggtcctttttcatgatgatggtagtgtaaaaggaattgccactaacgatgtagggatacaaaaggatggtgcaccaaaggcaacatttgagagaggactggaactacatgctaaagtcacaatttttgcagaaggttgccatggacatctagccaagcaactatataagaagtttgatttgagagcaaattgtgaacctcaaacctacgggattggactgaaggagttatgggttattgatgaaaagaactggaaacctgggagagtagatcacactgttggttggcccttggacagacatacctatggaggatctttcctctatcatttgaatgaaggtgaacccctagtagctcttggtcttgtggttggtctagactatcagaatccatacctgagtccatttagagagttccaaaggtggaaacaccatcctagcattcggccaaccttggaaggtggaaaaaggattgcatacggagccagagctctcaatgaaggtggctttcagtctataccaaaactcacctttcctggtggtttactaattggttgtagtcctggttttatgaatgttcccaagatcaaaggtactcacacagcaatgaaaagtggaattttagcagcagaatctatttttaatcaactaactagtgaaaatctccaatcaaagacaataggactccatgtaactgaatatgaggacaatttgaagaactcatgggtatggaaagagctatattctgttagaaatataagaccgtcctgccacggagtactgggtgtatatggagggatgatttacactggaatcttttactggatattgagaggaatggagccgtggactctgaaacataaaggttctgactttgaacggctcaagccagccaaggattgcacacctattgagtatccaaaacccgatggacagatcagttttgacctcttgtcatctgtggctctgagtggtactaatcatgaacatgaccagccggcacacttaaccttaagggatgacagtatacctgtaaatagaaatctgtcgatatatgatgggcccgagcagcgattctgtcctgcaggagtttatgaatttgtacctgtggaacaaggtgatggatttcggttacagataaatgctcagaactgtgtacattgtaaaacatgtgatattaaagatccaagtcagaatattaactgggtggtacctgaaggtggaggaggacctgcttacaatggaatgtaaactgcagctagccagtttctttcaagtatggcaagctaacgttaaaatgtttagagattaacagatttcagaatgtctttctgcatattactgaacagaatagtcacaaaatgattatcaaataaaaattttatactataaaaaaaaaaa

SEQ ID NO: 40 - protein, 617 aa, Homo sapien
MLVPLAKLSCLAYQCFHALKIKKNYLPLCAIRWSSTSTVPRITTHYTIYPRDKDKRWEGVNMERFAEEADVVIVGAGPAGLSAAVRLKQLAVAHEKDIRVCLVEKAAQIGAHTLSGACLDPGAFKELFPDWKEKGAPLNTPVTEDRFGILTEKYRIPVPILPGLPMNNHGNYIVRLGHLVSWMGEQAEALGVEVYPGYAAAEVLFHDDGSVKGIATNDVGIQKDGAPKATFERGLELHAKVTIFAEGCHGHLAKQLYKKFDLRANCEPQTYGIGLKELWVIDEKNWKPGRVDHTVGWPLDRHTYGGSFLYHLNEGEPLVALGLVVGLDYQNPYLSPFREFQRWKHHPSIRPTLEGGKRIAYGARALNEGGFQSIPKLTFPGGLLIGCSPGFMNVPKIKGTHTAMKSGILAAESIFNQLTSENLQSKTIGLHVTEYEDNLKNSWVWKELYSVRNIRPSCHGVLGVYGGMIYTGIFYWILRGMEPWTLKHKGSDFERLKPAKDCTPIEYPKPDGQISFDLLSSVALSGTNHEHDQPAHLTLRDDSIPVNRNLSIYDGPEQRFCPAGVYEFVPVEQGDGFRLQINAQNCVHCKTCDIKDPSQNINWVVPEGGGGPAYNGM

SEQ ID NO: 41 - DNA, 3774 bp, Homo sapien
atgatgagcttcggcggcgcggacgcgctgctgggcgccccgttcgcgccgctgcatggcggcggcagcctccactacgcgctagcccgaaagggtggcgcaggcgggacgcgctccgccgctggctcctccagcggcttccactcgtggacacggacgtccgtgagctccgtgtccgcctcgcccagccgcttccgtggcgcaggcgccgcctcaagcaccgactcgctggacacgctgagcaacgggccggagggctgcatggtggcggtggccacctcacgcagtgagaaggagcagctgcaggcgctgaacgaccgcttcgccgggtacatcgacaaggtgcggcagctggaggcgcacaaccgcagcctggagggcgaggctgcggcgctgcggcagcagcaggcgggccgctccgctatgggcgagctgtacgagcgcgaggtccgcgagatgcgcggcgcggtgctgcgcctgggcgcggcgcgcggtcagctacgcctggagcaggagcacctgctcgaggacatcgcgcacgtgcgccagcgcctagacgacgaggcccggcagcgagaggaggccgaggcggcggcccgcgcgctggcgcgcttcgcgcaggaggccgaggcggcgcgcgtggacctgcagaagaaggcgcaggcgctgcaggaggagtgcggctacctgcggcgccaccaccaggaagaggtgggcgagctgctcggccagatccagggctccggcgccgcgcaggcgcagatgcaggccgagacgcgcgacgccctgaagtgcgacgtgacgtcggcgctgcgcgagattcgcgcgcagcttgaaggccacgcggtgcagagcacgctgcagtccgaggagtggttccgagtgaggctggaccgactgtcggaggcagccaaggtgaacacagacgctatgcgctcagcgcaggaggagataactgagtaccggcgtcagctgcaggccaggaccacagagctggaggcactgaaaagcaccaaggactcactggagaggcagcgctctgagctggaggaccgtcatcaggccgacattgcctcctaccaggaagccattcagcagctggacgctgagctgaggaacaccaagtgggagatggccgcccagctgcgagaataccaggacctgctcaatgtcaagatggctctggatatagagatagccgcttacagaaaactcctggaaggtgaagagtgtcggattggctttggcccaattcctttctcgcttccagaaggactccccaaaattccctctgtgtccactcacataaaggtgaaaagcgaagagaagatcaaagtggtggagaagtctgagaaagaaactgtgattgtggaggaacagacagaggagacccaagtgactgaagaagtgactgaagaagaggagaaagaggccaaagaggaggagggcaaggaggaagaagggggtgaagaagaggaggcagaagggggagaagaagaaacaaagtctcccccagcagaagaggctgcatccccagagaaggaagccaagtcaccagtaaaggaagaggcaaagtcaccggctgaggccaagtccccagagaaggaggaagcaaaatccccagccgaagtcaagtcccctgagaaggccaagtctccagcaaaggaagaggcaaagtcaccgcctgaggccaagtccccagagaaggaggaagcaaaatctccagctgaggtcaagtcccccgagaaggccaagtccccagcaaaggaagaggcaaagtcaccggctgaggccaagtctccagagaaggccaagtccccagtgaaggaagaagcaaagtcaccggctgaggccaagtccccagtgaaggaagaagcaaaatctccagctgaggtcaagtccccggaaaaggccaagtctccaacgaaggaggaagcaaagtcccctgagaaggccaagtcccctgagaaggccaagtccccagagaaggaagaggccaagtcccctgagaaggccaagtccccagtgaaggcagaagcaaagtcccctgagaaggccaagtccccagtgaaggcagaagcaaagtcccctgagaaggccaagtccccagtgaaggaagaagcaaagtcccctgagaaggccaagtccccagtgaaggaagaagcaaagtcccctgagaaggccaagtccccagtgaaggaagaagcaaagacccccgagaaggccaagtccccagtgaaggaagaagccaagtccccagagaaggccaagtccccagagaaggccaagactcttgatgtgaagtctccagaagccaagactccagcgaaggaggaagcaaggtcccctgcagacaaattccctgaaaaggccaaaagccctgtcaaggaggaggtcaagtccccagagaaggcgaaatctcccctgaaggaggatgccaaggcccctgagaaggagatcccaaaaaaggaagaggtgaagtccccagtgaaggaggaggagaagccccaggaggtgaaagtcaaagagcccccaaagaaggcagaggaagagaaagcccctgccacaccaaaaacagaggagaagaaggacagcaagaaagaggaggcacccaagaaggaggctccaaagcccaaggtggaggagaagaaggaacctgctgtcgaaaagcccaaagaatccaaagttgaagccaagaaggaagaggctgaagataagaaaaaagtccccaccccagagaaggaggctcctgccaaggtggaggtgaaggaagacgctaaacccaaagaaaagacagaggtggccaagaaggaaccagatgatgccaaggccaaggaacccagcaaaccagcagagaagaaggaggcagcaccggagaaaaaagacaccaaggaggagaaggccaagaagcctgaggagaaacccaagacagaggccaaagccaaggaagatgacaagaccctctcaaaagagcctagcaagcctaaggcagaaaaggctgaaaaatcctccagcacagaccaaaaagacagcaagcctccagagaaggccacagaagacaaggccgccaaggggaagtaaggcagggagaaaggaacatccggaacagccaaagaaactcagaagagtcccggagctcaaggatcagagtaacacaattttcactttttctgtctttatgtaagaagaaactgcttagatgacggggcctccttcttcaaacaggaatttctgttagcaatatgttagcaagagagggcactcccaggcccctgcccccatgccctccccaggcgatggacaattatgatagcttatgtagctgaatgtgatacatgccgaatgccacacgtaaacacttgactataaaaactgcccccctcctttccaaataagtgcatttattgcctctatgtgcaactgacagatgaccgcaataatgaatgagcagttagaaatacattatgcttgagatgtcttaacctattcccaaatgccttctgttttccaaaggagtggtcaagcccttgcccagagctctctattctggaagagcggtccaggtggggccgggcactggccactgaattatgccagggcgcactttccactggagttcactttcaattgcttctgtgcaataaaaccaagtgcttataaaatgaaaaaaaaaaaaaaaatgctgttattctctttccctgggaaggctgggggcagggcaggggaggtctggatgtgacaccccagactgcatgggactgagcaagcatcagt

SEQ ID NO: 42 - protein, 1026 aa, Homo sapien
MMSFGGADALLGAPFAPLHGGGSLHYALARKGGAGGTRSAAGSSSGFHSWTRTSVSSVSASPSRFRGAGAASSTDSLDTLSNGPEGCMVAVATSRSEKEQLQALNDRFAGYIDKVRQLEAHNRSLEGEAAALRQQQAGRSAMGELYEREVREMRGAVLRLGAARGQLRLEQEHLLEDIAHVRQRLDDEARQREEAEAAARALARFAQEAEAARVDLQKKAQALQEECGYLRRHHQEEVGELLGQIQGSGAAQAQMQAETRDALKCDVTSALREIRAQLEGHAVQSTLQSEEWFRVRLDRLSEAAKVNTDAMRSAQEEITEYRRQLQARTTELEALKSTKDSLERQRSELEDRHQADIASYQEAIQQLDAELRNTKWEMAAQLREYQDLLNVKMALDIEIAAYRKLLEGEECRIGFGPIPFSLPEGLPKIPSVSTHIKVKSEEKIKVVEKSEKETVIVEEQTEETQVTEEVTEEEEKEAKEEEGKEEEGGEEEEAEGGEEETKSPPAEEAASPEKEAKSPVKEEAKSPAEAKSPEKEEAKSPAEVKSPEKAKSPAKEEAKSPPEAKSPEKEEAKSPAEVKSPEKAKSPAKEEAKSPAEAKSPEKAKSPVKEEAKSPAEAKSPVKEEAKSPAEVKSPEKAKSPTKEEAKSPEKAKSPEKAKSPEKEEAKSPEKAKSPVKAEAKSPEKAKSPVKAEAKSPEKAKSPVKEEAKSPEKAKSPVKEEAKSPEKAKSPVKEEAKTPEKAKSPVKEEAKSPEKAKSPEKAKTLDVKSPEAKTPAKEEARSPADKFPEKAKSPVKEEVKSPEKAKSPLKEDAKAPEKEIPKKEEVKSPVKEEEKPQEVKVKEPPKKAEEEKAPATPKTEEKKDSKKEEAPKKEAPKPKVEEKKEPAVEKPKESKVEAKKEEAEDKKKVPTPEKEAPAKVEVKEDAKPKEKTEVAKKEPDDAKAKEPSKPAEKKEAAPEKKDTKEEKAKKPEEKPKTEAKAKEDDKTLSKEPSKPKAEKAEKSSSTDQKDSKPPEKATEDKAAKGK

SEQ ID NO: 43 - DNA, 430 bp, Homo sapien
gacagccacgaagatcctaccaaaatgaagcgcttcctcttcctcctactcaccatcagcctcctggttatggtacagatacaaactggactctcaggacaaaacgacaccagccaaaccagcagcccctcagcatccagcagcatgagcggaggcattttccttttcttcgtggccaatgccataatccacctcttctgcttcagttgaggtgacacgtctcagccttagccctgtgccccctgaaacagctgccaccatcactcgcaagagaatcccctccatctttgggaggggttgatgccagacatcaccaggttgtagaagttgacaggcagtgccatgggggcaacagccaaaataggggggtaatgatgtaggggccaagcagtgcccagctgggggagaataaagttacccttgtactgca

SEQ ID NO: 44 - protein, 61 aa, Homo sapien
MKRFLFLLLTISLLVMVQIQTGLSGQNDTSQTSSPSASSSMSGGIFLFFVANAIIHLFCFS

SEQ ID NO: 45 - DNA, 2618 bp, Homo sapien
tgcagctagtgtgtcaactcagcgtttctcctctcgtccctggaagagctaaagatggctgaatttctagatgaccaggaaactcgactgtgtgacaactgcaaaaaagaaattcctgtgtttaactttaccatccatgagatccactgtcaaaggaacattggtatgtgtcctacctgtaaggaaccatttcccaaatctgacatggagactcacatggctgcagaacactgtcaggtgacctgcaaatgtaacaagaagttggagaagaggctgttaaagaagcatgaggagactgagtgccctttgcggcttgctgtctgccagcactgtgatttagaactttccattctcaaactgaaggaacatgaagattattgtggtgcccggacggaactatgtggcaactgtggtcgcaatgtccttgtgaaagatctgaagactcaccctgaagtttgtgggagagagggggaggaaaagagaaatgaggttgccatacctcctaatgcatatgatgaatcttggggtcaggatggaatctggattgcatcccaactcctcagacaaattgaggctctggacccacccatgaggctgccgcgaaggcccctgagagcctttgaatcagatgttttccacaatagaactaccaaccaaaggaacattacagcccaggtttcaattcagaataatctgtttgaagaacaagagaggcaggaaaggaatagaggccaacagccccccaaagagggtggtgaagagagtgcaaacttggacttcatgttggccctaagtctgcaaaatgaaggccaagcctccagtgtggcagagcaggacttctggagggccgtatgtgaggccgaccagtctcatggcggtcccaggtctctcagtgacataaagggtgcagctgacgagatcatgttgccttgtgaattttgtgaggagctctacccagaggaactgctgattgaccatcagacaagctgtaacccttcacgtgccttaccttcactcaatactggcagctcttcccccagaggggtggaggaacctgatgtcatcttccagaacttcttgcaacaggctgcaagtaaccagttagactctttgatgggcctgagcaattcacaccctgtggaggagagcatcattatcccatgtgaattctgtggggtacagctggaagaggaggtgctgttccatcaccaggaccagtgtgaccaacgcccagccactgcaaccaaccatgtgacagaggggattcctagactggattcccagcctcaagagacctcaccagagctgcccaggaggcgtgtcagacaccagggagacctgtcttctggttacctggatgatactaagcaggaaacagctaatgggcccacctcctgtctgcctcccagccgacccattaacaatatgacagctacctataaccagctatcgagatcaacatcaggccccagacctgggtgccagcccagctctccttgtgtgccgaagctcagcaactcagacagccaggacatccaggggcggaatcgagacagccagaatggggccatagcccctgggcacgtttcagtgattcgccctcctcaaaatctctacccagaaaacattgtgccctctttctcccctgggccttcagggagatacggagctagtggtaggagtgaaggtggcaggaattcccgggtcacccctgcagctgccaactaccgcagcagaactgcaaaggcaaagccttccaagcaacagggagctggggatgcagaagaggaagaggaggagtaatggtgtctccagagactttacatcggttcctgtcttctgtgcacagcagcacttgccgctgtgcaggcccacctctttggctctttgggtgggagagtttttccagattttagatttttctaggttatggccattttgtgtcttttgaggttgtgctgtgggggtttgggtttgagggaagggagcagggtggcggttgaggaacgcttcagccttagctgctacctttcggcagcagtgaaatacaagctgcagcctcggctgccagggctcccttttgacttattgtcgccactgccccttggtgctgtgtggtcccagtggaaggaggggaagattttggaaacctggtagccaccagtaaggtgattctctgccctgttggggcctaaatttgggggcttttgggcaacctctccgtgtactgcgtctgtccacactcgattgggccccaggtgtgtatgaggcgctctggtaaggtgctcaggccagttgcaatgtctgtcagtaacgaggcttttgatgtgttgagctggaggtgagtggaccgggggctgtgttttaagctgcttccttggcatttgcatcactgccttctgttcccgggggagcatggatcttttgtcctcactgctttctaatggggagggctgagggctccctgtccccacagcaggtatgtttgctctgccccagccccacacttgctctgaaaaccaagtgtcagagccccttccccttgtttttattttactgttataataattattaacttccttgtaatagaaataaagtttgtacttggagttcagctc

SEQ ID NO: 46 - protein, 582 aa, Homo sapien
MAEFLDDQETRLCDNCKKEIPVFNFTIHEIHCQRNIGMCPTCKEPFPKSDMETHMAAEHCQVTCKCNKKLEKRLLKKHEETECPLRLAVCQHCDLELSILKLKEHEDYCGARTELCGNCGRNVLVKDLKTHPEVCGREGEEKRNEVAIPPNAYDESWGQDGIWIASQLLRQIEALDPPMRLPRRPLRAFESDVFHNRTTNQRNITAQVSIQNNLFEEQERQERNRGQQPPKEGGEESANLDFMLALSLQNEGQASSVAEQDFWRAVCEADQSHGGPRSLSDIKGAADEIMLPCEFCEELYPEELLIDHQTSCNPSRALPSLNTGSSSPRGVEEPDVIFQNFLQQAASNQLDSLMGLSNSHPVEESIIIPCEFCGVQLEEEVLFHHQDQCDQRPATATNHVTEGIPRLDSQPQETSPELPRRRVRHQGDLSSGYLDDTKQETANGPTSCLPPSRPINNMTATYNQLSRSTSGPRPGCQPSSPCVPKLSNSDSQDIQGRNRDSQNGAIAPGHVSVIRPPQNLYPENIVPSFSPGPSGRYGASGRSEGGRNSRVTPAAANYRSRTAKAKPSKQQGAGDAEEEEEE

SEQ ID NO: 47 - DNA, 2657 bp, Homo sapien
gaattccgggccatgagctgccccgtgcccgcctgctgcgcgctgctgctagtcctggggctctgccgggcgcgtccccggaacgcactgctgctcctcgcggatgacggaggctttgagagtggcgcgtacaacaacagcgccatcgccaccccgcacctggacgccttggcccgccgcagcctcctctttcgcaatgccttcacctcggtcagcagctgctctcccagccgcgccagcctcctcactggcctgccccagcatcagaatgggatgtacgggctgcaccaggacgtgcaccacttcaactccttcgacaaggtgcggagcctgccgctgctgctcagccaagctggtgtgcgcacaggcatcatcgggaagaagcacgtggggccggagaccgtgtacccgtttgactttgcgtacacggaggagaatggctccgtcctccaggtggggcggaacatcactagaattaagctgctcgtccggaaattcctgcagactcaggatgaccggcctttcttcctctacgtcgccttccacgacccccaccgctgtgggcactcccagccccagtacggaaccttctgtgagaagtttggcaacggagagagcggcatgggtcgtatcccagactggaccccccaggcctacgacccactggacgtgctggtgccttacttcgtccccaacaccccggcagcccgagccgacctggccgctcagtacaccaccgtcggccgcatggaccaaggagttggactggtgctccaggagctgcgtgacgccggtgtcctgaacgacacactggtgatcttcacgtccgacaacgggatccccttccccagcggcaggaccaacctgtactggccgggcactgctgaacccttactggtgtcatccccggagcacccaaaacgctggggccaagtcagcgaggcctacgtgagcctcctagacctcacgcccaccatcttggattggttctcgatcccgtaccccagctacgccatctttggctcgaagaccatccacctcactggccggtccctcctgccggcgctggaggccgagcccctctgggccaccgtctttggcagccagagccaccacgaggtcaccatgtcctaccccatgcgctccgtgcagcaccggcacttccgcctcgtgcacaacctcaacttcaagatgccctttcccatcgaccaggacttctacgtctcacccaccttccaggacctcctgaaccgcaccacagctggtcagcccacgggctggtacaaggacctccgtcattactactaccgggcgcgctgggagctctacgaccggagccgggacccccacgagacccagaacctggccaccgacccgcgctttgctcagcttctggagatgcttcgggaccagctggccaagtggcagtgggagacccacgacccctgggtgtgcgcccccgacggcgtcctggaggagaagctctctccccagtgccagcccctccacaatgagctgtgaccatcccaggaggcctgtgcacacatcccaggcatgtcccagacacatcccacacgtgtccgtgtggccggccagcctggggagtagtggcaacagcccttccgtccacactcccatccaaggagggttcttccttcctgtggggtcactcttgccattgcctggagggggaccagagcatgtgaccagagcatgtgcccagcccctccaccaccaggggcactgccgtcatggcaggggacacagttgtccttgtgtctgaaccatgtcccagcacgggaattctagacatacgtggtctgcggacagggcagcgcccccagcccatgacaagggagtcttgttttctggcttggtttggggacctgcaaatgggaggcctgaggccctcttcaggctttggcagccacagatacttctgaacccttcacagagagcaggcaggggcttcggtgccgcgtgggcagtacgcaggtcccaccgacactcacctgggagcacggcgcctggctcttaccagcgtctggcctagaggaagcctttgagcgacctttgggcaggtttctgcttcttctgttttgcccatggtcaagtccctgttccccaggcaggtttcagctgattggcagcaggctccctgagtgatgagcttgaacctgtggtgtttctgggcagaagcttatcttttttgagagtgtccgaagatgaaggcatggcgatgcccgtcctctggcttgggttaattcttcggtgacactggcattgctgggtggtgatgcccgtcctctggcttgggttaattcttcggtgacactggcgttgctgggtggcaatgcccgtcctctggcttgggttaattcttcggtgacactggcgttgctgggtggcgatgcccgtcctctggcttgggttaattcttggatgacgtcggcgttgctgggagaatgtgccgttcctgccctgcctccacccacctcgggagcagaagcccggcctggacacccctcggcctggacacccctcgaaggagagggcgcttccttgagtaggtgggctccccttgcccttccctccctatcactccatactggggtgggctggaggaggccacaggccagctattgtaaaagcttttt

SEQ ID NO: 48 - protein, 502 aa, Homo sapien
MSCPVPACCALLLVLGLCRARPRNALLLLADDGGFESGAYNNSAIATPHLDALARRSLLFRNAFTSVSSCSPSRASLLTGLPQHQNGMYGLHQDVHHFNSFDKVRSLPLLLSQAGVRTGIIGKKHVGPETVYPFDFAYTEENGSVLQVGRNITRIKLLVRKFLQTQDDRPFFLYVAFHDPHRCGHSQPQYGTFCEKFGNGESGMGRIPDWTPQAYDPLDVLVPYFVPNTPAARADLAAQYTTVGRMDQGVGLVLQELRDAGVLNDTLVIFTSDNGIPFPSGRTNLYWPGTAEPLLVSSPEHPKRWGQVSEAYVSLLDLTPTILDWFSIPYPSYAIFGSKTIHLTGRSLLPALEAEPLWATVFGSQSHHEVTMSYPMRSVQHRHFRLVHNLNFKMPFPIDQDFYVSPTFQDLLNRTTAGQPTGWYKDLRHYYYRARWELYDRSRDPHETQNLATDPRFAQLLEMLRDQLAKWQWETHDPWVCAPDGVLEEKLSPQCQPLHNEL

SEQ ID NO: 49 - DNA, 2417 bp, Homo sapien
tatattggcagttattgagggtaaagcaatatattgtaacagaatgtataaatatttttgataaaacagtctatattttattaaaaaatgaattataacccattttcagttttgcctgcatcataagagtgagcactccattgctttctttcctggccacactgctacaatccagcactaactatccatgtccagggtaaggatcgagatcgagaagcccacactgccagtgaaaaagctacgtctttactgcataaattagaggaagcaatttcggaacaacggaaccttcaaactataaatactgaattatcgaacacttgccaggcacttcagcagaagacaaggaaactgaagaagctttttagatgaggaatttcctcactatgattccctgtcctgcgcagatgcaattcaacaacctcttcaagaaaaattgaagcagtgttgccacaaactatatggtggtcaagaagcaagaatacatcagacacccctgaccttgaaacatacgtgctggtacacacctctgctggatgccttatctctggatagttttacagcagttccaaccctggaatcaacacctttctcaggtgtagccaaccaaatccacactctgtgtgaaaggcccacatatggagaagtaaaggatggtgctttggatgtaaaaagacaacacaagtgcccaggccccacaagtggccccagcccaggaacgaatctctcaggctgcatcaggatgaatgatgacccaagtatggaagagaatggtgttgaacgcgtgtgtcctgagagcctgctgcagtccaggggatattcctcactaccattacccagacacacttcatcgacagacggtactataacttcaagtgatcctggattagaaattctgaatatggcttcttgtgaccttgacagaaactcgctctgtaagaaagaggaggatacaagatcagcttctcccacgatagaggcccaaggcacaagtccagctcatgataatattgcattccaagactctacgagtaaggataaaaccatattaaatctggaagccaaagaggaaccagaaacaatagaagaacataaaaaagaacatgcttcaggagactctgtggtttcccctcttcctgtaaccactgtgaaatcggttaacgttagacaaagtgagaacacttctgctaatgagaaggaggtggaggcagaatttctcagattatctttgggatttaagtgtgactggtttaccttggagaagagagtgaagcttgaagagaggtcccgtgactgggcagaagaaaatttgaagaaagaaatcactaactctttaaaactattagagtctttaacacctctgtgtgaagatgacaaccaggcacaggaaatcattaagaagctggagaagagtataaagtttcttagccagtgtgcagcacgagtggccagtagggctgagatgttgggagccatcaatcaggaaagccgggttagtaaagcagttgaagtgatgattcagcacgtagaaaacttgaagaggatgtatgccaaagagcacgctgaattagaagaactgaaacaggttcttctgcagaatgaaaggtctttcaatcctcttgaagatgatgatgactgccaaattaaaaaacgttcagcttctctaaactccaagccatcttctctacgaagagtgactattgcctctttacccagaaatattggaaatgcaggaatggtggctgggatggaaaataatgatcgattcagtagaaggtcaagcagttggcgtattttggggtcaaagcagagtgaacaccgtccctcattacctcgatttattagcacctattcctgggcagatgctgaagaagaaaaatgtgaactaaaaactaaagatgactcagagccatctggagaagaaacagtagaaaggacaaggaagccaagtctttctgaaaagaaaaataatccatcaaagtgggatgtctcttcagtttatgacacaatagcttcctgggcaacaaatctcaagtcctccatcagaaaggctaataaggccctctggctctctattgcattcattgtactgtttgcagctttgatgagcttcctcacaggccaattattccagaagtctgtggatgccgctcccacacagcaagaggactcatggacgtctctagaacatatcttgtggccatttaccagactccgacacaatgggccaccaccagtgtgacagcaggacatcctaatatatggatcttgatttttaagtttcagtatctgaacttcgtaaattagtaacttttagctgggaaagtatagcatgaaaccagaggttctcagaatgaccgtaagatagcttacatttcctctttttgcctttatctccccaactaaaatacaatggg

SEQ ID NO: 50 - protein, 555 aa, Homo sapien
MESTPFSGVANQIHTLCERPTYGEVKDGALDVKRQHKCPGPTSGPSPGTNLSGCIRMNDDPSMEENGVERVCPESLLQSRGYSSLPLPRHTSSTDGTITSSDPGLEILNMASCDLDRNSLCKKEEDTRSASPTIEAQGTSPAHDNIAFQDSTSKDKTILNLEAKEEPETIEEHKKEHASGDSVVSPLPVTTVKSVNVRQSENTSANEKEVEAEFLRLSLGFKCDWFTLEKRVKLEERSRDWAEENLKKEITNSLKLLESLTPLCEDDNQAQEIIKKLEKSIKFLSQCAARVASRAEMLGAINQESRVSKAVEVMIQHVENLKRMYAKEHAELEELKQVLLQNERSFNPLEDDDDCQIKKRSASLNSKPSSLRRVTIASLPRNIGNAGMVAGMENNDRFSRRSSSWRILGSKQSEHRPSLPRFISTYSWADAEEEKCELKTKDDSEPSGEETVERTRKPSLSEKKNNPSKWDVSSVYDTIASWATNLKSSIRKANKALWLSIAFIVLFAALMSFLTGQLFQKSVDAAPTQQEDSWTSLEHILWPFTRLRHNGPPPV

SEQ ID NO: 51 - DNA, 4656 bp, Homo sapien
ggctggagcggcggcgggcaggcgtgcggaggacactcctgcgaccaggtactggctgtgatcgaacttctcaaccctcagagacttagatcttccacctcactccctcagccaagcctccaggccccctcgtgcatccgtggtggcctctctgccttctctgttctgttctccccatggcccagacatgagtggccccctagaaggggctgatgggggaggggaccccaggcctggggaatcattttgtcctgggggcgtcccatcccctgggcccccacagcaccggccttgcccaggccccagcctggccgatgacaccgatgccaacagcaatggttcaagtggcaatgagtccaacgggcatgagtctagaggcgcatctcagcggagctcacacagctcctcctcaggcaacggcaaggactcagccctgctggagaccactgagagcagcaagagcacaaactctcagagcccatccccacccagcagttccattgcctacagcctcctgagtgccagctcagagcaggacaacccgtccaccagtggctgcagcagtgaacagtcagcccgggcaaggactcagaaggaactcatgacagcacttcgagagctcaagcttcgactgccgccagagcgccggggcaagggccgctctgggaccctggccacgctgcagtacgcactggcctgtgtcaagcaggtgcaggccaaccaggaatactaccagcagtggagcctggaggagggcgagccttgctccatggacatgtccacctataccctggaggagctggagcacatcacgtctgagtacacacttcagaaccaggataccttctcagtggctgtctccttcctgacgggccgaatcgtctacatttcggagcaggcagccgtcctgctgcgttgcaagcgggacgtgttccggggtacccgcttctctgagctcctggctccccaggatgtgggagtcttctatggttccactgctccatctcgcctgcccacctggggcacaggggcctcagcaggttcaggcctcagggactttacccaggagaagtccgtcttctgccgtatcagaggaggtcctgaccgggatccagggcctcggtaccagccattccgcctaaccccgtatgtgaccaagatccgggtctcagatggggcccctgcacagccgtgctgcctgctgattgcagagcgcatccattcgggttacgaagctccccggataccccctgacaagaggattttcactacgcggcacacacccagctgcctcttccaggatgtggatgaaagggctgcccccctgctgggctacctgccccaggacctcctgggggccccagtgctcctgttcctgcatcctgaggaccgacccctcatgctggctatccacaagaagattctgcagttggcgggccagccctttgaccactcccctatccgcttctgtgcccgcaacggggagtatgtcaccatggacaccagctgggctggctttgtgcacccctggagccgcaaggtagccttcgtgttgggccgccacaaagtacgcacggcccccctgaatgaggacgtgttcactcccccggcccccagcccagctccctccctggacactgatatccaggagctgtcagagcagatccaccggctgctgctgcagcccgtccacagccccagccccacgggactctgtggagtcggcgccgtgacatccccaggccctctccacagccctgggtcctccagtgatagcaacgggggtgatgcagaggggcctgggcctcctgcgccagtgactttccaacagatctgtaaggatgtgcatctggtgaagcaccagggccagcagctttttattgagtctcgggcccggcctcagtcccggccccgcctccctgctacaggcacgttcaaggccaaggcccttccctgccaatccccagacccagagctggaggcgggttctgctcccgtccaggccccactagccttggtccctgaggaggccgagaggaaagaagcctccagctgctcctaccagcagatcaactgcctggacagcatcctcaggtacctggagagctgcaacctccccagcaccactaagcgtaaatgtgcctcctcctcctcctataccacctcctcagcctctgacgacgacaggcagaggacaggtccagtctctgtggggaccaagaaagatccgccgtcagcagcgctgtctggggagggggccaccccacggaaggagccagtggtgggaggcaccctgagcccgctcgccctggccaataaggcggagagtgtggtgtccgtcaccagtcagtgtagcttcagctccaccatcgtccatgtgggagacaagaagcccccggagtcggacatcatcatgatggaggacctgcctggtctagccccaggcccagcccccagcccagcccccagccccacagtagcccctgacccagccccagacgcctaccgtccagtggggctgaccaaggccgtgctgtccctgcacacgcagaaggaagagcaagccttcctcagccgcttccgagacctgggcaggctgcgtggactcgacagctcttccacagctccctcagcccttggcgagcgaggctgccaccacggccccgcacccccaagccgccgacaccactgccgatccaaagccaagcgctcacgccaccaccagaaccctcgggctgaagcgccctgctatgtctcacacccctcacccgtgccaccctccaccccctggcccaccccaccagccactacccccttcccagcggttgtccagccctaccctctcccagtgttctctcctcgaggaggcccccagcctcttccccctgctcccacatctgtgcccccagctgctttccccgcccctttggtgaccccaatggtggccttggtgctccctaactatctgttcccaaccccatccagctatccttatggggcactccagacccctgctgaagggcctcccactcctgcctcgcactccccttctccatccttgcccgccctccccccgagtcctcctcaccgcccggactctccactgttcaactcgagatgcagctctccactccagctcaatctgctgcagctggaggagctcccccgtgctgagggggctgctgttgcaggaggccctgggagcagtgccgggcccccacctcccagtgcggaggctgctgagccagaggccagactggcggaggtcactgagtcctccaatcaggacgcactttccggctccagtgacctgctcgaacttctgctgcaagaggactcgcgctccggcacaggctccgcagcctcgggctccttgggctctggcttgggctctgggtctggttcaggctcccatgaagggggcagcacctcagccagcatcactcgcagcagccagagcagccacacaagcaaatactttggcagcatcgactcttccgaggctgaggctggggctgctcggggcggggctgagcctggggaccaggtgattaagtacgtgctccaggatcccatttggctgctcatggccaatgctgaccagcgcgtcatgatgacctaccaggtgccctccagggacatgacctctgtgctgaagcaggatcgggagcggctccgagccatgcagaagcagcagcctcggttttctgaggaccagcggcgggaactgggtgctgtgcactcctgggtccggaagggccaactgcctcgggctcttgatgtgatggcctgtgtggactgtgggagcagcacccaagatcctggtcaccctgatgacccactcttctcagagctggatggactggggctggagcccatggaagagggtggaggcgagcagggcagcagcggtggcggcagtggtgagggagagggctgcgaggaggcccaaggcggggccaaggcttcaagctctcaggacttggctatggaggaggaggaagaaggcaggagctcatccagtccagccttacctacagcaggaaactgcaccagctagactccattctgggaccatctccaggagtccatgagaggctttcttctcctatgtcccaattctcagaactcagatgtggctagaccaaccagtgggaaactgccccagcttctcccaccatagggggccggacccccatcaccagcctaggatccaggggctgcctctggcctcttagggagcagagagcagaactccgcagcccagcccagaggagtgtcacctcccacctttggagaggaatccttccctcccctggacaaagttgctgacaagctgctgaagtggcctctccatattccagctgagcctgaatctgactcttgagggttggggctgcacttatttattgcggggagacagctctctctcccacctcctccccagatgggaggagagcctgaggcccaagcaggacccgggggttccagcccctagctgctctggagtgggggaggttggtggaccatggagtccctggtgctgcccctcaggtgggacccaggggttctcagctgtaccctctgccgatggcatttgtgtttttgatatttgtgtctgttactacttttttaatacaaaaagataaaaacgcc

SEQ ID NO: 52 - protein, 1290 aa, Homo sapien
MSGPLEGADGGGDPRPGESFCPGGVPSPGPPQHRPCPGPSLADDTDANSNGSSGNESNGHESRGASQRSSHSSSSGNGKDSALLETTESSKSTNSQSPSPPSSSIAYSLLSASSEQDNPSTSGCSSEQSARARTQKELMTALRELKLRLPPERRGKGRSGTLATLQYALACVKQVQANQEYYQQWSLEEGEPCSMDMSTYTLEELEHITSEYTLQNQDTFSVAVSFLTGRIVYISEQAAVLLRCKRDVFRGTRFSELLAPQDVGVFYGSTAPSRLPTWGTGASAGSGLRDFTQEKSVFCRIRGGPDRDPGPRYQPFRLTPYVTKIRVSDGAPAQPCCLLIAERIHSGYEAPRIPPDKRIFTTRHTPSCLFQDVDERAAPLLGYLPQDLLGAPVLLFLHPEDRPLMLAIHKKILQLAGQPFDHSPIRFCARNGEYVTMDTSWAGFVHPWSRKVAFVLGRHKVRTAPLNEDVFTPPAPSPAPSLDTDIQELSEQIHRLLLQPVHSPSPTGLCGVGAVTSPGPLHSPGSSSDSNGGDAEGPGPPAPVTFQQICKDVHLVKHQGQQLFIESRARPQSRPRLPATGTFKAKALPCQSPDPELEAGSAPVQAPLALVPEEAERKEASSCSYQQINCLDSILRYLESCNLPSTTKRKCASSSSYTTSSASDDDRQRTGPVSVGTKKDPPSAALSGEGATPRKEPVVGGTLSPLALANKAESVVSVTSQCSFSSTIVHVGDKKPPESDIIMMEDLPGLAPGPAPSPAPSPTVAPDPAPDAYRPVGLTKAVLSLHTQKEEQAFLSRFRDLGRLRGLDSSSTAPSALGERGCHHGPAPPSRRHHCRSKAKRSRHHQNPRAEAPCYVSHPSPVPPSTPWPTPPATTPFPAVVQPYPLPVFSPRGGPQPLPPAPTSVPPAAFPAPLVTPMVALVLPNYLFPTPSSYPYGALQTPAEGPPTPASHSPSPSLPALPPSPPHRPDSPLFNSRCSSPLQLNLLQLEELPRAEGAAVAGGPGSSAGPPPPSAEAAEPEARLAEVTESSNQDALSGSSDLLELLLQEDSRSGTGSAASGSLGSGLGSGSGSGSHEGGSTSASITRSSQSSHTSKYFGSIDSSEAEAGAARGGAEPGDQVIKYVLQDPIWLLMANADQRVMMTYQVPSRDMTSVLKQDRERLRAMQKQQPRFSEDQRRELGAVHSWVRKGQLPRALDVMACVDCGSSTQDPGHPDDPLFSELDGLGLEPMEEGGGEQGSSGGGSGEGEGCEEAQGGAKASSSQDLAMEEEEEGRSSSSPALPTAGNCTS

SEQ ID NO: 53 - DNA, 2349 bp, Homo sapien
gctcttatcggttcccatcccagttgttgatcttatgcaagacgctgcacgaccccgcgcccgcttgtcgccacggcacttgaggcagccggagatactctgagttactcggagcccgacgcctgagggtgagatgaacgcgctggcctccctaaccgtccggacctgtgatcgcttctggcagaccgaaccggcgctcctgcccccggggtgacgcgcagcccccagccgcccagacacatggccccaggccaagcaccccatcaggctaccccgtggagggatgcccaccctttcttcctcctgtccccagtgatgggcctcctcagccgcgcctggagccgcctgaggggcctgggacctctagagccctggctggtggaagcagtaaaaggagcagctctggtagaagctggcctggagggagaagctaggactcctctggcaatcccccataccccttggggcagacgccctggagaggaggctgaagacagtggaggccctggagaggacagagaaacactggggctgaaaaccagcagttcccttcctgaagcctggggacttttggatgatgatgatggcatgtatggtgagcgagaggcaaccagtgtccctagagggcagggaagtcaatttgcagatggccagcgtgctcccctgtctcccagccttctgataaggacactgcaaggttctgataagaacccaggggaggagaaagccgaggaagagggagttgctgaagaggagggagttaacaagttctcttatccaccatcacaccgggagtgttgtccagccgtggaggaggaggacgatgaagaagctgtaaagaaagaagctcacagaacctctacttctgccttgtctccaggatccaagcccagcacttgggtgtcttgcccaggggaggaagagaatcaagccacggaggataaaagaacagaaagaagtaaaggagccaggaagacctccgtgtccccccgatcttcaggctccgaccccaggtcctgggagtatcgttcaggagaggcgtccgaggagaaggaggaaaaggcacacgaagaaactgggaaaggagaagctgccccagggccgcaatcctcagccccagcccagaggccccagctcaagtcctggtggtgccaacccagtgatgaagaggagagtgaggtcaagcctttgggggcagctgagaaggatggagaagctgagtgtcctccctgcatccccccaccaagtgccttcctgaaggcctgggtgtattggccaggagaggacacagaggaagaggaagatgaggaagaagatgaggacagtgactctggatcagatgaggaagagggagaagctgaggcttcctcttccactcctgctacaggtgtcttcttgaagtcctgggtctatcagccaggagaggacacagaggaggaggaagatgaggacagtgatacaggatcagccgaggatgaaagagaagctgagacttctgcttccacaccccctgcaagtgctttcttgaaggcctgggtgtatcggccaggagaggacacggaggaggaggaagatgaggatgtggatagtgaggataaggaagatgattcagaagcagccttaggagaagctgagtcagacccacatccctcccacccggaccagagtgcccacttcaggggctggggatatcgacctggaaaagagacagaggaagaggaagctgctgaggactggggagaagctgagccctgccccttccgagtggccatctatgtacctggagagaagccaccgcctccctgggctcctcctaggctgcccctccgactgcaaaggcggctcaagcgcccagaaacccctactcatgatccggaccctgagactcccctaaaggccagaaaggtgcgcttctccgagaaggtcactgtccatttcctggctgtctgggcagggccggcccaggccgcccgccagggcccctgggagcagcttgctcgggatcgcagccgcttcgcacgccgcatcgcccaggcccaggaggagctgagcccctgcctcacccctgctgcccgggccagagcctgggcacgcctcaggaacccacctttagcccccatccctgccctcacccagaccttgccttcctcctctgtcccttcgtccccagtccagaccacgcccttgagccaagctgtggctacaccttcccgctcctctgctgctgcagcggctgccctggacctcagtgggaggcgtggctgagaccaactggtttgcctataatttattaactatttattttttctaagtgtgggtttatataaggaataaagccttttgatttgt

SEQ ID NO: 54 - protein, 674 aa, Homo sapien
MAPGQAPHQATPWRDAHPFFLLSPVMGLLSRAWSRLRGLGPLEPWLVEAVKGAALVEAGLEGEARTPLAIPHTPWGRRPGEEAEDSGGPGEDRETLGLKTSSSLPEAWGLLDDDDGMYGEREATSVPRGQGSQFADGQRAPLSPSLLIRTLQGSDKNPGEEKAEEEGVAEEEGVNKFSYPPSHRECCPAVEEEDDEEAVKKEAHRTSTSALSPGSKPSTWVSCPGEEENQATEDKRTERSKGARKTSVSPRSSGSDPRSWEYRSGEASEEKEEKAHEETGKGEAAPGPQSSAPAQRPQLKSWWCQPSDEEESEVKPLGAAEKDGEAECPPCIPPPSAFLKAWVYWPGEDTEEEEDEEEDEDSDSGSDEEEGEAEASSSTPATGVFLKSWVYQPGEDTEEEEDEDSDTGSAEDEREAETSASTPPASAFLKAWVYRPGEDTEEEEDEDVDSEDKEDDSEAALGEAESDPHPSHPDQSAHFRGWGYRPGKETEEEEAAEDWGEAEPCPFRVAIYVPGEKPPPPWAPPRLPLRLQRRLKRPETPTHDPDPETPLKARKVRFSEKVTVHFLAVWAGPAQAARQGPWEQLARDRSRFARRIAQAQEELSPCLTPAARARAWARLRNPPLAPIPALTQTLPSSSVPSSPVQTTPLSQAVATPSRSSAAAAAALDLSGRRG

SEQ ID NO: 55 - DNA, 738 bp, Homo sapien
gtatctgtggtaaacccagtgacacgggggagatgacatacaaaaagggcaggacctgagaaagattaagctgcaggctccctgcccataaaacagggtgtgaaaggcatctcagcggctgccccaccatggctacctgggccctcctgctccttgcagccatgctcctgggcaacccaggtctggtcttctctcgtctgagccctgagtactacgacctggcaagagcccacctgcgtgatgaggagaaatcctgcccgtgcctggcccaggagggcccccagggtgacctgttgaccaaaacacaggagctgggccgtgactacaggacctgtctgacgatagtccaaaaactgaagaagatggtggataagcccacccagagaagtgtttccaatgctgcgacccgggtgtgtaggacggggaggtcacgatggcgcgacgtctgcagaaatttcatgaggaggtatcagtctagagttacccagggcctcgtggccggagaaactgcccagcagatctgtgaggacctcaggttgtgtataccttctacaggtcccctctgagccctctcaccttgtcctgtggaagaagcacaggctcctgtcctcagatcccgggaacctcagcaacctctgccggctcctcgcttcctcgatccagaatccactctccagtctccctcccctgactccctctgctgtcctcccctctcacgagaataaagtgtcaagcaag

SEQ ID NO: 56 - protein, 145 aa, Homo sapien
MATWALLLLAAMLLGNPGLVFSRLSPEYYDLARAHLRDEEKSCPCLAQEGPQGDLLTKTQELGRDYRTCLTIVQKLKKMVDKPTQRSVSNAATRVCRTGRSRWRDVCRNFMRRYQSRVTQGLVAGETAQQICEDLRLCIPSTGPL

SEQ ID NO: 57 - DNA, 1440 bp, Homo sapien
ctcttcttgtggcttttacaacttcatttctttctggggtcacctgtgatgggctttgatgtggtgtcaatttggggccttgtgtttgtgccagagggatacacatattaaactgcaggccaccttcctggtccagactgtactgtgtgaaccccactgactaaattagtgagaaccataggcgttggaatttctcaccttttacaatgatagacttttgcattgggaccaatgaatctggtgtgaaaaaccctgctgtagtagtgaaagagcatcaggagatactgactgtacctgagggccaaaacaggagcaggtaacgaaccgtaaaaaaaggagcaggtaatgaatcgtaaccaaaactacagttgatcctccgcaaaggaaagctctttacccagaatgtccttccagagtcattcaggaaggacaagggaacacccttgggaaatgggctagtggagggctgttgactgcagtgacacctgggtgctccggaggtatctgttctgttgacctgtaaggaagcagtcgatcctagagtgtcagaacagagccattctctcctcctgagtaggaacgtttctgttcagtttccctcacagcagcctgtgttagcatgcagttgaaaatactgccgtctaggagaacctgtggtcactgggaacgtgccccacagtgactggccatgcaaccaggtgatttttaggaatagatgtctctagactctgtctcctttcctacaaggcctcacacagatgcttgaggctaatggcccccattctgaggtcatttttgtgtagaactcctttccccaggagagagccttatctctgccctcctttaccctgaaggcttcaaacggaagacaggacctagatctaaacctagatactagcattttgtgggattgtctagaatttggggaagatttgggttcctaagatgcacaagcgttttacaccagtggtgattaactcaactaaaacccactgtaggaagttagcttccccagacagctaatgccgagatcttctaccagcgtagagttgacagaagcaggccagcgaggaggtgtgggacataatagcctgagtgcttgggttaccatggagactggagtgtgtgaggccacagcctgtgctaaagagccatggagccctcccctggccatgtctggggacagatagaacctgttgggggaaatattccctcaccccagggttctttctgcagagcaagggttgcctttgtcctatccctgagcttgctcaacaagagaaacaaggtttcttaagtgttttggttaaagttttcattcttatttgactatgtatatgtaattgtaaagaaacgatcctatgcattgtctttcttttatattcttgtaatattctgaaattaaaattgttttgtttcataaaaaaaaaaaaaaaaaaa

SEQ ID NO: 58 - protein, 37 aa, Homo sapien
MIDFCIGTNESGVKNPAVVVKEHQEILTVPEGQNRSR

SEQ ID NO: 59 - DNA, 2836 bp, Homo sapien
atggcggcggccgtagcggctccactcgccgccgggggtgaggaggcggcagccacgacctccgtgcccgggtctccaggtctgccggggagacgcagtgcagagcgggccctagaggacgccgtggccaccgggaccctgaacctgtctaaccggcgcttgaagcacttcccccggggcgcggcccgtagctacgacctgtcagacatcacccaggctgacctgtcccggaaccggtttcccgaggtgcccgaggcggcgtgccagctggtgtccctggagggcctgagcctctaccacaattgcctgagatgcctgaacccagccttggggaatctcacagccctcacctacctcaacctcagccgaaaccagctgtcgctgctgccaccctacatctgccagctgcccctgagggtcctcatcgtcagcaacaacaagctgggagccctgccccctgacatcggcaccctgggaagcctgcgacagcttgacgtgagcagcaacgagctccaatccctgccctcggaactgtgtggcctctcttccctgcgggacctcaatgtccggaggaaccagctcagtacgctgcccgaagagctgggggacctccctctggtccgcctggatttctcctgtaaccgcgtctcccgaatcccagtctccttctgccgcctgaggcacctgcaggtcattctgctggacagcaaccctctgcagagtccacctgcccaggtctgcctgaaggggaaacttcacatcttcaagtatttgtccacagaggccgggcagcgtgggtcggccctgggggacctggccccttctcggcccccgagtttcagtccctgccctgcagaggatctatttccgggacatcggtacgatggtgggctggactcaggcttccacagcgttgatagtggcagcaagaggtggtctggaaatgagtcaacagatgaattttcagagctgtcattccggatctcagagctggcccgggagccccgggggcccagagaacgcaaggaggatggctcagcggacggagaccctgtgcagattgacttcatcgacagccatgtccccggggaggatgaagagcgaggcactgtggaggagcagcgaccacccgaattaagccctggggcaggggacagggagagggcaccaaacagcaggcgggaggagccggcaggggaggagcggcggcgcccggacaccttgcagctgtggcaggagcgggaacggcggcagcagcagcagagcggggcgtggggggccccgaggaaggatagcctcttgaagccagggctcagggctgttgtgggaggggccgccgccgtgtccactcaagccatgcacaacggctcgcctaagtccagtgcctcccaagcagggggctgcagcggggcagggagccccgcccctgcccctgcctcccaagagccccttcccatagctggaccagcgacagcacctgctccacggccacttggctccattcagagaccaaacagcttcctcttccgttcctcctctcagagtggctcaggcccttcctcaccagactctgtcctgagacctcggcggtacccccaggttccagatgagaaggacttaatgactcagctgcgccaggtccttgagtcccggctgcagcggcccctgcctgaggacctggccgaggctctggccagtggggtcatcctgtgccagctggccaaccagctacggccgcgctccgtgcccttcatccatgtgccctcccctgctgtgccaaaactcagtgccctcaaggctcggaagaatgtggagagttttctagaagcctgtcgaaaaatgggggtgcctgaggctgacctgtgctcgccctcggatctcctccagggcactgcccgggggctgcggaccgcgctggaggccgtgaagcgggtggggggcaaggccctaccgcccctctggcccccctctggtctgggcggcttcgtcgtcttctacgtggtcctcatgctgctgctctatgtcacctacactcggctcctggatccccgttccccccaggtggcctgggaggtggccccctcgaggatgactccactagcgccctgggaccccaagtatgaagccaaagcaggacctcggccggtgtgggtgagttgggggcaaacctgtgggactggctggggtgctcagggagctgtgcggtggcctgaggctccagtgctctgtcctcctcaccctagggggccaactgtagctcaggagcctcgttctcaggccggacgctgtgtcacccctcattctggccgctgtatgaagcagcctcgggcaggggtctcaggcccgtggcccctgccacagggcactggaatggacagcaggcgcccccagatgcagggttcccggtggtgtgctgtgaagatgtcttcctctcggaccctctgctgccccgggggcagcgtgttcccctgtacctgtccaaggccccccagcagatgatgggctccctgaaactgctgccgccgccccccatcatgtctgccagggtgctcccccgcccatcaccctcccggggcccctccactgcctggctcagcgggccggagctgatcgctctcactggcctgctgcagatgagccagggggagcctaggcccagctcctccgcggttggccccccagaccatacctctgacccacccagcccctgtggtagccccagcagttctcagggtgctgacctctctctcccacagaccccagacacccattgtccatagccttctcagggcagagtgggctggttgtgttgacaataaaacagtgttggtttgca

SEQ ID NO: 60 - protein, 832 aa, Homo sapien [sequence omitted]

SEQ ID NO: 61 - DNA, 1670 bp, Homo sapien
gcgcggcccatgtcctccgcgccgcgctcgcccaccccgcggccccgcaggatgaagaaggacgagtcgttcctgggcaagctgggcggcaccctggccaggaagcggagggcgcgcgaggtgagtgacctgcaggaagaaggcaagaatgccatcaactcaccgatgtcccccgccctggtggatgttcaccctgaagacacccagcttgaggagaacgaggagcgcacgatgattgaccccacttccaaggaagaccccaagttcaaggaactggtcaaggtcctcctcgactggattaatgacgtgctggtggaggagaggatcattgtgaagcagctggaggaagacctgtatgacggccaggtgctgcagaagctcttggaaaaactggcagggtgcaagctgaatgtggctgaggtgacacagtccgaaatagggcagaaacagaagctgcagacggtgctggaagcagtacatgacctgctgcggccccgaggctgggcgctccggtggagcgtggactcaattcacgggaagaacctggtggccatcctccacctgctggtctctctggccatgcacttcagggcccccatccgccttcctgagcatgtaacggtgcaggtggtggtcgtgcggaaacgggaaggcctgctgcattccagccacatctcggaggagctgaccacaactacagagatgatgatgggccggttcgagcgggatgccttcgacacgctgttcgaccacgccccggataagctcagcgtggtgaagaagtctctcatcacttttgtgaacaagcacctgaacaagctgaatttggaggtgacggaactggagacccagtttgcagatggcgtgtacctggttctgctcatgggccttctggaagactactttgttcctctccaccacttctacctgactccggaaagcttcgatcagaaggtccacaatgtgtccttcgcctttgagctgatgctggacggaggcctcaagaaacccaaggctcgtcctgaagacgtggttaacttggacctcaaatccaccctgagggttctttacaacctgttcaccaagtacaagaacgtggagtgacgggggagctgtggatggtggcaggagtgtcccagcaagaaaggcggcatccgtctgtgccctgtgcctttccagggagccaggcgccatgggcttctggtccaagctgtgttgactgtcatccccaccccacccctacctcacgcctgccccaccccctgcctcttttggttgttgttcttaatctcctctccatgtagttcccagtgggcaagagcctttgaaaatgcaggattctaaacactcgtgcttgcgtttgaagcctcgcgtcactcagtcgcgtgggatgatgagtccgttgttgtctgccttggccgaaagatgaaaaaaagcctgaaccccaacccccagctggttgagagcaccctgcattctgcctcatggtgcagttagcgatcacaggccttcagaagtacaacatcagctcagcaggaacgccggctccccgaggacccaggcttgacgattcaccggggatctcctgggctgggctctccttggaagtgaggccttttattaaaaataaaagggttttgcagtttgaaaaaaaaaaaaaaaaaaaaaaa

SEQ ID NO: 62 - protein, 364 aa, Homo sapien
MSSAPRSPTPRPRRMKKDESFLGKLGGTLARKRRAREVSDLQEEGKNAINSPMSPALVDVHPEDTQLEENEERTMIDPTSKEDPKFKELVKVLLDWINDVLVEERIIVKQLEEDLYDGQVLQKLLEKLAGCKLNVAEVTQSEIGQKQKLQTVLEAVHDLLRPRGWALRWSVDSIHGKNLVAILHLLVSLAMHFRAPIRLPEHVTVQVVVVRKREGLLHSSHISEELTTTTEMMMGRFERDAFDTLFDHAPDKLSVVKKSLITFVNKHLNKLNLEVTELETQFADGVYLVLLMGLLEDYFVPLHHFYLTPESFDQKVHNVSFAFELMLDGGLKKPKARPEDVVNLDLKSTLRVLYNLFTKYKNVE

SEQ ID NO: 63 - DNA, 6662 bp, Homo sapien
ggcggttaagtcctgtacctaggaaagagggcgagctctggggcgctctccggtgtcatgaggagcttcaaaagagtcaactttgggactctgctaagcagccagaaggaggctgaagagttgctgcccgacttgaaggtgggggtgctgcctggctcgggatacacctggctttccaaactgagctgttttgtgtttgccttttgaagagatggataagagttcctgtccaaccctccagctggttttcccagcagccgatctgatgctgagaggagacaagcttgtgatgccatcctgagggcttgcaaccagcagctgactgctaagctagcttgccctaggcatctggggagcctgctggagctggcagagctggcctgtgatggctacttagtgtctaccccacagcgtcctcccctctacctggaacgaattctctttgtcttactgcggaatgctgctgcacaaggaagcccagaggccacactccgccttgctcagcccctccatgcctgcttggtgcagtgctctcgcgaggctgctccccaggactatgaggccgtggctcggggcagcttttctctgctttggaagggggcagaagccctgttggaacggcgagctgcatttgcagctcggctgaaggccttgagcttcctagtactcttggaggatgaaagtaccccttgtgaggttcctcactttgcttctccaacagcctgtcgagcggtagctgcccatcagctatttgatgccagtggccatggtctaaatgaagcagatgctgatttcctagatgacctgctctccaggcacgtgatcagagccttggtgggtgagagagggagctcttctgggcttctttctccccagagggccctctgcctcttggagctcaccttggaacactgccgtcgcttttgctggagccgccaccatgacaaagccatcagcgcagtggagaaggctcacagttacctaaggaacaccaatctagcccctagccttcagctatgtcagctgggggttaagctgctgcaggtcggggaggaaggacctcaggcagtggccaagcttctgatcaaggcatcagctgtcctgagcaagagtatggaggcaccatcacccccacttcgggcattgtatgagagctgccagttcttcctttcaggcctggaacgaggcaccaagaggcgctatagacttgatgccattctgagcctctttgcttttcttggagggtactgctctcttctgcagcagctgcgggatgatggtgtgtatgggggctcctccaagcaacagcagtcttttcttcagatgtactttcagggacttcacctctacactgtggtggtttatgactttgcccaaggctgtcagatagttgatttggctgacctgacccaactagtggacagttgtaaatctaccgttgtctggatgctggaggccttagagggcctgtcgggccaagagctgacggaccacatggggatgaccgcttcttacaccagtaatttggcctacagcttctatagtcacaagctctatgccgaggcctgtgccatctctgagccgctctgtcagcacctgggtttggtgaagccaggcacttatcccgaggtgcctcctgagaagttgcacaggtgcttccggctacaagtagagagtttgaagaaactgggtaaacaggcccagggctgcaagatggtgattttgtggctggcagccctgcaaccctgtagccctgaacacatggctgagccagtcactttctgggttcgggtcaagatggatgcggccagggctggagacaaggagctacagctaaagactctgcgagacagcctcagtggctgggacccggagaccctggccctcctgctgagggaggagctgcaggcctacaaggcggtgcgggccgacactggacaggaacgcttcaacatcatctgtgacctcctggagctgagccccgaggagacaccagccggggcctgggcacgagccacccacctggtagaactggctcaggtgctctgctaccacgactttacgcagcagaccaactgctctgctctggatgctatccgggaagccctgcagcttctggactctgtgaggcctgaggcccaggccagagatcagcttctggacgataaagcacaggccttgctgtggctttacatctgtactctggaagccaaaatacaggaaggtatcgagcgggatcggagagcccaggcccctggtaacttggaggaatttgaagtcaatgacctgaactatgaagataaactccaggaagatcgtttcctatacagtaacattgccttcaacctggctgcagatgctgctcagtccaaatgcctggaccaagccctggccctgtggaaggagctgcttacaaaggggcaggccccagctgtacggtgtctccagcagacagcagcctcactgcagatcctagcagccctctaccagctggtggcaaagcccatgcaggctctggaggtcctcctgctgctacggattgtctctgagagactgaaggaccactcgaaggcagctggctcctcctgccacatcacccagctcctcctgaccctcggctgtcccagctatgcccagttacacctggaagaggcagcatcgagcctgaagcatctcgatcagactactgacacatacctgctcctttccctgacctgtgatctgcttcgaagtcaactctactggactcaccagaaggtgaccaagggtgtctctctgctgctgtctgtgcttcgggatcctgccctccagaagtcctccaaggcttggtacttgctgcgtgtccaggtcctgcagctggtggcagcttaccttagcctcccgtcaaacaacctctcacactccctgtgggagcagctctgtgcccaaggctggcagacacctgagatagctctcatagactcccataagctcctccgaagcatcatcctcctgctgatgggcagtgacattctctcaactcagaaagcagctgtggagacatcgtttttggactatggtgaaaatctggtacaaaaatggcaggttctttcagaggtgctgagctgctcagagaagctggtctgccacctgggccgcctgggtagtgtgagtgaagccaaggccttttgcttggaggccctaaaacttacaacaaagctgcagataccacgccagtgtgccctgttcctggtgctgaagggcgagctggagctggcccgcaatgacattgatctctgtcagtcggacctgcagcaggttctgttcttgcttgagtcttgcacagagtttggtggggtgactcagcacctggactctgtgaagaaggtccacctgcagaaggggaagcagcaggcccaggtcccctgtcctccacagctcccagaggaggagctcttcctaagaggccctgctctagagctggtggccactgtggccaaggagcctggccccatagcaccttctacaaactcctccccagtcttgaaaaccaagccccagcccatacccaacttcctgtcccattcacccacctgtgactgctcgctctgcgccagccctgtcctcacagcagtctgtctgcgctgggtattggtcacggcaggggtgaggctggccatgggccaccaagcccagggtctggatctgctgcaggtcgtgctgaagggctgtcctgaagccgctgagcgcctcacccaagctctccaagcttccctgaatcataaaacacccccctccttggttccaagcctcttggatgagatcttggctcaagcatacacactgttggcactggagggcctgaaccagccatcaaacgagagcctgcagaaggttctacagtcagggctgaagtttgtagcagcacggataccccacctagagccctggcgagccagcctgctcttgatttgggccctcacaaaactaggtggcctcagctgctgtactacccaactttttgcaagctcctggggctggcagccaccattaataaaaagtgtccctggctcagagccctctaagactcagggccaaaaacgttctggacgagggcgccaaaagttagcctctgctcccctgagcctcaataatacctctcagaaaggtctggaaggtagaggactgccctgcacacctaaacccccagaccggatcaggcaagctggccctcatgtccccttcacggtgtttgaggaagtctgccctacagagagcaagcctgaagtaccccaggcccccagggtacaacagagagtccagacgcgcctcaaggtgaacttcagtgatgacagtgacttggaagaccctgtctcagctgaggcctggctggcagaggagcctaagagacggggcactgcttcccggggccgggggcgagcaaggaagggcctgagcctaaagacggatgccgtggttgccccaggtagtgcccctgggaaccctggcctgaatggcaggagccggagggccaagaaggtggcatcaagacattgtgaggagcggcgtccccagagggccagtgaccaggccaggcctggccctgagatcatgaggaccatccctgaggaagaactgactgacaactggagaaaaatgagctttgagatcctcaggggctctgacggggaagactcagcctcaggtgggaagactccagctccgggccctgaggcagcttctggagaatgggagctgctgaggctggattccagcaagaagaagctgcccagcccatgcccagacaaggagagtgacaaggaccttggtcctcggctccagctcccctcagcccccgtagccactggtctttctaccctggactccatctgtgactccctgagtgttgctttccggggcattagtcactgtcctcctagtgggctctatgcccacctctgccgcttcctggccttgtgcctgggccaccgggatccttatgccactgctttccttgtcaccgagtctgtctccatcacctgtcgccaccagctgctcacccacctccacagacagctcagcaaggcccagaagcaccgaggatcacttgaaatagcagaccagctgcaggggctgagccttcaggagatgcctggagatgtccccctggcccgcatccagcgcctcttttccttcagggctttggaatctggccacttcccccagcctgaaaaggagagtttccaggagcgcctggctctgatccccagtggggtgactgtgtgtgtgttggccctggccaccctccagcccggaaccgtgggcaacaccctcctgctgacccggctggaaaaggacagtcccccagtcagtgtgcagattcccactggccagaacaagcttcatctgcgttcagtcctgaatgagtttgatgccatccagaaggcacagaaagagaacagcagctgtactgacaagcgagaatggtggacagggcggctggcactggaccacaggatggaggttctcatcgcttccctagagaagtctgtgctgggctgctggaaggggctgctgctgccgtccagtgaggagcccggccctgcccaggaggcctcccgcctacaggagctgctacaggactgtggctggaaatatcctgaccgcactctgctgaaaatcatgctcagtggtgccggtgccctcacccctcaggacattcaggccctggcctacgggctgtgcccaacccagccagagcgagcccaggagctcctgaatgaggcagtaggacgtctacagggcctgacagtaccaagcaatagccaccttgtcttggtcctagacaaggacttgcagaagctgccgtgggaaagcatgcccagcctccaagcactgcctgtcacccggctgccctccttccgcttcctactcagctactccatcatcaaagagtatggggcctcgccagtgctgagtcaaggggtggatccacgaagtaccttctatgtcctgaaccctcacaataacctgtcaagcacagaggagcaatttcgagccaatttcagcagtgaagctggctggagaggagtggttggggaggtgccaagacctgaacaggtgcaggaagccctgacaaagcatgatttgtatatctatgcagggcatggggctggtgcccgcttccttgatgggcaggctgtcctgcggctgagctgtcgggcagtggccctgctgtttggctgtagcagtgcggccctggctgtgcatggaaacctggagggggctggcatcgtgctcaagtacatcatggctggttgccccttgtttctgggtaatctctgggatgtgactgaccgcgacattgaccgctacacggaagctctgctgcaaggctggcttggagcaggcccaggggccccccttctctactatgtaaaccaggcccgccaagctccccgactcaagtatcttattggggctgcacctatagcctatggcttgcctgtctctctgcggtaaccccatggagctgtcttattgatgctagaagcctcataactgttctacctccaaggttagatttaatccttaggataactcttttaaagtgattttccccagtgttttatatgaaacatttccttttgatttaacctcagtataataaagatacatcattt

SEQ ID NO: 64 - protein, 1795 aa, Homo sapien
MEAPSPPLRALYESCQFFLSGLERGTKRRYRLDAILSLFAFLGGYCSLLQQLRDDGVYGGSSKQQQSFLQMYFQGLHLYTVVVYDFAQGCQIVDLADLTQLVDSCKSTVVWMLEALEGLSGQELTDHMGMTASYTSNLAYSFYSHKLYAEACAISEPLCQHLGLVKPGTYPEVPPEKLHRCFRLQVESLKKLGKQAQGCKMVILWLAALQPCSPEHMAEPVTFWVRVKMDAARAGDKELQLKTLRDSLSGWDPETLALLLREELQAYKAVRADTGQERFNIICDLLELSPEETPAGAWARATHLVELAQVLCYHDFTQQTNCSALDAIREALQLLDSVRPEAQARDQLLDDKAQALLWLYICTLEAKIQEGIERDRRAQAPGNLEEFEVNDLNYEDKLQEDRFLYSNIAFNLAADAAQSKCLDQALALWKELLTKGQAPAVRCLQQTAASLQILAALYQLVAKPMQALEVLLLLRIVSERLKDHSKAAGSSCHITQLLLTLGCPSYAQLHLEEAASSLKHLDQTTDTYLLLSLTCDLLRSQLYWTHQKVTKGVSLLLSVLRDPALQKSSKAWYLLRVQVLQLVAAYLSLPSNNLSHSLWEQLCAQGWQTPEIALIDSHKLLRSIILLLMGSDILSTQKAAVETSFLDYGENLVQKWQVLSEVLSCSEKLVCHLGRLGSVSEAKAFCLEALKLTTKLQIPRQCALFLVLKGELELARNDIDLCQSDLQQVLFLLESCTEFGGVTQHLDSVKKVHLQKGKQQAQVPCPPQLPEEELFLRGPALELVATVAKEPGPIAPSTNSSPVLKTKPQPIPNFLSHSPTCDCSLCASPVLTAVCLRWVLVTAGVRLAMGHQAQGLDLLQVVLKGCPEAAERLTQALQASLNHKTPPSLVPSLLDEILAQAYTLLALEGLNQPSNESLQKVLQSGLKFVAARIPHLEPWRASLLLIWALTKLGGLSCCTTQLFASSWGWQPPLIKSVPGSEPSKTQGQKRSGRGRQKLASAPLSLNNTSQKGLEGRGLPCTPKPPDRIRQAGPHVPFTVFEEVCPTESKPEVPQAPRVQQRVQTRLKVNFSDDSDLEDPVSAEAWLAEEPKRRGTASRGRGRARKGLSLKTDAVVAPGSAPGNPGLNGRSRRAKKVASRHCEERRPQRASDQARPGPEIMRTIPEEELTDNWRKMSFEILRGSDGEDSASGGKTPAPGPEAASGEWELLRLDSSKKKLPSPCPDKESDKDLGPRLQLPSAPVATGLSTLDSICDSLSVAFRGISHCPPSGLYAHLCRFLALCLGHRDPYATAFLVTESVSITCRHQLLTHLHRQLSKAQKHRGSLEIADQLQGLSLQEMPGDVPLARIQRLFSFRALESGHFPQPEKESFQERLALIPSGVTVCVLALATLQPGTVGNTLLLTRLEKDSPPVSVQIPTGQNKLHLRSVLNEFDAIQKAQKENSSCTDKREWWTGRLALDHRMEVLIASLEKSVLGCWKGLLLPSSEEPGPAQEASRLQELLQDCGWKYPDRTLLKIMLSGAGALTPQDIQALAYGLCPTQPERAQELLNEAVGRLQGLTVPSNSHLVLVLDKDLQKLPWESMPSLQALPVTRLPSFRFLLSYSIIKEYGASPVLSQGVDPRSTFYVLNPHNNLSSTEEQFRANFSSEAGWRGVVGEVPRPEQVQEALTKHDLYIYAGHGAGARFLDGQAVLRLSCRAVALLFGCSSAALAVHGNLEGAGIVLKYIMAGCPLFLGNLWDVTDRDIDRYTEALLQGWLGAGPGAPLLYYVNQARQAPRLKYLIGAAPIAYGLPVSLR

SEQ ID NO: 65 - DNA, 6060 bp, Homo sapien
atctcactgaggaccaacctttcgacattcttcagaaatccttgcaagaggccaatatcactgaacagacattggcagaagaggcatatttggatgccagtataggttcaagccaacagtttgcacaagctcagcttcatccttcttcatcagcatcctttactcaggcttctaatgtttctaattactcaggtcagacgctgcagcctataggggtgacgcatgtgcctgttggagcatcgtttgcaagcaatacagtgggtgtacaacatggctttatgcaacatgtggggatcagtgttcccagccagcatttgtctaatagcagtcagattagtggttctggtcaaatacagttaattgggtcatttggtaatcatccttccatgatgactattaataacctagatggatctcaaatcatattaaagggcagcgggcagcaagccccatcaaatgtgagtggagggctcctggttcatagacagactcctaatggcaactccttgtttgggaactctagttccagtccagtagcacagcctgttaccgttccatttaacagcacaaattttcaaacatctttacctgtgcataacatcatcatacaaaggggtcttgcaccaaattcaaataaagtcccaattaatatacagccaaagcctatccagatgggtcagcaaaatacatacaatgtgaacaatttgggaattcagcagcaccacgtacaacaagggatctcttttgcttctgcaagctcaccccagggctcagtagttggtccacacatgtctgtgaacattgtaaaccaacagaacacaagaaagccagtcacctcacaggcagtgagcagcactgggggcagtattgttattcattcccccatgggccaacctcacgcaccccaaagtcagttccttatacctacaagcctttctgtcagttccaactcggtacaccacgtccagactataaatgggcaacttcttcaaactcaaccctctcagctcatttctggccaagtggcctcagagcatgtcatgttgaacagaaactcttccaacatgctcaggaccaaccaaccatatactggaccgatgcttaacaaccagaatactgctgtccacttagtgtctgggcagacatttgctgcctctggaagtccagtgatagccaatcatgcctctcctcagcttgtgggtggacagatgcccttgcagcaggcatccccaactgtattacacctgtcacctgggcagagcagcgtttcccaaggaagacctggcttcgccaccatgccatcggtgacaagcatgtcaggacctagtcggttccctgctgtcagctcagccagcactgcccatcctagtcttgggtctgcagttcagtctggttcatcaggatcaaactttacaggagatcagctgacccagccaaacaggactccagtaccagtcagtgtgtctcatcgtcttccagtttcttcttccaagtctaccagcaccttcagtaacacacctggaacaggaacccagcaacaattcttctgccaggctcagaaaaaatgtctgaatcagacttcccccatttctgctcccaagaccacagacggcctgaggcaagcacagatccctgggctcttgagcaccacactgccagggcaggattctggaagcaaagttatatccgcatccttaggaaccgcacaaccacagcaggaaaaagtagttggatcatctcctggccatccagctgtgcaggtggagagtcattcgggaggacaaaaaaggcctgctgcgaaacagctaacgaaaggagctttcattctccagcagttgcagagggaccaagcccacactgtgacaccagacaaaagtcacttccgatcactaagtgatgcggtacagagactgctctcctaccacgtgtgccagggctccatgcccactgaagaagacttgagaaaagtggacaatgaatttgagacagttgccactcagctcctaaaaaggacccaagctatgcttaacaaatacagatgcctgctcctagaagatgccatgcgaatcaatccctctgctgagatggtgatgatcgataggatgttcaaccaggaggaaagagcttccctgtcccgagacaagcgtttggcacttgtagaccctgagggttttcaggctgatttctgttgttccttcaaacttgataaagctgctcatgagacacagtttggccggagtgaccagcatggcagtaaagcaagcagctctctgcaaccgccagccaaggcccaaggcagagaccgagccaaaaccggtgtgacggaacccatgaatcatgaccagtttcatctagtgcctaatcacatcgtggtctctgcagaaggaaacatttctaaaaaaacagaatgccttggcagagcactgaaatttgacaaagtgggcttagtgcagtaccagagcacgtctgaagagaaggccagccggagagagcctctgaaggccagtcagtgctctcccggccctgaggggcaccggaaaacctcatccagatcggatcatggtactgagagcaaactgtcaagcatcctagcagattcgcacttggagatgacgtgtaacaattccttccaggacaaaagtctgaggaattctccaaagaatgaagttttacacacagacatcatgaaagggtcaggcgaaccccagccagatctccagctgacaaagagcttggaaaccacatttaagaacatcttggaactcaaaaaggcgggacggcagccccagagtgaccccacggttagcggctctgttgagttagatttccccaacttttctcctatggcttcacaggaaaactgcctggaaaagttcatcccggaccacagtgaaggtgttgtagaaactgactccattttagaagcagctgtaaatagtatcctagagtgttaatagcagcagtcctccccctaccccgccccgagaccccaccccgagaccccaccccggaccagttacattcgttcctggcaaaagcaaatggaaatggtctcctgtctccagcctgcttgatctttcatcacaggttattctttctaatctcaatcctgttctttgtttaagagcaatacttgtcgtgattacagggagatcctttagtaaaattaatccttggcagaaagcagtctgataggccccactcatttcaagtgttatgaaagtgcttataggcattttgtttatttgttttgttttttaaaaacactgtaactcaatgagaccacagtatacttggcccttggtaaaattttgacaatcataagtcatttgaaaagaacagacttactaaaatcaaacgagacggatagaagctactttttaaagaatatcccactgcatctgcaaatttagttttgggtttttttattattattattttgagtttttttgtgtgtgttttgttgttattgttgaggggaagaccacatggttcttccccctcagccatctttgagcagtaaattgctggctgtgctgccagggacccgcagccctggtggaaaagccagtagcacatacgcagggcattgcagggcttccctattgatggttcaagtgcttttctgatgcttccggagcaaaacctcatgcttttaggcatatctatgttgaatttcacctagggaatgttctgttcttagttacagcagcaaaatttgaaataatttcaccaggctaaataaaggaaaatggaaaccagttaagaggcacagtgtacagaggaggccgggatagagccatgagggttataatattaatatgtatatatgtaaaagcatatatatgttaactattgagaaaaaacaagttttgcattttataattggatatagtcaacatataatgtatgtttttgtttgttgctggattttgtttcatttaacctctctttgcaccctctcccacaacaaataccaagcatcaaaagcactttcatttgaaaattattatgttgtaatttttcagtttaaactttaaggagactctggccttgtttatgcttcttgtctgagaacagtagtgacccctggcagcaattcattaccaaaacacagacaaaccaaaggtaaccagctagcccaccactgaaaggaaagatctgagacatgggattcccatttgagagccaaaggatatgccctgtcatggtttctgtttggcctgtgttcatattagtgagcatggcttactgcttttttttttttttttttttgtcagggagtattctccgttttcctttctcgtatacctgccccaggttatcccatttctgttgttacctttattcttaatgtcattgtaaccatcacttatctcctctcattgggaaagctacatgatagtatttttatgcactcttctcccacacatacacacacgtgcatgtatctgagctgctcggatccagaggtcatttttgttacagtgtgtgcacactcactctccttcttagtgtgcatactctctcatttattctgtttatctccctggctctggaggtgcagccactggtcttcactttaatgtgttgccagaatctgcttctggctgtcgccaacatggggatgacccccattgtcatcatgttgggcatttcttttccagattggcctgtgatggaaaggaaggcttctaattagaaaacacagcaacagaagacctataccccggtgcccctgtgtcccactacacacagaaaaccctgtgagatggccagtcttcataatagcaacgtaccttcaccccagccacatgccccagccaatacaaattggaaaatctggcccattttagggttaccattttttccttatttgtgccaatgtccaagttgcagatttcccctttttcctgtattgtaacatattagataagttggtgtcgccagttggtactttctgtttgggtagtcctagggtaacaccctgccctaaactccatgatttcataggcttttcttcccttggggctcatgctcccctaattcctagcaagatgatccttcctaatcaaattcttctcattgcagaactttatccctggaagccttcatgtgggctgctagtgagttacattaattactgcaaatcagtggaattctcaagagacaagataagcttcatgtacatttgtcacctctctttcttccctatcctgccctgctgtcccaatcctagcttttctatataccatcttaaagggtttttaagccctaacacttgtctagcaaatggagagcctaatttaccaaaatgaaacttgtaaatttttgtgtcattgtatgtaagtttactttttatggaggaaggattctagataatgacaaatgaagattatgacatgtatttcactcctgtgattaggttctacgcacatgggtcataactcgcatgtcgagccccctctagtgaagggtaggagagctcagcctcggatggccaacattcagttgttcaggttcattcgtcaaagttaagttttagaactatttgtactcagtaacaaaaatcattttctttttttttttttttttctgttgtggaaaagcgtgaatttgttattaagcatttgattttctgtgtccttaagtacttcctgaagatgaagcaaaattttaatctggcaattatgaaaaagaaatattttagctctgaaggatttagtagattctgttagattagggaggccttacagactgactttacttaaagaggacgcgtcactcgctgtcagtgtggtgtgggctttatttgcttaaataccttcatttgtatagtacgtctcacttgaaattgctttgtatacattttgtaaaaatatttataaaatgttttgtaaaaaaaaaaaaactataacaaattgcagtttattttgttatgttggataaatactgttaaaagaaaccagtcagtaactatattgttaatccatggttaggaaatgtttagttggagattacaaattgaaacaaccattgcaatacagccaaagatttggg

SEQ ID NO: 66 - protein, 983 aa, Homo sapien
LTEDQPFDILQKSLQEANITEQTLAEEAYLDASIGSSQQFAQAQLHPSSSASFTQASNVSNYSGQTLQPIGVTHVPVGASFASNTVGVQHGFMQHVGISVPSQHLSNSSQISGSGQIQLIGSFGNHPSMMTINNLDGSQIILKGSGQQAPSNVSGGLLVHRQTPNGNSLFGNSSSSPVAQPVTVPFNSTNFQTSLPVHNIIIQRGLAPNSNKVPINIQPKPIQMGQQNTYNVNNLGIQQHHVQQGISFASASSPQGSVVGPHMSVNIVNQQNTRKPVTSQAVSSTGGSIVIHSPMGQPHAPQSQFLIPTSLSVSSNSVHHVQTINGQLLQTQPSQLISGQVASEHVMLNRNSSNMLRTNQPYTGPMLNNQNTAVHLVSGQTFAASGSPVIANHASPQLVGGQMPLQQASPTVLHLSPGQSSVSQGRPGFATMPSVTSMSGPSRFPAVSSASTAHPSLGSAVQSGSSGSNFTGDQLTQPNRTPVPVSVSHRLPVSSSKSTSTFSNTPGTGTQQQFFCQAQKKCLNQTSPISAPKTTDGLRQAQIPGLLSTTLPGQDSGSKVISASLGTAQPQQEKVVGSSPGHPAVQVESHSGGQKRPAAKQLTKGAFILQQLQRDQAHTVTPDKSHFRSLSDAVQRLLSYHVCQGSMPTEEDLRKVDNEFETVATQLLKRTQAMLNKYRCLLLEDAMRINPSAEMVMIDRMFNQEERASLSRDKRLALVDPEGFQADFCCSFKLDKAAHETQFGRSDQHGSKASSSLQPPAKAQGRDRAKTGVTEPMNHDQFHLVPNHIVVSAEGNISKKTECLGRALKFDKVGLVQYQSTSEEKASRREPLKASQCSPGPEGHRKTSSRSDHGTESKLSSILADSHLEMTCNNSFQDKSLRNSPKNEVLHTDIMKGSGEPQPDLQLTKSLETTFKNILELKKAGRQPQSDPTVSGSVELDFPNFSPMASQENCLEKFIPDHSEGVVETDSILEAAVNSILEC

SEQ ID NO: 67 - DNA, 1810 bp, Homo sapien
cccctgcccgcccgacagcgccgccgcctgccccgccatgggtcgacagaaggagctggtgtcccgctgcggggagatgctccacatccgctaccggctgctccgacaggcgctggccgagtgcctggggaccctcatcctggtgatgtttggctgtggctccgtggcccaggttgtgctcagccggggcacccacggtggtttcctcaccatcaacctggcctttggctttgctgtcactctgggcatcctcatcgctggccaggtctctggggcccacctgaaccctgccgtgacctttgccatgtgcttcctggctcgtgagccctggatcaagctgcccatctacaccctggcacagacgctgggagccttcttgggtgctggaatagtttttgggctgtattatgatgcaatctggcacttcgccgacaaccagctttttgtttcgggccccaatggcacagccggcatctttgctacctacccctctggacacttggatatgatcaatggcttctttgaccagttcataggcacagcctcccttatcgtgtgtgtgctggccattgttgacccctacaacaaccccgtcccccgaggcctggaggccttcaccgtgggcctggtggtcctggtcattggcacctccatgggcttcaactccggctatgccgtcaaccctgcccgggactttggcccccgcctttttacagcccttgcgggctggggctctgcagtcttcacgaccggccagcattggtggtgggtgcccatcgtgtccccactcctgggctccattgcgggtgtcttcgtgtaccagctgatgatcggctgccacctggagcagcccccaccctccaacgaggaagagaatgtgaagctggcccatgtgaagcacaaggagcagatctgagtgggcaggggccatctccccactccgctgccctggccttgagcatccactgactgtccaagggccactcccaagaagcccccttcacgatccaccctttcaggctaaggagctccctatctaccctcaccccacgagacagccccttcaggatttccactggaccttgcccaaatagcaccttaggccactgcccctaagctggggtggaaccggaatttgggtcaatacatccttttgtctcccaagggaagagaatgggcagcaggtatgtgtgtgtgtgcatgtgtgtgcatgtgtgtgcatgtgtgtgcaggggtgtgtgtgtgtggggggggttcccagatattcagggcaagggaccagtcggaagggattctggctattgggggagcccagagacaggggaaggcagcctgtccatctgtgcataaggagaggaaagttccagggtgtgtatgtttcaggggcttcacatggaggagctgcagatagatatgtgtttctgtgtatgtgtatgtctgcctttttttctaagtgggggcttctacaggcttttgggaagtagggtggatgtgggtagggctgggaggagggggccacagcttaggtttggagctctggatgtacatacataagtaggagcagtgggacgtgtttctgtcataatgcaggcatgaagggtggagtgaagtcaggtcataagtttcatgtttgcttttgttttgttttgtttttaatgtatgtagcagatgttacagtcttagggatccgggatgggagaccccactttagaaagggtcgtcactcctttaatcctctactcaacaatgtactcttttacttttatattaaaaaaaataaaataaatatgtgcctaaaaaaaaaaaaaaa

SEQ ID NO: 68 - protein, 292 aa, Homo sapien
MGRQKELVSRCGEMLHIRYRLLRQALAECLGTLILVMFGCGSVAQVVLSRGTHGGFLTINLAFGFAVTLGILIAGQVSGAHLNPAVTFAMCFLAREPWIKLPIYTLAQTLGAFLGAGIVFGLYYDAIWHFADNQLFVSGPNGTAGIFATYPSGHLDMINGFFDQFIGTASLIVCVLAIVDPYNNPVPRGLEAFTVGLVVLVIGTSMGFNSGYAVNPARDFGPRLFTALAGWGSAVFTTGQHWWWVPIVSPLLGSIAGVFVYQLMIGCHLEQPPPSNEEENVKLAHVKHKEQI

SEQ ID NO: 69 - DNA, 1835 bp, Homo sapien
ctcgctgcgccaccgcctcccgccacccctgcccgcccgacagcgccgccgcctgccccgccatgggtcgacagaaggagctggtgtcccgctgcggggagatgctccacatccgctaccggctgctccgacaggcgctggccgagtgcctggggaccctcatcctggtgatgtttggctgtggctccgtggcccaggttgtgctcagccggggcacccacggtggtttcctcaccatcaacctggcctttggctttgctgtcactctgggcatcctcatcgctggccaggtctctggggcccacctgaaccctgccgtgacctttgccatgtgcttcctggctcgtgagccctggatcaagctgcccatctacaccctggcacagacgctgggagccttcttgggtgctggaatagtttttgggctgtattatgatgcaatctggcacttcgccgacaaccagctttttgtttcgggccccaatggcacagccggcatctttgctacctacccctctggacacttggatatgatcaatggcttctttgaccagttcataggcacagcctcccttatcgtgtgtgtgctggccattgttgacccctacaacaaccccgtcccccgaggcctggaggccttcaccgtgggcctggtggtcctggtcattggcacctccatgggcttcaactccggctatgccgtcaaccctgcccgggactttggcccccgcctttttacagcccttgcgggctggggctctgcagtcttcacgaccggccagcattggtggtgggtgcccatcgtgtccccactcctgggctccattgcgggtgtcttcgtgtaccagctgatgatcggctgccacctggagcagcccccaccctccaacgaggaagagaatgtgaagctggcccatgtgaagcacaaggagcagatctgagtgggcaggggccatctccccactccgctgccctggccttgagcatccactgactgtccaagggccactcccaagaagcccccttcacgatccaccctttcaggctaaggagctccctatctaccctcaccccacgagacagccccttcaggatttccactggaccttgcccaaatagcaccttaggccactgcccctaagctggggtggaaccggaatttgggtcaatacatccttttgtctcccaagggaagagaatgggcagcaggtatgtgtgtgtgtgcatgtgtgtgcatgtgtgtgcatgtgtgtgcaggggtgtgtgtgtgtggggggggttcccagatattcagggcaagggaccagtcggaagggattctggctattgggggagcccagagacaggggaaggcagcctgtccatctgtgcataaggagaggaaagttccagggtgtgtatgtttcaggggcttcacatggaggagctgcagatagatatgtgtttctgtgtatgtgtatgtctgcctttttttctaagtgggggcttctacaggcttttgggaagtagggtggatgtgggtagggctgggaggagggggccacagcttaggtttggagctctggatgtacatacataagtaggagcagtgggacgtgtttctgtcataatgcaggcatgaagggtggagtgaagtcaggtcataagtttcatgtttgcttttgttttgttttgtttttaatgtatgtagcagatgttacagtcttagggatccgggatgggagaccccactttagaaagggtcgtcactcctttaatcctctactcaacaatgtactcttttacttttatattaaaaaaaataaaataaatatgtgcctaaaaaaaaaaaaaaa

SEQ ID NO: 70 - protein, 292 aa, Homo sapien; identical to SEQ ID NO: 68

SEQ ID NO: 71 - DNA, 4221 bp, Homo sapien
cagcccgagcccgagcccgagcccgagccggcgccaccgcgcccccggccatggcttttgccaatttccgccgcatcctgcgcctgtctaccttcgagaagagaaagtcccgcgaatatgagcacgtccgccgcgacctggaccccaacgaggtgtgggagatcgtgggcgagctgggcgacggcgccttcggcaaggtttacaaggccaagaataaggagacgggtgctttggctgcggccaaagtcattgaaaccaagagtgaggaggagctggaggactacatcgtggagattgagatcctggccacctgcgaccacccctacattgtgaagctcctgggagcctactatcacgacgggaagctgtggatcatgattgagttctgtccagggggagccgtggacgccatcatgctggagctggacagaggcctcacggagccccagatacaggtggtttgccgccagatgctagaagccctcaacttcctgcacagcaagaggatcatccaccgagatctgaaagctggcaacgtgctgatgaccctcgagggagacatcaggctggctgactttggtgtgtctgccaagaatctgaagactctacagaaacgagattccttcatcggcacgccttactggatggcccccgaggtggtcatgtgtgagaccatgaaagacacgccctacgactacaaagccgacatctggtccctgggcatcacgctgattgagatggcccagatcgagccgccacaccacgagctcaaccccatgcgggtcctgctaaagatcgccaagtcagaccctcccacgctgctcacgccctccaagtggtctgtagagttccgtgacttcctgaagatagccctggataagaacccagaaacccgacccagtgccgcgcagctgctggagcatcccttcgtcagcagcatcaccagtaacaaggctctgcgggagctggtggctgaggccaaggccgaggtgatggaagagatcgaagacggccgggatgagggggaagaggaggacgccgtggatgccgcctccaccctggagaaccatactcagaactcctctgaggtgagtccgccaagcctcaatgctgacaagcctctcgaggagtcaccttccaccccgctggcacccagccagtctcaggacagtgtgaatgagccctgcagccagccctctggggacagatccctccaaaccaccagtcccccagtcgtggcccctggaaatgagaacggcctggcagtgcctgtgcccctgcggaagtcccgacccgtgtcaatggatgccagaattcaggtagcccaggagaagcaagttgctgagcagggtggggacctcagcccagcagccaacagatctcaaaaggccagccagagccggcccaacagcagcgccctggagaccttgggtggggagaagctggccaatggcagcctggagccacctgcccaggcagctccagggccttccaagagggactcggactgcagcagcctctgcacctctgagagcatggactatggtaccaatctctccactgacctgtcgctgaacaaagagatgggctctctgtccatcaaggacccgaaactgtacaaaaaaaccctcaagcggacacgcaaatttgtggtggatggtgtggaggtgagcatcaccacctccaagatcatcagcgaagatgagaagaaggatgaggagatgagatttctcaggcgccaggaactccgagagcttcggctgctccagaaagaagagcatcggaaccagacccagctgagtaacaagcatgagctgcagctggagcaaatgcataaacgttttgaacaggaaatcaacgccaagaagaagttctttgacacggaattagagaacctggagcgtcagcaaaagcagcaagtggagaagatggagcaagaccatgccgtgcgccgccgggaggaggccaggcggatccgcctggagcaggatcgggactacaccaggttccaagagcagctcaaactgatgaagaaagaggtgaagaacgaggtggagaagctcccccgacagcagcggaaggaaagcatgaagcagaagatggaggagcacacgcagaaaaagcagcttcttgaccgggactttgtagccaagcagaaggaggacctggagctggccatgaagaggctcaccaccgacaacaggcgggagatctgtgacaaggagcgcgagtgcctcatgaagaagcaggagctccttcgagaccgggaagcagccctgtgggagatggaagagcaccagctgcaggagaggcaccagctggtgaagcagcagctcaaagaccagtacttcctccagcggcacgagctgctgcgcaagcatgagaaggagcgggagcagatgcagcgctacaaccagcgcatgatagagcagctgaaggtgcggcagcaacaggaaaaggcgcggctgcccaagatccagaggagtgagggcaagacgcgcatggccatgtacaagaagagcctccacatcaacggcgggggcagcgcagctgagcagcgtgagaagatcaagcagttctcccagcaggaggagaagaggcagaagtcggagcggctgcagcaacagcagaaacacgagaaccagatgcgggacatgctggcgcagtgtgagagcaacatgagcgagctgcagcagctgcagaatgaaaagtgccacctcctggtagagcacgaaacccagaaactgaaggccctggatgagagccataaccagaacctgaaggaatggcgggacaagcttcggccgcgcaagaaggctctggaagaggatctgaaccagaagaagcgggagcaggagatgttcttcaagctgagcgaggaggcggagtgcccaaacccctccaccccaagcaaggccgccaagttcttcccctacagttctgcggatgcttcttaacaaccgcccggggctgtggctggcagcttggtgggccccagggccttctccttcattctctgtgaacatgtaactcaggaccccttttccctcttgcgtctgtgccagctcaaatccagcccctcgccctgtgccaccccaactgtgcctgatagacctgccccagcgttcctgacttcttgctggcctgtggagggtgaggtgtaattatttgtcacctgaacctaatgtatattctccttgagccccagatcccttcaagctggaagggatggggctgttggtggggtcagggtccaagaggaatgggtgttctgtggcctcgagtcctctcctgtttgcgaaaataccagttttgctctctgtgggacaaagcactgctgatgaagtccccgtgggctcatccgggctggaattcttggtttttcagccattccctgcagagtcactcaatcatcaagtccctcacagccatttctgttcccagaggagccaggcctgcagctggctgctcaggagatggcctcattcctcctgttctcccagtttgctttccacttaagacaaagccttgtctatgtggggggcggggaccggggaaagagggaggctgaaatgtttattctgcttctcccgtgtttcatgccatctcgcgtcccccttcctgcacatgggtgtgaatgcacacacatacgcgtacacacaggacttggtctgctggcctggcctcttctgcccaggtgggttggaacacgtttgctgcctgagcctgtgccactgagcatgttaggtggagcagttggtgtggcacgtgcggggtgttggcaccggaggcatggaaaagcacaggctgtactgccaggctgcgatgcgtgctggcccccgcacaggctcctgtgtgcagggactgattcctcagcacacgaggcttccacaacccagtctgctccatagcactctggcccaccctgtctgcaggtgaaacaggagggctgtttgcctctgccccatccccccgactgtgttcaggagtcccaccttgcatttcagacctgggctggcagtctgttggacttctcttcaggaagaaaaagcatcagggggaaatggaatgcccctgccccaggaacatggcagaagcacaggttctgtacctcagatggactcctgctgggccttcggggtctcagttggcttcccccagattctgattctacagctgcagaatgtatataacacaataaaagcaaatgtttgaaccagt

SEQ ID NO: 72 - protein, 968 aa, Homo sapien
MAFANFRRILRLSTFEKRKSREYEHVRRDLDPNEVWEIVGELGDGAFGKVYKAKNKETGALAAAKVIETKSEEELEDYIVEIEILATCDHPYIVKLLGAYYHDGKLWIMIEFCPGGAVDAIMLELDRGLTEPQIQVVCRQMLEALNFLHSKRIIHRDLKAGNVLMTLEGDIRLADFGVSAKNLKTLQKRDSFIGTPYWMAPEVVMCETMKDTPYDYKADIWSLGITLIEMAQIEPPHHELNPMRVLLKIAKSDPPTLLTPSKWSVEFRDFLKIALDKNPETRPSAAQLLEHPFVSSITSNKALRELVAEAKAEVMEEIEDGRDEGEEEDAVDAASTLENHTQNSSEVSPPSLNADKPLEESPSTPLAPSQSQDSVNEPCSQPSGDRSLQTTSPPVVAPGNENGLAVPVPLRKSRPVSMDARIQVAQEKQVAEQGGDLSPAANRSQKASQSRPNSSALETLGGEKLANGSLEPPAQAAPGPSKRDSDCSSLCTSESMDYGTNLSTDLSLNKEMGSLSIKDPKLYKKTLKRTRKFVVDGVEVSITTSKIISEDEKKDEEMRFLRRQELRELRLLQKEEHRNQTQLSNKHELQLEQMHKRFEQEINAKKKFFDTELENLERQQKQQVEKMEQDHAVRRREEARRIRLEQDRDYTRFQEQLKLMKKEVKNEVEKLPRQQRKESMKQKMEEHTQKKQLLDRDFVAKQKEDLELAMKRLTTDNRREICDKERECLMKKQELLRDREAALWEMEEHQLQERHQLVKQQLKDQYFLQRHELLRKHEKEREQMQRYNQRMIEQLKVRQQQEKARLPKIQRSEGKTRMAMYKKSLHINGGGSAAEQREKIKQFSQQEEKRQKSERLQQQQKHENQMRDMLAQCESNMSELQQLQNEKCHLLVEHETQKLKALDESHNQNLKEWRDKLRPRKKALEEDLNQKKREQEMFFKLSEEAECPNPSTPSKAAKFFPYSSADAS

SEQ ID NO: 73 - DNA, 2260 bp, Homo sapien
ctcctcctgccgctgccgctgctttggctgctgcgtcatacgccccagagccgccgggacggaggggctgggcctggggaccccccggcctccgcctgcacgcccccccacgcccggacgtgccctctccgcgcgggggactcgcctaggtctcctacgtctgcccctgcccggctcccggcggccccagctgtcaccggcccccccaggatgcaatggcgcagcccccccggctgagccgctctggtgcctcctcactttgggacccagcttctcctgctcccacctctggccccaggcctcggctttgggagggtcaagatgtgctggccagatggactgatgggctgctatacttgggtaccatcaaaaaggtggacagtgctagggaggtgtgtctggtccagtttgaggatgattcgcagtttctggttctatggaaagacattagccctgctgccctccctggagaggaactcctctgttgtgtctgtcgctctgagactgtggtccctgggaaccggctggtcagctgtgagaagtgtcgccatgcttatcaccaggactgccatgttcccagggctccagcccctggagagggagagggcacatcctgggtatgccgccagtgtgtctttgcgatcgccaccaagaggggaggtgccctgaagaagggcccctatgcccgggccatgctgggtatgaagctttctctgccatatggactgaaggggctggactgggatgctggacatctgagcaaccgacagcagagttactgttactgtggtggccctggggagtggaacctgaaaatgctgcagtgccggagctgcctgcagtggttccatgaggcctgcacccagtgtctgagcaagcccctcctctatggggacaggttctatgaatttgaatgctgtgtgtgtcgcgggggccctgagaaagtccggagactacagcttcgctgggtggatgtggcccatcttgtcctgtatcacctcagtgtttgctgtaagaagaaatactttgattttgatcgtgagatcctccccttcacttctgagaattgggacagtttgctcctgggggagctttcagacacccccaaaggagaacgttcttccaagctcctctctgctcttaacagccacaaggaccgtttcatttcagggagagagattaagaagaggaaatgtttgtttggtctccatgctcggatgcctccccctgtggagccccctactggagatggagcactcaccagcttcccttcagggcagggccctgggggaggggtctcacgtcccctggggaagcgccggaggccggagccagagcccctgaggaggaggcagaaggggaaagtggaggagctggggccaccctcagcagtgcgcaatcagcccgagccccaggagcagagggagcgggctcatctgcagagggcactgcaggcctcagtgtctccaccatcccccagccctaaccagagttaccagggcagcagcggctacaacttccggcccacagatgcccgctgcctgcccagcagccccatccggatgtttgcttccttccacccttctgccagcaccgcagggacctctggggacagtggacccccagacaggtcacccctggaacttcacattggtttccccacagacatccctaaaagtgccccccactcgatgactgcctcatcttcctcagtttcatccccatccccaggtcttcctagacgctcagcacccccttctcccctgtgccgtagtttgtctcctgggactgggggaggagtccgaggtggggttggttacctgtcccgaggggaccctgtccgggtccttgctcggagagtacggcctgatggctctgtgcagtacctggttgagtggggaggagggggcatcttctgaacagcctgcctctgcccagctccccattcacacacaccggcactttcataccctgacctctgacctcacctacagctgggatgtacctggagagatagggggtagttctccctactgcccaggctggaatccaagagtggggagtggggaagaggccctcttctctaccctccttcatgattcctgacccctcccatccttcccatttcctttgatgttattttgttacagctttttaaatattttttaaaattatttaacccctgggggcagagactgaggagggaggatgataagggatcccggactctgtatgattgaaataaagagaaataaacaaa

SEQ ID NO: 74 - protein, 567 aa, Homo sapien
MAQPPRLSRSGASSLWDPASPAPTSGPRPRLWEGQDVLARWTDGLLYLGTIKKVDSAREVCLVQFEDDSQFLVLWKDISPAALPGEELLCCVCRSETVVPGNRLVSCEKCRHAYHQDCHVPRAPAPGEGEGTSWVCRQCVFAIATKRGGALKKGPYARAMLGMKLSLPYGLKGLDWDAGHLSNRQQSYCYCGGPGEWNLKMLQCRSCLQWFHEACTQCLSKPLLYGDRFYEFECCVCRGGPEKVRRLQLRWVDVAHLVLYHLSVCCKKKYFDFDREILPFTSENWDSLLLGELSDTPKGERSSKLLSALNSHKDRFISGREIKKRKCLFGLHARMPPPVEPPTGDGALTSFPSGQGPGGGVSRPLGKRRRPEPEPLRRRQKGKVEELGPPSAVRNQPEPQEQRERAHLQRALQASVSPPSPSPNQSYQGSSGYNFRPTDARCLPSSPIRMFASFHPSASTAGTSGDSGPPDRSPLELHIGFPTDIPKSAPHSMTASSSSVSSPSPGLPRRSAPPSPLCRSLSPGTGGGVRGGVGYLSRGDPVRVLARRVRPDGSVQYLVEWGGGGIF

SEQ ID NO: 75 - DNA, 2588 bp, Homo sapien
ggcacgaggctctctcctccctctttcttcgggcagcctccccaccaccccacttcagcctcccccactcttgccgcctccatatcatcaagctctggtggcgcctggggggcttttcggatcggcaggatgtacccccagggaaggcacccgaccccgctccagtccggccagcccttcaagttctcgatcttggagatctgcgaccgcatcaaagaagaattccagtttcttcaggctcaataccacagcctcaagctagaatgtgagaagctggccagcgagaagacggaaatgcagcgacattatgtcatgtattatgagatgtcgtacgggctcaacattgaaatgcataagcaggcggagattgtgaagcgtctgagcggtatctgcgctcagattatccccttcctgacccaggagcatcagcagcaggtgctccaggccgtagaacgcgccaagcaggtcaccgtgggggagctgaacagcctcatcgggcagcagctccagccgctgtcccaccacgcaccccctgtgcccctcaccccccgcccagccgggctggtgggcggcagtgctacggggctgcttgctctgtctggagccctggctgcccaggctcagctggcggcggctgtcaaggaggaccgtgcgggcgtggaggccgaggggtccagagtggagagagccccgagcaggagtgcatctccctcgccccctgagagtctcgtggaggaggagcgaccgagtggccctggtggtggcgggaagcagagagcagatgagaaggagccatcaggaccttatgaaagcgacgaagacaagagtgattacaatctggtggtggacgaggaccaaccctcagagccccccagcccggctaccaccccctgcggaaaggtacccatctgcattcctgcccgtcgggacctggtggacagtccagcctccttggcctctagccttggctcaccgctgcctagagccaaggagctcatcctgaatgaccttcccgccagcactcctgcctccaaatcctgtgactcctccccgccccaggacgcttccacccccgggcccagctcggccagtcacctctgccagcttgctgccaagccagcaccttccacggacagcgtcgccctgaggagccccctgactctgtccagtcccttcaccacgtccttcagcctgggctcccacagcactctcaacggagacctctccgtgcccagctcctacgtcagcctccacctgtccccccaggtcagcagctctgtggtgtacggacgctcccccgtgatggcatttgagtctcatccccatctccgagggtcatccgtctcttcctccctacccagcatccctgggggaaagccggcctactccttccacgtgtctgcggacgggcagatgcagccggttcccttcccctcggatgcactggtaggcgcgggcatcccgcggcacgcccggcagctgcacacgctggcccatggcgaggtggtctgcgcggtcaccatcagcggctccacacagcatgtgtacacgggcggcaagggctgtgtgaaggtgtgggacgtgggccagcctggggccaagacgcccgtggcccagctcgactgcctgaaccgagacaactacattcgttcctgcaagttgctgccggatggccggagtctgatcgtgggcggtgaggccagcaccttgtccatttgggacctggcggcgcccaccccccgtatcaaggccgagctgacttcctcagccccagcctgctacgccctggccgtcagccccgacgccaaggtttgcttctcctgctgcagcgatggcaacattgtggtctgggacctgcagaatcagactatggtcaggcagttccagggccacacggacggcgccagctgcattgatatttccgattacggcactcggctctggacagggggcctggacaacacggtgcgctgctgggacctgcgggagggccgccagctgcagcagcatgacttcagctcccagattttctccctgggccactgccctaaccaggactggctggcggtcggaatggagagtagcaacgtggagatcctgcacgtccgcaagccggagaaataccagctgcacctccacgagagctgcgtgctgtccctgaagtttgcctcctgcggacggtggtttgtgagcaccgggaaggacaacctgctcaacgcctggaggacgccgtacggggccagcattttccagtccaaggagtcgtcctcagtcctgagttgtgacatctccagaaataacaaatacatcgtgacaggctcgggggacaagaaggccaccgtgtatgaggtggtctactgagacatgaccccccttcctgtacccgaagtccagactcccaggggaatcagcagccaggacagacatcctagcagccgcctcccagccctgcctaggaaccgtacatcccatctgctctctggccaacggcttcacaccttcccctgctgcatgtgggggccgatgggcaggggacctcggtggaaataaaatgtatctatcacatccgcaaaaaaaaaaaaaaaaaa

SEQ ID NO: 76 - protein, 743 aa, Homo sapien
MYPQGRHPTPLQSGQPFKFSILEICDRIKEEFQFLQAQYHSLKLECEKLASEKTEMQRHYVMYYEMSYGLNIEMHKQAEIVKRLSGICAQIIPFLTQEHQQQVLQAVERAKQVTVGELNSLIGQQLQPLSHHAPPVPLTPRPAGLVGGSATGLLALSGALAAQAQLAAAVKEDRAGVEAEGSRVERAPSRSASPSPPESLVEEERPSGPGGGGKQRADEKEPSGPYESDEDKSDYNLVVDEDQPSEPPSPATTPCGKVPICIPARRDLVDSPASLASSLGSPLPRAKELILNDLPASTPASKSCDSSPPQDASTPGPSSASHLCQLAAKPAPSTDSVALRSPLTLSSPFTTSFSLGSHSTLNGDLSVPSSYVSLHLSPQVSSSVVYGRSPVMAFESHPHLRGSSVSSSLPSIPGGKPAYSFHVSADGQMQPVPFPSDALVGAGIPRHARQLHTLAHGEVVCAVTISGSTQHVYTGGKGCVKVWDVGQPGAKTPVAQLDCLNRDNYIRSCKLLPDGRSLIVGGEASTLSIWDLAAPTPRIKAELTSSAPACYALAVSPDAKVCFSCCSDGNIVVWDLQNQTMVRQFQGHTDGASCIDISDYGTRLWTGGLDNTVRCWDLREGRQLQQHDFSSQIFSLGHCPNQDWLAVGMESSNVEILHVRKPEKYQLHLHESCVLSLKFASCGRWFVSTGKDNLLNAWRTPYGASIFQSKESSSVLSCDISRNNKYIVTGSGDKKATVYEVVY

SEQ ID NO: 77 - DNA, 3929 bp, Homo sapien
ccctttttcctcccgttttgaagagacaatgctacttcagtttggagcacaaacatatgatcagcacatggaaatgtggtaattcggatgcattcgtgattgcaacagattgaagaaattagaccagacaaagagtgtttttagaggagagaggaggaggaggaggctgagagagggagggcgacgggggtgagaaaggggaggccgcctctgagcgggacgccgggactcccgccgctgctaaatatatccgtagaatggagagggaccggatctcagccttgaaaagatcttttgaggtcgaggaggtcgagacacccaactccaccccaccccggagggtccagactcccctactccgagccactgtggccagctccacccagaaattccaggacctgggcgtgaagaactcagaaccctcggcccgccatgtggactccctaagccaacgctcccccaaggcgtccctgcggagggtggagctctcgggccccaaggcggccgagccggtgtcccggcgcactgagctgtccattgacatctcgtccaagcaggtggagaacgccggggccatcggcccgtcccggttcgggctcaagagggccgaggtgttgggccacaagacgccagaaccggcccctcggaggacggagatcaccatcgtcaaaccccaggagtcagcccaccggaggatggagccccctgcctccaaggtccccgaggtgcccactgcccctgccaccgacgcagcccccaagagggtggagatccagatgcccaagcctgctgaggcgcccaccgcccccagcccagcccagaccttggagaattcagagcctgcccctgtgtctcagctgcagagcaggctggagcccaagccccagccccctgtggctgaggctacaccccggagccaggaggccactgaggcggctcccagctgcgttggcgacatggccgacacccccagagatgccgggctcaagcaggcgcctgcatcacggaacgagaaggccccggtggacttcggctacgtggggattgactccatcctggagcagatgcgccggaaggccatgaagcagggcttcgagttcaacatcatggtggtcgggcagagcggcttgggtaaatccaccttaatcaacaccctcttcaaatccaaaatcagccggaagtcggtgcagcccacctcagaggagcgcatccccaagaccatcgagatcaagtccatcacgcacgatattgaggagaaaggcgtccggatgaagctgacagtgattgacacaccagggttcggggaccacatcaacaacgagaactgctggcagcccatcatgaagttcatcaatgaccagtacgagaaatacctgcaggaggaggtcaacatcaaccgcaagaagcgcatcccggacacccgcgtccactgctgcctctacttcatccccgccaccggccactccctcaggcccctggacatcgagtttatgaaacgcctgagcaaggtggtcaacatcgtccctgtcatcgccaaggcggacacactcaccctggaggagagggtccacttcaaacagcggatcaccgcagacctgctgtccaacggcatcgacgtgtacccccagaaggaatttgatgaggactcggaggaccggctggtgaacgagaagttccgggagatgatcccatttgctgtggtgggcagtgaccacgagtaccaggtcaacggcaagaggatccttgggaggaagaccaagtggggtaccatcgaagttgaaaacaccacacactgtgagtttgcctacctgcgggaccttctcatcaggacgcacatgcagaacatcaaggacatcaccagcagcatccacttcgaggcgtaccgtgtgaagcgcctcaacgagggcagcagcgccatggccaacggcgtggaggagaaggagccagaagccccggagatgtagacgccccctgcccacccccgggatcctgcccccaagtcatttccgtcccccccccaggccctcccaccaccccattttattttatatgattttctccatttgtcatcgttccccaccccttcgacatgctgccaggaaacaagggaaggggcctccctccgagtgagtcagtgatgaggccgcggcctccccgaggttgtggggaggctgcactggagccacaggcaggggtgagagcacccactgaattgacatgaccctctgtccccaggcctggctccccgagggctcagaagagcagcttcggtgtgcagatcatccgtcgtgtggggttctcagtgccggagcttggggtgggggccaggcctcgcacttgcagaggagcccagtgggctgcacgctcccctccatccccatcggccctgtcccctggagtgtgtcagagcccaggggagaatgcagcccaccaggagcacctggaccccctgcccgccacatggtgtggccatcactcagcccctacccctgccctgctcctaagggtagaaaactccagggtcccctgccaccgactgcccagccactccaagccccctggcagctgcccctcctggagcagaaagtgcctttatctcagccatccgcagactgctggccagatgcggggacaggctggaatgagggaggcgtcttcatctccctgccatccccctctcacgccacccccgcccccaccgggctgcaggtgctgctgatgcgctgggatctgattgaggataaaaaggaaggagagatgacccctaccccctcatcccccagttttgaaaaggtctaagcaagtgagtctggtggaggagctgagggagggagccatggaaggtgccagaaggaaggttggcgggggcacgtgtgggccgtggcttgggctggtcagagtggcgtgagctgcccggcgcctgccctgcccaagtgaccagggaagtgtgtgtgtgtccatgtgtatgcgtgtccgtctgtctgtctagtgtctgggtttggcccaagactgggctgtagttacattaatgcccagccagccacccctgccactcacccctcctggcccaggccttgctgactctctgagctggggaggtgggaggccaggcgagcctgactctgttgatctacccgtgcctgggcccctcccctcagagcccatggtaacgaacccctagaaaggagagaacgggcgtcaggggtgcacagtccacagctgaagagcaaggtttcgtggcagcacggcccggcccctcaccctctgtccccacgaggggacccatgggggctgtctttgcagggcacagatgaccaaagtcccttcctgcttcctgttacctgtcttgctcctggggagaaagaggggcctgatgagactccactcaggtgcacacatcaccaggtgcatctgcaggcaccgggctggctgcttgcagccaggagaaggtcagcgagaaggagtgtatgagtgtgagtgtgtgtgcatggaagttggggcactgggcgtctgactccctccccacccaagagaggaaggacccctcaccacccccactggcgagacagtttactttgccgacttgccatgtttttgccaaaaccaagattttgaaggaaatgagtggccagcgccagggcccaggccatgtggcctgcccagcctcaatgtcacttggcggcggggtggggtgggggtgggcagcagcatcccagccttgagatgcttcactttccttctctgtaaccagactttgaaaaattgttcgtttcatcaggctctgttcctcaatggccttttgctacgtgcctcccgagaaatttgtctttttgtataaatgacaaagtgttgaaaatgtatttcctgaaataaatgtttcaaatgcagaaacccaaaaaaaaaaaaaaaaaaaaaaaaaaaaaaaaaaa

SEQ ID NO: 78 - protein, 568 aa, Homo sapien
MERDRISALKRSFEVEEVETPNSTPPRRVQTPLLRATVASSTQKFQDLGVKNSEPSARHVDSLSQRSPKASLRRVELSGPKAAEPVSRRTELSIDISSKQVENAGAIGPSRFGLKRAEVLGHKTPEPAPRRTEITIVKPQESAHRRMEPPASKVPEVPTAPATDAAPKRVEIQMPKPAEAPTAPSPAQTLENSEPAPVSQLQSRLEPKPQPPVAEATPRSQEATEAAPSCVGDMADTPRDAGLKQAPASRNEKAPVDFGYVGIDSILEQMRRKAMKQGFEFNIMVVGQSGLGKSTLINTLFKSKISRKSVQPTSEERIPKTIEIKSITHDIEEKGVRMKLTVIDTPGFGDHINNENCWQPIMKFINDQYEKYLQEEVNINRKKRIPDTRVHCCLYFIPATGHSLRPLDIEFMKRLSKVVNIVPVIAKADTLTLEERVHFKQRITADLLSNGIDVYPQKEFDEDSEDRLVNEKFREMIPFAVVGSDHEYQVNGKRILGRKTKWGTIEVENTTHCEFAYLRDLLIRTHMQNIKDITSSIHFEAYRVKRLNEGSSAMANGVEEKEPEAPEM

SEQ ID NO: 79 - DNA, 9162 bp, Homo sapien
  Unsure 7758-7776: Unknown base
cgggccggcctggtgctgcacgcctgtcagccatcgcccgagccgccggcgtctcctcccgcccagcagttcctccacgcaggggctccggaatcgcccgaccgcacacgttgccaccctgaggtctttctggaagtggatatctactcagacagtaagaattataagagctgtaagagctcatttggaggaataatggatgaaccatctcccttggcccaacctctggagctgaaccagcactctcgattcataataggttctgtgtctgaagataactcagaggatgagatcagcaacctggtgaagttggacctactggaggagaaggagggctccttgtcacctgcttctgttggctcagatacactctctgatttggggatctctagcctacaggatggcttggccttgcacataaggtccagcatgtctggcttgcacctagtaaagcagggccgagacagaaagaaaatagattctcaacgagatttcactgtggcttctccagcagaatttgttactcgcttgggggaaataaagtgattgagaaggttcttattgctaacaatggcattgcagcagtgaaatgcatgcggtctatccgtaggtggtcttatgaaatgtttcgaaatgaacgtgcaattagattcgttgtcatggtcacacctgaagaccttaaagccaatgcagaatacattaagatggcagatcactatgtgccagtgcctggaggaccaaacaacaacaactatgcaaatgtggaattaattcttgatattgctaaaaggatcccagtacaagcagtgtgggctggctggggtcatgcttctgagaatcccaaactaccggaacttctcttgaaaaatggcattgccttcatgggtcctccaagccaggccatgtgggctttaggggataagattgcatcttccatagtggctcaaactgcaggtatcccaactcttccctggagcggcagtggtcttcgtgtggactggcaggaaaatgatttttcaaaacgtatcttaaatgttccccaggagctatatgaaaaaggttatgtgaaagatgtggatgatgggctacaggcagctgaggaagttggatatccagtaatgatcaaggcctcagagggaggaggagggaagggaattagaaaagtcaacaatgcagatgacttccctaatctcttcagacaggttcaagctgaagttcctggatctcccatatttgtgatgagactagccaaacaatctcgtcatctggaggtgcagatcttagcggaccaatatggcaatgctatctctttgtttggtcgtgattgctctgtacaacgcaggcatcagaagattattgaagaagcacctgctactattgctactccagcagtatttgaacacatggaacagtgtgcggtgaaacttgccaaaatggtgggttatgtgagtgctgggactgtggaatacctgtacagccaggatggcagcttctactttctggaattgaatcctcggctgcaggtagagcacccttgtacagagatggtggctgatgtcaatctccctgcagcacagctccagattgccatggggattcctctatatagaatcaaggatatccgtatgatgtatggggtatctccctggggtgattctcccattgattttgaagattctgcacacgttccttgtccaaggggccatgttattgctgctcggatcactagtgaaaatccagatgagggttttaagcccagctcaggaacagttcaggagctaaatttccgcagcaataagaatgtttggggatatttcagtgttgctgctgcagggggacttcatgaattgctgattctcagtttggtcactgcttttcttggggagaaaacagagaagaggcaatttcaaacatggtggtggctttgaaggagctgtctattcggggtgactttcgaactacagttgaatacctgatcaaattgttagagactgaaagctttcagatgaacagaattgatactggctggctggacagactgatagcagaaaaagtacaggctgagcgacctgacaccatgttgggggttgtgtgtggtgccctccacgtggcagatgtgagcctgcggaatagcgtctctaacttccttcactccttagaaaggggtcaagtccttcctgctcatacacttctgaatacagtagatgttgaacttatctatgagggagtcaagtatgtacttaaggtgactcgacagtcccccaactcctatgtggtgatcatgaatggctcatgtgtagaagtagatgtacatcggctgagtgacggtggactgctcttgtcctatgatggcagcagttatactacgtatatgaaagaggaagtggatagatatcgcatcacaattggcaataaaacctgtgtgtttgagaaggaaaatgacccatcggtgatgcgctcaccttctgctgggaagttaatccagtacattgtagaagatggaggtcatgtgtttgccggccagtgctatgctgagattgaggtaatgaagatggtaatgaccttaacagctgtggagtctggctgtatccattacgtcaagcgacctggagcagctcttgaccctggctgtgtactagccaaaatgcaactggacaaccccagcaaggttcagcaggctgaacttcacacaggtagtctgccacggatccagagcacggcactcagaggcgagaaactccatcgagtgttccattatgtcctggataatctggtcaatgtaatgaatggatactgccttccagatcctttctctagcagcaaggtaaaagactggtagagcgattgatgaaaacctcagagatccctccctgcctctcctagaattgcaagatattatgaccagtgtgtctggccgcattccccccaatgtggagaagtctatcaagaaggaaatggctcagtatgctagcaacatcacatcagtcctctgtcagtttcccagccagcagattgcaaacatcctagatagccatgcagctacattgaaccggaaatctgaacgggaagtcttctttatgaatactcagagcattgttcagctggtacagaggtaccgaagtggcatccgaggccacatgaaggctgtggtgatggatctgctccggcagtacctgcgagtagagacacaattccagaatggtcactatgacaaatgtgtattcgccctccgagaagagaataaaagtgacatgaacactgtactgaactacatcttctctcacgctcaagtcaccaagaagaatcttctggtcacaatgcttattgatcagttgtgtggccgggaccctactctcactgatgagctgctgaatattctcacagagctaactcaactcagtaagaccaccaatgccaaagtagcacttcgagcacgccaggttcttattgcctcccatttgccatcatatgagcttcgccataaccaagtagagtctatcttcctatcagctattgacatgtatggacatcaattttgcattgagaacctgcagaaactcatcctatcagaaacatctatttttgatgtcctaccaaacttcttctatcacagcaaccaagtagtgaggatggcagctctggaggtgtatgttcgaagggcttatattgcctatgaacttaacagcgtacaacaccgccagcttaaggacaacacctgtgtggtggaattccagttcatgctgcccacatctcatccaaacagagggaacatccctacgctaaacagaatgtccttctcctccaacctcaaccactatggcatgacccatgtagctagtgtcagcgatgtactgttggacaactcattcactccaccttgtcagcggatgggcggaatggtctcttttcggacttttgaagattttgtcaggatctttgatgaagtgatgggctgcttctctgactccccaccccagagtcccacattccctgaggcaggtcacacgtctctttatgatgaggataaggttcccagggatgaaccaattcacattctcaatgtggctatcaagactgactgtgatattgaggatgacaggctggcagctatgttcagagaatttacccagcaaaataaagctaccctggttgaccatgggatccggcgccttactttcctggttgcacaaaggatttcagaaagcaggtcaactatgaggtggatcggagatttcatagagaattccctaaattttttacattccgagcaagggataagtttgaggaggatcgtatctatcgtcatctggagcctgctctggctttccagttagagctgaaccggatgagaaattttgacctcactgcccattccatgtgctaatcacaagatgcacctgtatctcggggcagccaaggtggaagtgggcacagaagtgacagactacaggttctttgttcgtgcaatcatcaggcattctgatctggtcaccaaggaagcttcttttgaatatctgcaaaatgaaggggagcggctactcctggaagccatggatgagttggaagttgcttttaacaatacaaatgtccgcactgactgcaaccacatcttcctcaacttcgtgcccactgtcatcatggacccctcaaagatcgaggagtccgtgcgctacatggttatgcgctacggcagccggctgtggaaactccgtgtgctacaggctgaggtcaagatcaacatccgccagaccaccaccggcagtgccgttcccatccgcctgttcatcaccaatgagtcgggctactacctggacatcagcctctacaaagaagtgactgactccagatctggaaatatcatgtttcactccttcggcaacaagcaagggccccagcacgggatgctgatcaatactccctacgtcaccaaaggatcttgctccaggccaaagcgattccaggcccagaccctgggaaccacctacatctatgacttcccggaaatgttcaggcaggctctctttaaactgtggggctccccagacaagtatcccaaagacatcctgacatacactgaattagtgttggactctcagggccagctggtggagatgaaccgacttcctggtggaaatgaggtgggcatggtggccttcaaaatgaggtttaagacccaggagtacccggaaggacgggatgtgatcgtcatcggcaatgacatcacctttcgcattggatcctttggccctggagaggaccttctgtacctgcgggcatccgagatggcccgggcagagggcattcccaaaatttacgtggcagccaacagtggcgcccgtattggcatggcagaggagatcaaacacatgttccacgtggcttgggtggacccagaagacccccacaaaggatttaaatacctgtacctgactccccaagactacaccagaatcagctccctgaactccgtccactgtaaacacatcgaggaaggaggagagtccagatacatgatcacggatatcatcgggaaggatgatggcttgggcgtggagaatctgaggggctcaggcatgattgctggggagtcctctctggcttacgaagagatcgtcaccattagcttggtgacctgccgagccattgggattggggcctacttggtgaggctgggccagcgagtgatccaggtggagaattcccacatcatcctcacaggagcaagtgctctcaacaaggtcctgggaagagaggtctacacatccaacaaccagctgggtggcgttcagatcatgcattacaatggtgtctcccacatcaccgtgccagatgactttgagggggtttataccatcctggagtggctgtcctatatgccaaaggataatcacagccctgtccctatcatcacacccactgaccccattgacagagaaattgaattcctcccatccagagctccctacgacccccggtggatgcttgcaggaaggcctcacccaactctgaagggaacgtggcagagcggattctttgaccacggcagtttcaaggaaatcatggcaccctgggcgcagaccgtggtgacaggacgagcaaggcttggggggattcccgtgggagtgattgctgtggagacacggactgtggaggtggcagtccctgcagaccctgccaacctggattctgaggccaagataattcagcaggcaggacaggtgtggttcccagactcagcctacaaaaccgcccaggccatcaaggacttcaaccgggagaagttgcccctgatgatctttgccaactggagggggttctccggtggcatgaaagacatgtatgaccaggtgctgaagtttggagcctacatcgtggacggccttagacaatacaaacagcccatcctgatctatatcccgccctatgcggagctccggggaggctcctgggtggtcatagatgccaccatcaacccgctgtgcatagaaatgtatgcagacaaagagagcaggggtggtgttctggaaccagaggggacagtggagattaagttccgaaagaaagatctgataaagtccatgagaaggatcgatccagcttacaagaagctcatggaacagctaggggaacctgatctctccgacaaggaccgaaaggacctggagggccggctaaaggctcgcgaggacctgctgctccccatctaccaccaggtggcggtgcagttcgccgacttccatgacacacccggccggatgctggagaagggcgtcatatctgacatcctggagtggaagaccgcacgcaccttcctgtattggcgtctgcgccgcctcctcctggaggaccaggtcaagcaggagatcctgcaggccagcggggagctgagtcacgtgcatatccagtccatgctgcgtcgctggttcgtggagacggagggggctgtcaaggcctacttgtgggacaacaaccaggtggttgtgcagtggctggaacagcactggcaggcaggggatggcccgcgctccaccatccgtgagaacatcacgtacctgaagcacgactctgtcctcaagaccatccgaggcctggttgaagaaaaccccgaggtggccgtggactgtgtgatatacctgagccagcacatcagcccagctgagcgggcgcaggtcgttcacctgctgtctaccatggacagcccggcctccacctgaccgtggcccacccagccactcccgggaccacggcaaaaggaaccacccagacccaccacccgtacaccctcagcagaccctgaagacttgcttttaaacaaagaaaatcctgggcacttctgcagggctgctggttccgagctgacacccgtcttaataaaaggcccaggagtgcctcttccaaacaaaaacagcctcctctccatagctgggaagtttattttgttttgtctctgaagacagcagttttattgcatcactaaatctaatcaagctaaaacatccctgtttccttttgcaaaacagtgcctggcatgtgggatccaggcgttctttaggatccttggataccacatcgtgaaatcttttatttttttactctgagaccagcaccagatgtaagtaagcatctcatatatttcagccaaataaatgggccaagggaaaaaaatatatatatatagacaggactagagaaaacctatttttgtaatgatgtttctttggatactgtctagtcacccagaaaaatgtatggatgaannnnnnnnnnnnnnnnnnngagacaaagtctccccggttgtcgtgcaggctggagttgcaggtggcattgatctcttcactgtgcaaccctccattccctcctgtgttctcaggccctccttagattaacgtggaatttacaagcgtgcccaccaccatgtgcccggcttaattttgtggtatttttgtggatagagacagagtttccaccaggtttggctcaggcgtggtctctctcaaacttctttgactttcaggttaattccacccacctttggccctcccaaaggttgctggaatttacaggcatttacgccaccattctttcagccagatgtgattttttcttatttgaaaacagttgaaagtgcttattttttgttccccaaatggcgctagtgaatcactaggagggtcccactgataggccatgtttagcactggttgccagggattctctttttgagagagggaaagcaaaatgaatggaagtacccagctggaggtttcagggcttctggaggatgctctcgcatagctcgaggtcctctgcccacctcttctctccaaggaaaatgaggactgccccttccccctgcaggattggcccccagcctgcgcatgcaccctcctcttgcccaagtggggagcacagaggcggagaggaatcccttaccacacccacggcccagcttgctcacgagtgtcacctctgtgacggtcaccactgctcccttggagggccacttgagttactgttgcttcctcgcctgctggcttgatgagcaccgatggtgggatctgaccccgaggggcagagctgtcggtgactgaggactggactgtggtgaccatgccgatttgctcagggagaacgttgcaatgcacccagcagctcctggctctgcaggcggcacagcctggggccctgtgatcctctggtttcttccattggggcggagtcgggggtggagggagctggccacaacccactgctctgatgggtggtttgtccaaggatgctgaatgtaatgcctggtcaatgtggaagcccatgaggttgcccagggaagcctccaaaagctgggatgcttgagggtatccaagttgaaaaagacaaaatctgaccatcagccagtgacagtcctggcaaatgaaggtggggcggggcagtgaggggtgggagaaggtgaatgattcattattccaccccgaggtttgctggggtgaggggaagaatcgatgctgctttgggaactgaaggtttttctgttgggaaggccctcttggttttggagagaaagacaagttatgagtagctgctaccctggaacggtgggcagagagcctactaggaaatgtgcagaataaactattttttgaaggacacaaaaaaaaaaggggg

SEQ ID NO: 80 - protein, 2206 aa, Homo sapien
MRSIRRWSYEMFRNERAIRFVVMVTPEDLKANAEYIKMADHYVPVPGGPNNNNYANVELILDIAKRIPVQAVWAGWGHASENPKLPELLLKNGIAFMGPPSQAMWALGDKIASSIVAQTAGIPTLPWSGSGLRVDWQENDFSKRILNVPQELYEKGYVKDVDDGLQAAEEVGYPVMIKASEGGGGKGIRKVNNADDFPNLFRQVQAEVPGSPIFVMRLAKQSRHLEVQILADQYGNAISLFGRDCSVQRRHQKIIEEAPATIATPAVFEHMEQCAVKLAKMVGYVSAGTVEYLYSQDGSFYFLELNPRLQVEHPCTEMVADVNLPAAQLQIAMGIPLYRIKDIRMMYGVSPWGDSPIDFEDSAHVPCPRGHVIAARITSENPDEGFKPSSGTVQELNFRSNKNVWGYFSVAAAGGLHEIADSQFGHCFSWGENREEAISNMVVALKELSIRGDFRTTVEYLIKLLETESFQMNRIDTGWLDRLIAEKVQAERPDTMLGVVCGALHVADVSLRNSVSNFLHSLERGQVLPAHTLLNTVDVELIYEGVKYVLKVTRQSPNSYVVIMNGSCVEVDVHRLSDGGLLLSYDGSSYTTYMKEEVDRYRITIGNKTCVFEKENDPSVMRSPSAGKLIQYIVEDGGHVFAGQCYAEIEVMKMVMTLTAVESGCIHYVKRPGAALDPGCVLAKMQLDNPSKVQQAELHTGSLPRIQSTALRGEKLHRVFHYVLDNLVNVMNGYCLPDPFSSSKVKDWRAIDENLRDPSLPLLELQDIMTSVSGRIPPNVEKSIKKEMAQYASNITSVLCQFPSQQIANILDSHAATLNRKSEREVFFMNTQSIVQLVQRYRSGIRGHMKAVVMDLLRQYLRVETQFQNGHYDKCVFALREENKSDMNTVLNYIFSHAQVTKKNLLVTMLIDQLCGRDPTLTDELLNILTELTQLSKTTNAKVALRARQVLIASHLPSYELRHNQVESIFLSAIDMYGHQFCIENLQKLILSETSIFDVLPNFFYHSNQVVRMAALEVYVRRAYIAYELNSVQHRQLKDNTCVVEFQFMLPTSHPNRGNIPTLNRMSFSSNLNHYGMTHVASVSDVLLDNSFTPPCQRMGGMVSFRTFEDFVRIFDEVMGCFSDSPPQSPTFPEAGHTSLYDEDKVPRDEPIHILNVAIKTDCDIEDDRLAAMFREFTQQNKATLVDPWDPAPYFPGCTKDFRKQVNYEVDRRFHREFPKFFTFRARDKFEEDRIYRHLEPALAFQLELNRMRNFDLTAHSMCNHKMHLYLGAAKVEVGTEVTDYRFFVRAIIRHSDLVTKEASFEYLQNEGERLLLEAMDELEVAFNNTNVRTDCNHIFLNFVPTVIMDPSKIEESVRYMVMRYGSRLWKLRVLQAEVKINIRQTTTGSAVPIRLFITNESGYYLDISLYKEVTDSRSGNIMFHSFGNKQGPQHGMLINTPYVTKGSCSRPKRFQAQTLGTTYIYDFPEMFRQALFKLWGSPDKYPKDILTYTELVLDSQGQLVEMNRLPGGNEVGMVAFKMRFKTQEYPEGRDVIVIGNDITFRIGSFGPGEDLLYLRASEMARAEGIPKIYVAANSGARIGMAEEIKHMFHVAWVDPEDPHKGFKYLYLTPQDYTRISSLNSVHCKHIEEGGESRYMITDIIGKDDGLGVENLRGSGMIAGESSLAYEEIVTISLVTCRAIGIGAYLVRLGQRVIQVENSHIILTGASALNKVLGREVYTSNNQLGGVQIMHYNGVSHITVPDDFEGVYTILEWLSYMPKDNHSPVPIITPTDPIDREIEFLPSRAPYDPRWMLAGRPHPTLKGTWQSGFFDHGSFKEIMAPWAQTVVTGRARLGGIPVGVIAVETRTVEVAVPADPANLDSEAKIIQQAGQVWFPDSAYKTAQAIKDFNREKLPLMIFANWRGFSGGMKDMYDQVLKFGAYIVDGLRQYKQPILIYIPPYAELRGGSWVVIDATINPLCIEMYADKESRGGVLEPEGTVEIKFRKKDLIKSMRRIDPAYKKLMEQLGEPDLSDKDRKDLEGRLKAREDLLLPIYHQVAVQFADFHDTPGRMLEKGVISDILEWKTARTFLYWRLRRLLLEDQVKQEILQASGELSHVHIQSMLRRWFVETEGAVKAYLWDNNQVVVQWLEQHWQAGDGPRSTIRENITYLKHDSVLKTIRGLVEENPEVAVDCVIYLSQHISPAERAQVVHLLSTMDSPAST

SEQ ID NO: 81 - DNA, 341 bp, Homo sapien
  Unsure 33-34: Unknown base
  Unsure 136: Unknown base
  Unsure 154: Unknown base
  Unsure 317: Unknown base
ttcctctggccacaaaagacctttaatggcctnntatttattgttcttttgttcatttgttagagttgaatgaactataataacttgtctgacataataagaatgccacaggtataacagataaacctggcaggtnggtccaggaatgagagtntcacaaaataatcactcaacacaagggccacagacctggagattcttcccagccatccctcactcctgccccaggacacaacccatgcaggcccccattccataaggaagaaggcaggtcccacaagtgtctgtggctaagaccttaacactgagcagagatngcccgggaagatggcacttcctat

SEQ ID NO: 82 - DNA, 2508 bp, Homo sapien
ctttctgctgttaccgggagcgcggtggccacggaacgctgcccggagccgcgcgagggaggacccgacgcgcggcgtttacccagcgcagcgttccaccgctcgggtttggctggaatagctctccagacccccagctggccatgtggtgagttcagggcccaaatcaagtagtaccagcaatcagggaactcctatctgttttgaatggattcacaccagccacaagcctggaaagatggtgtcacaatctacagtcaggcaggattctcctgtggagccctgggaagggatcagcgatcactctggcattattgatggttcgcccagactcctgaacactgaccatcctccttgccaattagacatcaggctcatgaggcacaaagctgtctggattaacccccaggatgtgcagcaacagccgcaggacttgcaatctcaggtgccagcagcagggaacagtgggacccattttgtgacagatgctgcctctccctcaggcccttcaccttcgtgcctcggggactccctggcagagacaacgttgtctgaggataccacagactccgttggcagcgcttctccccatggctcgagtgaaaagagtagcagcttctctctgtcctcaacagaggtacacatggtccgcccaggatactctcatcgggtgtctctgcccacaagccctaggattttggccacctccccatatcctgagactgacagtgctttttttgagccttcccatctgacatctgctgctgatgaaggtgctgttcaagtcagtagaagaaccatttcttcgaattccttctcaccagaggtatttgtgctgcctgttgatgtagaaaaggaaaatgcccacttttatgttgcagatatgattatatcagcaatggagaaaatgaagtgtaacattctgagtcaacagcagacagagagctggagtaaagaagtcagtgggttacttgggagtgatcagcctgactctgaaatgacttttgataccaacataaagcaagagtctgggtcttctacttcttcatacagtggctatgaaggttgtgctgtgttacaggtcagcccagtgactgaaacacgtacttaccatgatgtgaaagagatttgcaaatgcgatgttgatgaatttgttattttagagcttggagattttaatgatatcacagaaacctgtagctgttcctgcagctcctctaagagtgtcacttatgagccagacttcaattctgcagaactattagccaaagagctgtaccgcgtgttccagaagtgctggatactgtcagtagttaattctcagctggcaggttccctgagtgcagctggctcgatagtcgtaaatgaagagtgtgtccgaaaagactttgaatccagtatgaatgtagtacaggaaattaaatttaagtctaggatcagagggactgaagactgggctcctcctagatttcaaatcatatttaatattcatccaccactcaagagggaccttgtggtggcagcccagaattttttctgtgccggctgtggaactccagtagagcctaagtttgtgaagcggctccggtactgcgaatacctagggaagtatttctgtgactgctgccactcatatgcagagtcgtgcatccctgcccgaatcctgatgatgtgggacttcaagaagtactacgtcagcaatttctccaaacagctgctcgacagcatatggcaccagcccattttcaatttgctgagcatcggccaaagcctgtatgcgaaagccaaggagctggacagagtgaaggaaattcaggagcagctcttccatatcaagaagctgttgaagacctgtaggtttgctaacagctgtgtcaaggaaagggctttatttgtgaattttgccagaatacgactgtcatcttcccatttcagacagcaacatgtagaagatgttcagcgtgcagggcttgctttcacaaacagtgcttccagtcctccgagtgcccccggtgtgcgaggatcacagcgaggagaaaacttctggaaagtgtggcctctgcagcaacatgatgcccctgagtactgtgaaaaagactgttcaacatgccttatgataacaccgatttgtgtctattattggtgacattgttttagatattgggtattgtatattaaggaaaaagatggtctatattctctttattgcatatacttaatgtttcaaaagaatgcagattctgtgtttaagcacagggctgatagttgtggttttgtttacaaatgttctgttttggctgctattggttttttaaagaggttttttatacttttgtatttgaatagttatgtttcactgatgctgagccagtttgtatgtgtgtgcatatatgtgaactgtaactgacaagatgaattactcagtttctctttctctaaagcttgtttgatgaaactggttggtcctttcagtgaacaaaaatatgaccccaaaaaaaaaaaaaaaaa

SEQ ID NO: 83 - protein, 635 aa, Homo sapien
MVSQSTVRQDSPVEPWEGISDHSGIIDGSPRLLNTDHPPCQLDIRLMRHKAVWINPQDVQQQPQDLQSQVPAAGNSGTHFVTDAASPSGPSPSCLGDSLAETTLSEDTTDSVGSASPHGSSEKSSSFSLSSTEVHMVRPGYSHRVSLPTSPRILATSPYPETDSAFFEPSHLTSAADEGAVQVSRRTISSNSFSPEVFVLPVDVEKENAHFYVADMIISAMEKMKCNILSQQQTESWSKEVSGLLGSDQPDSEMTFDTNIKQESGSSTSSYSGYEGCAVLQVSPVTETRTYHDVKEICKCDVDEFVILELGDFNDITETCSCSCSSSKSVTYEPDFNSAELLAKELYRVFQKCWILSVVNSQLAGSLSAAGSIVVNEECVRKDFESSMNVVQEIKFKSRIRGTEDWAPPRFQIIFNIHPPLKRDLVVAAQNFFCAGCGTPVEPKFVKRLRYCEYLGKYFCDCCHSYAESCIPARILMMWDFKKYYVSNFSKQLLDSIWHQPIFNLLSIGQSLYAKAKELDRVKEIQEQLFHIKKLLKTCRFANSCVKERALFVNFARIRLSSSHFRQQHVEDVQRAGLAFTNSASSPPSAPGVRGSQRGENFWKVWPLQQHDAPEYCEKDCSTCLMITPICVYYW

SEQ ID NO: 84 - DNA, 2176 bp, Homo sapien
ccgcttccccgtcttgtacacccctaactcctgaggctcctccgaatcacgcgagtggaagcggagaagctcaagtggccgccatgtcagaggcttatttccgagtggagtcgggtgcgctggggcctgaggagaactttctttctttggacgacatcctgatgtcccacgagaagctgccggtgcgcacggagaccgccatgcctcgccttggcgctttcttcctggagcggagcgcaggcgccgagactgacaacgcggtcccacagggttccaagcttgaactacccttgtggctggcaaaaggactttttgacaacaagcgacggatcctttctgtggaactccccaagatctaccaagagggttggaggactgtgttcagtgcagatcccaatgtggtggacctccacaaaatggggccccatttctacgggtttggctcccagctcctgcattttgacagtcccgagaatgcagacatttcccagtctctgctgcagacttttatcggacgttttcgccgcatcatggactcctcacagaatgcttacaacgaagacacttcagccctggtagccaggctagacgagatggagaggggcttatttcaaacagggcagaaaggactgaatgactttcagtgttgggagaaggggcaggcttctcagatcacagcttccaacctcgttcagaattacaagaagagaaaattcactgatatggaagactgaaagccggaagaacacagaatggctcctcacagacgtatccctccgtgtgtccttgataggagctggttgaccttgtacagaaccagaatcctgtcccatttcatggcttatttcctgtggccatagagaattatagggaactggacatgctggaggatgtgggtgtccctggctctgtgagtcttccaggaccgtcccaccctgctgacccacagcccaggccctttaacccaagaacccatggccaaggagaaatcaaagtccttcctaaataagaatcactgccatataatatatcacagtagagttgcaactgagattccttgtgtctgggagtttggacagcttcagatgtacagtttcactagccacaaagcacaggtacaaactgggtcatcgcctgttcacaaaatgctctcttgatcttatttgcctcatcttcctcatggttgtacagaggatagcaccccaccatgccagcctgacttggagatatctcctgctgcctgcctgcagggagttaccccagtttccaaaaacagtcgcccagataaaggaggaaaagggaaaggcagacgaatggcatggcttttactaaagaaaagatgttggcctcatactctatactcagggcttaatgaactggaatctgcataactcagcagtcaacccagaagggaaatggttaaactgagcttgttattgcctcggagagcctaagagcacccgcacacttaattctactccctgtctagaaaagctgtcagggagtcgtttggaattgcaatgtagttattaagggctgttaaccagcctgcattacatctggaagtcaggacttgggtgctgactatgaagggccctgttttcaaaatctaacattgcaagtgtaaatgggcaagaagcctccgttgtgctttttttttcctcttcagtaacttttgcaacattattgcatagaagatccctgaccatttactaggaacctggttaagcaagcactaatctcttttcctggagatcaaggatgcaacctcaggttgagaaagaaacagggttccctgggcccattagactgtttgcagggcatcactgcttccccctgacacctcacaactagcaaaaattgtctttgtctttggaaattatagagggatttgggtatccagattgtgcagatgcaaacttaggctgtcttgatgcaaacttagaaccacagaaatgcttttaaaatgcctgttttaagatggaattgttgtttttataatttgattttagtgctaaataaatgattggctttgtacatgaatatgttctgtacaagtgctctttcactagtactacagataatcaaagctatcagaattgtgtctttgatcatatttgacggtaatacacaaataaatccatgttttagcaaaaaaaaaaaaaaaaaaaaaaaa

SEQ ID NO: 85 - protein, 216 aa, Homo sapien
MSEAYFRVESGALGPEENFLSLDDILMSHEKLPVRTETAMPRLGAFFLERSAGAETDNAVPQGSKLELPLWLAKGLFDNKRRILSVELPKIYQEGWRTVFSADPNVVDLHKMGPHFYGFGSQLLHFDSPENADISQSLLQTFIGRFRRIMDSSQNAYNEDTSALVARLDEMERGLFQTGQKGLNDFQCWEKGQASQITASNLVQNYKKRKFTDMED

SEQ ID NO: 86 - DNA, 2005 bp, Homo sapien
ctgggacccgggctggaaggcagggcatcagctatggaacaacctgggcaggatcccacctcagacgacgtcatggactcgttcctggaaaagttccagagccagccttaccgtggcggctttcatgaggaccagtgggagaaggaatttgaaaaggtccccctatttatgtcgagagcgccatcagaaattgatcccagggagaatcctgacttggcttgtctccagtcaattatttttgatgaggagcgttctccagaagaacaggccaagacctataaagatgagggcaatgattactttaaagaaaaagactacaagaaagctgtaatttcatacactgaaggcttaaagaagaaatgtgcagatcctgatttgaatgctgtcctttataccaaccgggcagcagcacagtactatctgggcaattttcgttctgctctcaatgatgtgacagctgccagaaagctaaaaccctgccacctcaaagcaataataagaggtgccttatgccatctggaactgatacactttgccgaggccgtgaactggtgtgatgagggactgcaaatagatgccaaagagaagaagcttctggaaatgagggctaaagcagacaagctgaagcgaattgaacagagggatgtgaggaaagccaacttgaaagaaaagaaggagaggaatcagaatgaggctttactccaggccatcaaggctaggaatatcaggctctcagaagctgcctgtgaggatgaagattcagcctcagaaggtctaggtgagcttttcctggatggactcagcactgagaacccccatggagccaggctgagtctagatggccagggcaggctgagctggcctgtgctctttctgtacccagagtatgcccagtcggacttcatctctgcttttcatgaggactccaggtttattgatcatctaatggtgatgtttggtgaaacaccttcttgggacctagagcaaaaatattgcctgataatttggaggtctactttgaggatgaggacagggcagaactataccgggtgcctgccaagagcaccttgctacaggttctacagcaccagaggtactttgtaaaagccctgacaccagcatttttggtctgtgtaggatcctctcctttttgcaagaattttctccgggggagaaaggtgtaccagatacgatgactaagccagggcccctggatctcctcccttaccctcctctgctgggaacctagcacacctgaatcagctggacatactgctggagtccagtgctttctttccgtcaccctggggatagtccttcctggcatcgtggtgggggaggagcctctggcttccctaaactgcagctctctggctggtcttcactttcctcagttgatataaaactctggtcttggccatgatgtccttggattccatcgctaaagggaccatctgctgcagttaccacagcaactgacttgagcggcacctggtctgtggagatggactcaggatccagtgacatgattctgaacttttgtggagtttgacaccttagagaagctacccctcaaactgcacatctacacacaaacaaacaatgcataggattccaaggctttaaagctgagagaccctggcctcaagttatttcatgcgcacagagggaagccatgtggggttgctgaagatgccttgaggtgaaatgggggcaggaaagccacatcttgctctgcatttataaagaccgtacaaactcagatccttggtacccctaaaaagattgccaattttcttcatctttgccatatggaggactgtgacagactttggacagtggcctcttgagttcctctgcagttttgacatttaggattttgtgtcttttaaactggaaaatcttctagcatgttgggttgttacagagtatatttttgtctgcagctgtttgttgccccattcctaagaggagtttatccatcctgaaaaaaaaaaaaaaaaaa

SEQ ID NO: 87 - protein, 356 aa, Homo sapien
MEQPGQDPTSDDVMDSFLEKFQSQPYRGGFHEDQWEKEFEKVPLFMSRAPSEIDPRENPDLACLQSIIFDEERSPEEQAKTYKDEGNDYFKEKDYKKAVISYTEGLKKKCADPDLNAVLYTNRAAAQYYLGNFRSALNDVTAARKLKPCHLKAIIRGALCHLELIHFAEAVNWCDEGLQIDAKEKKLLEMRAKADKLKRIEQRDVRKANLKEKKERNQNEALLQAIKARNIRLSEAACEDEDSASEGLGELFLDGLSTENPHGARLSLDGQGRLSWPVLFLYPEYAQSDFISAFHEDSRFIDHLMVMFGETPSWDLEQKYCLIIWRSTLRMRTGQNYTGCLPRAPCYRFYSTRGTL

SEQ ID NO: 88 - DNA, 1568 bp, Homo sapien
gtttacgtctcgctccggggcggaaagtgggtcagggccgggctggcggagcgcgcagcgggggctgcagattctttccaccatggccagacgcccccggaacagcagggcctggcacttcgtcctgagtgcagcccgccgagacgcagatgcccgggccgtggctctagcgaggcctccttctgtagcagcctgcactcggcccaccggggcagggactgccgctgcggagaggaagacgagtgtgagcgtggggcccagcccctgctgggactgcactgcgggcgggcctgggggtgggcagggcagagccccatggagctctcagggctgccccagcctgggcctctcttgcagatttcgactgggtctgggatgacttaaataagtcatcagccaccctgctgagctgtgacaaccgtaaggtcagcttccacatggagtacagctgcggcacagcggccatccggggcaccaaggagctgggggagggccagcacttctgggagatcaagatgacctctcccgtctacggcacactcacctttttcaagaacaggaagtgtataggtgtggcagccaccaagctgcagaacaagagattctacccgatggtgtgctccacggcggcccggagcagcatgaaggtcacccgctcctgtgccagcgccacttccctccagtacctgtgctgccaccgcctgcgccagctgcggccagactcgggagacacgctggagggtctgccgctgccgccgggcctcaagcaggtgctacacaacaagctgggctgggtcctgagcatgagttgcagccgccgcaaggctccagtgtccgatccccaggcagcgacctccgcccaccccagcagtcgcgagcctcggccctgccagaggaagcgctgccgccggacctgactgacttcccagtggaactgccttcttgggctggggcagcccctttcctctgtcccttctttctctgtcccttccttccagccacactccagggcggagttggatgaggcccgtccggagggagccatctcttgctcccgaggctgggacagtcctttctgtgggggctctagggcccctctgctgctgtgctgggtggggaagcggctgccctgagccccaggtcttgtgggaggctgcgaggacgagagcctggctggagcccgcgttgctgttcctagatggtgggcatcgggacgtcggatgtggacctggacaaataccgccacacgttctgcagcctgctgggcagggatgaggacagctggggcctctcctacacgggtgcgtgaggcccagggtggggcggggccgagcctggagctcccgggctcactgcgaccctggctgcccccaggcctcctccaccacaagggcgacaagaccagcttctcgtcgcggttcggccagggctccatcattggcgtgcacctggacacctggcacggcacactcacctttttcctaacttgctctgcatgctgtcagcggctgccccgccgtcatagacttaaaggactgcaataaatgtagagttgatgtctaacaccc

SEQ ID NO: 89 - protein, 159 aa, Homo sapien
MEYSCGTAAIRGTKELGEGQHFWEIKMTSPVYGTLTFFKNRKCIGVAATKLQNKRFYPMVCSTAARSSMKVTRSCASATSLQYLCCHRLRQLRPDSGDTLEGLPLPPGLKQVLHNKLGWVLSMSCSRRKAPVSDPQAATSAHPSSREPRPCQRKRCRRT

SEQ ID NO: 90 - DNA, 2505 bp, Homo sapien
cacaccctgcaggacacctcctggcacaacaccaccttctttggggtttttcaagcacagtggggtgacatgtacctgtcggccatctgtgagtaccagttggaagagatccagcgggtgtttgagggcccctataaggagtaccatgaggaagcccagaagtgggaccgctacactgaccctgtacccagccctcggcctggctcgtgcattaacaactggcatcggcgccacggctacaccagctccctggagctacccgacaacatcctcaacttcgtcaagaagcacccgctgatggaggagcaggtggggcctcggtggagccgccccctgctcgtgaagaagggcaccaacttcacccacctggtggccgaccgggttacaggacttgatggagccacctatacagtgctgttcattgacacaggagacggctggctgctcaaggctgtgagcctggggccctgggttcacctgattgaggagctgcagctgtttgaccaggagcccatgagaagcctggtgctatctcagagcaagaagctgctctttgccggctcccgctctcagctggtgcagctgcccgtggccgactgcatgaagtatcgctcctgtgcagactgtgtcctcgcccgggacccctattgcgcctggagcgtcaacaccagccgctgtgtggccgtgggtggccactctggatctctactgatccagcatgtgatgacctcggacacttcaggcatctgcaacctccgtggcagtaagaaagtcaggcccactcccaaaaacatcacggtggtggcgggcacagacctggtgctgccctgccacctctcctccaacttggcccatgcccgctggacctttgggggccgggacctgcctgcggaacagcccgggtccttcctctacgatgcccggctccaggccctggttgtgatggctgcccagccccgccatgccggggcctaccactgcttttcagaggagcagggggcgcggctggctgctgaaggctaccttgtggctgtcgtggcaggcccgtcggtgaccttggaggcccgggcccccctggaaaacctggggctggtgtggctggcggtggtggccctgggggctgtgtgcctggtgctgctgctgctggtgctgtcattgcgccggcggctgcgggaagagctggagaaaggggccaaggctactgagaggaccttggtgtaccccctggagctgcccaaggagcccaccagtccccccttccggccctgtcctgaaccagatgagaaactttgggatcctgtcggttactactattcagatggctcccttaagatagtacctgggcatgcccggtgccagcccggtggggggcccccttcgccacctccaggcatcccaggccagcctctgccttctccaactcggcttcacctggggggtgggcggaactcaaatgccaatggttacgtgcgcttacaactaggaggggaggaccggggagggctcgggcaccccctgcctgagctcgcggatgaactgagacgcaaactgcagcaacgccagccactgcccgactccaaccccgaggagtcatcagtatgaggggaacccccaccgcgtcggcgggaagcgtgggaggtgtagctcctacttttgcacaggcaccagctacctcagggacatggcacgggcacctgctctgtctgggacagatactgcccagcacccacccggccatgaggacctgctctgctcagcacgggcactgccacttggtgtggctcaccagggcaccagcctcgcagaaggcatcttcctcctctctgtgaatcacagacacgcgggaccccagccgccaaaacttttcaaggcagaagtttcaagatgtgtgtttgtctgtatttgcacatgtgtttgtgtgtgtgtgtatgtgtgtgtgcacgcgcgtgcgcgcttgtggcatagccttcctgtttctgtcaagtcttcccttggcctgggtcctcctggtgagtcattggagctatgaaggggaaggggtcgtatcactttgtctctcctacccccactgccccgagtgtcgggcagcgatgtacatatggaggtggggtggacagggtgctgtgccccttcagagggagtgcagggcttggggtgggcctagtcctgctcctagggctgtgaatgttttcagggtggggggagggagatggagcctcctgtgtgtttggggggaagggtgggtggggcctcccacttggccccggggttcagtggtattttatacttgccttcttcctgtacagggctgggaaaggctgtgtgaggggagagaagggagagggtgggcctgctgtggacaatggcatactctcttccagccctaggaggagggctcctaacagtgtaacttattgtgtccccgcgtatttatttgttgtaaatatttgagtatttttatattgacaataaaatggagaaaatgaaaaaaaaaaaaaaaaaaaa

SEQ ID NO: 91 - protein, 510 aa, Homo sapien
MYLSAICEYQLEEIQRVFEGPYKEYHEEAQKWDRYTDPVPSPRPGSCINNWHRRHGYTSSLELPDNILNFVKKHPLMEEQVGPRWSRPLLVKKGTNFTHLVADRVTGLDGATYTVLFIDTGDGWLLKAVSLGPWVHLIEELQLFDQEPMRSLVLSQSKKLLFAGSRSQLVQLPVADCMKYRSCADCVLARDPYCAWSVNTSRCVAVGGHSGSLLIQHVMTSDTSGICNLRGSKKVRPTPKNITVVAGTDLVLPCHLSSNLAHARWTFGGRDLPAEQPGSFLYDARLQALVVMAAQPRHAGAYHCFSEEQGARLAAEGYLVAVVAGPSVTLEARAPLENLGLVWLAVVALGAVCLVLLLLVLSLRRRLREELEKGAKATERTLVYPLELPKEPTSPPFRPCPEPDEKLWDPVGYYYSDGSLKIVPGHARCQPGGGPPSPPPGIPGQPLPSPTRLHLGGGRNSNANGYVRLQLGGEDRGGLGHPLPELADELRRKLQQRQPLPDSNPEESSV

SEQ ID NO: 92 - DNA, 1960 bp, Homo sapien
ggcacgaggggaagttgccggcggccgcgcggcctcccgggcgggcctacagccatgtcccgggacccggggtcgggcggctgggaggaggccccgcgcgcagctgccgcgctctgcaccctgtaccacgaggccggacagcggctgcgccgcctgcaggaccagctcgctgcccgcgacgccctcatcgctcgcctccgcgcccgcctggccgcgctggagggggacgccgcgccgtccctagtggacgcgctgctggagcaggttgcgcgcttccgggagcagctgcgaaggcaggagggcggcgccgccgaggcccagatgcgccaggaaattgagaggctgactgagcgactagaagaaaaagagagggagatgcagcagctgctgagccagccccaacacgagcgagagaaggaagtcgtcctgctacggaggagcatggcagaaggggagcgcgcccgggccgccagtgacgtcctgtgccgctccttggccaacgagacccatcagctgcggaggacgctgaccgccaccgcccacatgtgtcagcatctggccaagtgtctggatgaacgacagcatgcacaaaggaatgtgggggagagaagtcctgaccagtcggaacacacagatgggcacacctctgtccagagtgttattgagaagttgcaggaagaaaatcgactgttaaaacagaaggtgactcacgttgaagacctcaatgccaagtggcagcgctacaacgccagcagggacgaatacgtgagggggctccatgcgcagctcagggggctgcagatcccccacgagcccgagctgatgaggaaggagatctcccggctcaacagacagttggaagagaaaataaatgactgtgccgaagtgaagcaggagctggcggcctccaggacggcccgggatgctgcgttggagcgggtgcagatgctggaacagcagattctcgcttacaaggatgacttcatgtcagaaagggccgatcgggaacgggctcaaagtaggattcaagaactggaggaaaaggtcgcctctttgctgcaccaggtgtcctggagacaggattctcgagagccagacgccggccggattcacgctgggagcaaaactgccaagtatttggccgccgacgcattagagcttatggtgcctggtggctggaggcctgggactgggtcccagcagccagaaccccctgcagagggcgggcatcctggcgcggtccagagaggccagggggaccttcagtgccctcactgcctgcagtgcttcagtgacgagcaaggggaagagctcctcaggcatgtggccgagtgctgccagtgaccgagactcacccgtgcccttgcggcctcctggcccggtgcagctgccctcagggacagggtgggtgctctcagatgccatgggttgagctctactgagagccaaggcccctagaatagttgcggggcactctgatcgttcactttggtccctttggctatggaacaggctgggtcacagggaactgccagtgaggctggaggctggaggtggagatggggtcaggaacatctggcagagggaggtcccagtctgtgtctccatcaggcttaagccagagctatctggtgctggtgtgccagcccctcccccagcctgcctagaaaggggtggctgcctgagggagtcacttgtatggtccccagggtgggagccccatcctgttctatggaataaagcgtcgcctctctgcctcgaaccagtcaaatggagtattgcggctgcacgtcacactagggtggccacccccgccattgcgagccacatgtctgcactgagaaactgcatttcagtagcatttgtcatccagccggaagttaaagcacacttactttattcacctatttttataataaacgttcttgctgctgtgactgcaaaaaaaaaaaaaaaaaaa

SEQ ID NO: 93 - protein, 322 aa, Homo sapien
MQQLLSQPQHEREKEVVLLRRSMAEGERARAASDVLCRSLANETHQLRRTLTATAHMCQHLAKCLDERQHAQRNVGERSPDQSEHTDGHTSVQSVIEKLQEENRLLKQKVTHVEDLNAKWQRYNASRDEYVRGLHAQLRGLQIPHEPELMRKEISRLNRQLEEKINDCAEVKQELAASRTARDAALERVQMLEQQILAYKDDFMSERADRERAQSRIQELEEKVASLLHQVSWRQDSREPDAGRIHAGSKTAKYLAADALELMVPGGWRPGTGSQQPEPPAEGGHPGAVQRGQGDLQCPHCLQCFSDEQGEELLRHVAECCQ

SEQ ID NO: 94 - DNA, 2884 bp, Homo sapien
gcctgacgcggcgttgcgtcccccgggagctgcgctaggcgaacggctgcggcgctttgtgctccagtcgctcctaacgctccctggcccggccggggccgcgcagttagggcatctgaggcggggagaagcggcggggagacgccggctgccagcatgtcgctgcctccggagaaagcctccgagctgaagcagctcatccaccagcagctgagcaagatggatgtccatggtagaataagagaaatccttgctgagactatacgggaagaattggcacctgatcaacagcatttatcaacagaagatttgatcaaagcccttagacgtcgaggaatcattgacgatgtgatgaaagaacttaattttgttactgacagtgttgagcaagaactcccttcctctccaaaacaacctatttgttttgatagacaatcgacattaaaaaaaactaatattgatccaacacggaggtatctttaccttcaggttttgggtggaaaagctttcttggaacatctgcaagaacctgagcctttacctggacaagtttgttcaacgtttactttatgtttacattatcgaaaccaacgttttcgttctaaacctgttccatgtgcctgtgaaccagattttcatgatggctttttacttgaagtacacagagaaagcttgggtgatggaactagaatggctgattcaacaacaatgttatcaataagtgatccaattcatatggtgctaatcaaaacagacatatttggtgagacgactttagtagcatcatattttctggaatggcgatcggttttgggctcagaaaatggagtgaccagtctgactgtggaacttatgggtgtaggcacagaatcaaaagtttctgtgggaattttaaatataaaacttgaaatgtatccaccactcaatcaaacgttatctcaagaagtagtgaacacacagcttgctttggaacgtcagaaaactgcagagaaagagcgattatttcttgtatatgctaagcagtggtggagagaatatttgcaaattcgaccctcacacaactcacgactggttaagatttttgcacaggatgaaaatgggataaatagaccagtctgttcctatgttaaaccacttcgagctggacggcttcttgatactccaaggcaagcagcaagatttgttaatgtccttggttatgaacgagcccctgttattggaggaggaggtaaacaggagcagtggtgcactctgctggcctttctctgtagaaacaagggtgactgtgaagatcacgctaaccttctgtgcagccttcttcttggatatggattagaagcctttgtttgtgttgggaccaaggcaaaaggagtacctcatgcatgggttatgacttgtggaactgatggggccatcactttttgggagagtttaacaggacacaggtacatccataaacctaccaatcctgatgaacctccagttgctgaacagcccaaaccactgtacccatatcgaacaattggttgtgttttcaaccatcagatgttcctgggaaattgtcaaccctctgatgcagtagaaacctgtgtatttgatttgaacgatgaatccaaatggaaacccatgagtgaggaagcaattaaatctgtgtgtgctcctggagctacaacatcccttcctccctttccacctctgtgtgcatccacaattgacgcgtcagtaacaagtaatgaaattgaaatgcagctgaggctcctggtgtcagaacacaggaaggatcttggcctcactactgtttgggaagaccagctctcctaccttttatcaccagctttggcttcttatgaatttgagcgtacaacaagtatatcagcaggcaatgaagaatttcaagatgccataagaagggctgtacctgatggtcacacatttaaagggttcccaatacattttgtgtatagaaatgcaagacgtgcatttgccacatgtcttcgatctcctttctgtgaagaaataatctgttgccgtggagaccaagtgcgactggcagttcgtgtccgagtatttacttaccctgaatctgcatgtgctgtttggatcatgtttgcttgtaaatatcgctcggtattatagggccaatatttatataagatttatacctgtgtttaattggaattttacacattgtacattacttagctatttagaggtttgttattttaaaatcacaatctggcttgaatggcatacttcaattttgtatatacttgactggtaatgtttaaaaaaaatcatgcattcctttaaaaattaaggctgaaaaacttgtataaatctccctggaatttagtataaattaagtgtatattctattttaataaatgctactttgtttacagttatcagtagtttaaatattaatataaaatgcattcagttttctttacacaaacaggtaatcaaagagatgtttgtctaagggtttgagccctagacaaatcagtatgatcattacttttcacaggttaatggaattattttatacagattaggagaaattaacctcatgacagatttatttattgcattggtgaaaataaatgttaatgaattaccacttttgtggtttattcgtggtccttgggatatttgagactgtccagaaatttatggttggaccttgaagcaagagtaggaaaaaactaataccagaaaagcataaatattaataacctcatatgaaagtacatgaatcatttagaaatatttatcactgtgatttgttgtaaaaatgaattgggtattttagaaaaactttattatacctctttgttatgatactgataaattgtgatcttgcagtcgaaaaaaaaaaaaaaaa

SEQ ID NO: 95 - protein, 659 aa, Homo sapien
MSLPPEKASELKQLIHQQLSKMDVHGRIREILAETIREELAPDQQHLSTEDLIKALRRRGIIDDVMKELNFVTDSVEQELPSSPKQPICFDRQSTLKKTNIDPTRRYLYLQVLGGKAFLEHLQEPEPLPGQVCSTFTLCLHYRNQRFRSKPVPCACEPDFHDGFLLEVHRESLGDGTRMADSTTMLSISDPIHMVLIKTDIFGETTLVASYFLEWRSVLGSENGVTSLTVELMGVGTESKVSVGILNIKLEMYPPLNQTLSQEVVNTQLALERQKTAEKERLFLVYAKQWWREYLQIRPSHNSRLVKIFAQDENGINRPVCSYVKPLRAGRLLDTPRQAARFVNVLGYERAPVIGGGGKQEQWCTLLAFLCRNKGDCEDHANLLCSLLLGYGLEAFVCVGTKAKGVPHAWVMTCGTDGAITFWESLTGHRYIHKPTNPDEPPVAEQPKPLYPYRTIGCVFNHQMFLGNCQPSDAVETCVFDLNDESKWKPMSEEAIKSVCAPGATTSLPPFPPLCASTIDASVTSNEIEMQLRLLVSEHRKDLGLTTVWEDQLSYLLSPALASYEFERTTSISAGNEEFQDAIRRAVPDGHTFKGFPIHFVYRNARRAFATCLRSPFCEEIICCRGDQVRLAVRVRVFTYPESACAVWIMFACKYRSVL

SEQ ID NO: 96 - DNA, 1695 bp, Homo sapien
gttgccgctgcgcacctggctcaggtgagctgccccgcccccgcccggcgcgagccccaggtcctggcagcagcccctgacctgtccaggtgccctgtccagctgactgcaaggacagagaggagtcctgcccagctcttggatcagtctgctggccgaggagcccggtggagccaggggtgaccctggagcccagcctgccccgaggaggccccggctcagagccatgccaggtgtctgtgatagggcccctgacttcctctccccgtctgaagaccaggtgctgaggcctgccttgggcagctcagtggctctgaactgcacggcttgggtagtctctgggccccactgctccctgccttcagtccagtggctgaaagacgggcttccattgggaattgggggccactacagcctccacgagtactcctgggtcaaggccaacctgtcagaggtgcttgtgtccagtgtcctgggggtcaacgtgaccagcactgaagtctatggggccttcacctgctccatccagaacatcagcttctcctccttcactcttcagagagctggccctacaagccacgtggctgcggtgctggcctccctcctggtcctgctggccctgctgctggccgccctgctctatgtcaagtgccgtctcaacgtgctgctctggtaccaggacgcgtatggggaggtggagataaacgacgggaagctctacgacgcctacgtctcctacagcgactgccccgaggaccgcaagttcgtgaacttcatcctaaagccgcagctggagcggcgtcggggctacaagctcttcctggacgaccgcgacctcctgccgcgcgctgagccctccgccgacctcttggtgaacctgagccgctgccgacgcctcatcgtggtgctttcggacgccttcctgagccgggcctggtgcagccacagcttccgggagggcctgtgccggctgctggagctcacccgcagacccatcttcatcaccttcgagggccagaggcgcgaccccgcgcacccggcgctccgcctgctgcgccagcaccgccacctggtgaccttgctgctctggaggcccggctccgtgactccttcctccgatttttggaaagaagtgcagctggcgctgccgcggaaggtgcggtacaggccggtggaaggagacccccagacgcagctgcaggacgacaaggaccccatgctgattcttcgaggccgagtccctgagggccgggccctggactcagaggtggacccggaccctgagggcgacctgggtgtccgggggcctgtttttggagagccatcagctccaccgcacaccagtggggtctcgctgggagagagccggagcagcgaagtggacgtctcggatctcggctcgcgaaactacagtgcccgcacagacttctactgcctggtgtccaaggatgatatgtagctcccaccccagagtgcaggatcatagggacagcgggggccagggcagcggcgtcgctcctctgctcaacaggaccacaacccctgccagcagccctgggaccctgccagcagccctgggaaaaggctgtggcctcagggcgcctcccagtgccagaaaataaagtccttttggattctgaaaaaaaaaaaaaaaaaaaaaaaaaaaaaaaaaaaaaaaaaaaaaaaaaaaaaaaa

SEQ ID NO: 97 - protein, 410 aa, Homo sapien
MPGVCDRAPDFLSPSEDQVLRPALGSSVALNCTAWVVSGPHCSLPSVQWLKDGLPLGIGGHYSLHEYSWVKANLSEVLVSSVLGVNVTSTEVYGAFTCSIQNISFSSFTLQRAGPTSHVAAVLASLLVLLALLLAALLYVKCRLNVLLWYQDAYGEVEINDGKLYDAYVSYSDCPEDRKFVNFILKPQLERRRGYKLFLDDRDLLPRAEPSADLLVNLSRCRRLIVVLSDAFLSRAWCSHSFREGLCRLLELTRRPIFITFEGQRRDPAHPALRLLRQHRHLVTLLLWRPGSVTPSSDFWKEVQLALPRKVRYRPVEGDPQTQLQDDKDPMLILRGRVPEGRALDSEVDPDPEGDLGVRGPVFGEPSAPPHTSGVSLGESRSSEVDVSDLGSRNYSARTDFYCLVSKDDM

SEQ ID NO: 98 - DNA, 1680 bp, Homo sapien
cggggccggggtccgagctcgggcccgcctccgcctccgccagctcctgtgagctgccgagtgctaggcacccgggctcttctgggggctccagaactaagccacccagacaccatcatctcgaaaaccccagcccttctcccatggcaggctacttgccccccaaaggctacgccccttcgcccccacctccctaccctgtcacccctgggtacccggagccggcgctacatcctgggcccgggcaggcgccagtgcccgcccaggtacctgccccagctcccggcttcgccctcttcccctcgcctggccccgtggccttggggtctgctgcccccttcttgccactgccaggggtgccttctggcctcgaattcctggtgcagattgatcagattttgattcaccagaaggctgagcgagtggaaacgttcctaggctgggagacctgtaatcggtatgaactgcgctctggggccgggcagcccctgggtcaggcggccgaggagagcaactgctgcgcccgtctgtgctgtggcgcccgccggccgctgcgtgtccgcctggccgaccccggggaccgtgaggtgctgcgtttgctccgcccgctgcactgtggctgcagctgctgcccctgtggcctccaggagatggaagtacaggctccaccaggcaccaccattggccacgtgctacagacctggcatcccttcctccccaagttctccatccaggatgccgatcgccagacagtcttgcgagtggtggggccctgctggacctgtggctgtggcacagacaccaactttgaggtgaagactcgggatgaatcccgcagtgtgggccgcatcagcaagcagtgggggggcctggtccgagaagccctcacagatgcagatgactttggcctacagttcccgctggacctggatgtgagggtgaaggctgtgctgctgggagccacattcctcattgactacatgttctttgagaagcgaggaggcgctgggccctctgccatcaccagttagaggccaccatggtgtgaggagaccatcacctcgaccagaactccagatggtcacctgccctggcccctcctctgggcagcccctttcctccatgtacactgcaggggacagaaggggggccccatccctaccctactccctggccgcctgcccctgtggttcccaaggaggggtatgtatgagagccgctctcctgctacctcccaccactgtcccagcagtccctcggcacacaggcatatcagctttcacactttccccatgcactctctcccacccccttccagggcctctgctccaaaggaggcctctggaacccaggactctggggttttacaagagggctggggtgtggaagggcaagctgcaccaaagacggtggatatagccaccgcccccccgccgctgcctagcatctgcttggccaattagttcagcctcagaccatggcactttgagggggtctctacctccccatcaacagctgcagggggaccccagtgccaacttcctctcccactagggccctgccttcagctggtgcttgctgcgattcctgtgccttatgtaactgcccttccttcccttgccctaggaaaaaggctgcatctttatatgttacattcatataaactttgtaactttttgg

SEQ ID NO: 99 - protein, 295 aa, Homo sapien
MAGYLPPKGYAPSPPPPYPVTPGYPEPALHPGPGQAPVPAQVPAPAPGFALFPSPGPVALGSAAPFLPLPGVPSGLEFLVQIDQILIHQKAERVETFLGWETCNRYELRSGAGQPLGQAAEESNCCARLCCGARRPLRVRLADPGDREVLRLLRPLHCGCSCCPCGLQEMEVQAPPGTTIGHVLQTWHPFLPKFSIQDADRQTVLRVVGPCWTCGCGTDTNFEVKTRDESRSVGRISKQWGGLVREALTDADDFGLQFPLDLDVRVKAVLLGATFLIDYMFFEKRGGAGPSAITS

SEQ ID NO: 100 - DNA, 4674 bp, Homo sapien
ggttggctcttgcacttcctggctctctggacttggttatgtgattgagcctccatggcctccgtgtctttgtctgtcaatgggtttgattaaagcgttgacctcataggttcttaggaggattaatgagaacattttatgtaaagctgcttacatggagccttggtatgtgccggaaagctttagccctttattaaaagtgacagcagacccagcacggtggctcatgcctgtaatcccagcactttgggaggctgaggcgggcagatcacttggggtcaggagttcgagaccagctactcgggaggcagaggcaggagaatcgcttgaacctggggtgcagaggttgcagtaagctgagctcgcaccactgcactccagcctgagtgacagagtgaaactcagtctcaaaaaaaaaaaaaaaaaaagagtggcagtagtggtgggggagacccccatcccccttgctggggtttcctaggaaagaaggctggtgagagctgttgctggtggtgggccctgagccgcagggtctgagggcctaccctgtgctaccccagagctgcctgagaactggacagacacgcgggagacgctgctggaggggatgctgttcagcctcaagtacctgggcatgacgctagtggagcagcccaagggtgaggagctgtcggccgccgccatcaagaggatcgtggctacagctaaggccagtgggaagaagctgcagaaggtgactctgaaggtgtcgccacggggaattatcctgacagacaacctcaccaaccagctcattgagaacgtgtccatatacaggatctcctattgcacagcagacaagatgcacgacaaggtgtttgcatacatcgcccagagccagcacaaccagagcctcgagtgccacgccttcctctgcaccaagcggaagatggcacaggctgttaccctcaccgtagcccaggccttcaaagtcgcctttgagttttggcaggtgtccaaggaagagaaagagaagagggacaaagccagccaagagggaggggacgtcctgggggcccgccaagactgcaccccccccttgaagagcttggtcgccactgggaacctgctggacttagaggagacggctaaggccccgctgtccacggtcagcgccaacaccaccaacatggacgaggtgccgcggccacaagccttgagtggcagcagtgttgtctgggtgagtggttgtgtggccagcagatcggtgatcctcagcctgacctctgggtgagcctggggctgctccagggaccaggctctgggacccgtgacttgtgggcctctgggaggaccagacccagcccggtagtgcccaggcgcaggataggggatgaacaatgtcccttttgaacctgaggctgcatccccaacaggcttggctcccagcacagctgtctcctcacaatgcttggcctcttggcctgagcgtccacggctctgcccaccacaagaccagccaaaggcgcccttgttcttggtgtggcagagctcgctcctaccacccctccccctcagccgcctgaatgaggacccagagacttgggcagtcaccagcttggtccctgactccctcagggactcagggcaagccccctgacctctctgtctcagctttttcatctcagtaagggtgatgacctctgccaacggaatctccccgaggaacctgaaatttaattttaatttttcatttggaaataatttcagactgtgttacaaaattagtacagagaattcctgttcacccgtcatccagattccccaattgttaacatcttgcatgaccacattacactggtcagaatcaggaaacaaacacgatactgtgctgttatataatctatagaacttacacatttctccaggtgccccttcagtgtcctgtttctggcccaggatccattgcagaatcacatgttaacttgtcgtctctttaatttttaaaaatctgggtactgggggctcccctggtgtccctcgagcctgttctctgctgtttgggaaccacccttgccacttgcccatcctcaccagaacgccatggagggacctcacctgtcgcttttctgctgaggctgtgggactcctggcatcagttatccctcatgaacttggaattttggcttggcttttggaagtaaatgaaggcaagaaaactcccttccccaccctcttccttttggaatttgaaagccatagaagtcatcaggtccaatgccctcctcttattgaaggaaaagctgagtttcaacgtggagcagtgacttgcccaaggtctcacgggcaggtagcatggaccagggcactgaacccacctgggtctccagacaccctgggacatggcctttctcctctcccacgtctccagctttgggtccttgggctgagatgctggcgatgcacccaggcaggaggcctgcctgaggccgtgcctccaggcgcccaccctgagcttgtgtcctgagtccctgtagcttacccagggctgggacaagccccagctgtgagcatgggctcccccaaacatagttcttatctcctgctttgtttttcccaaggagctggatgatggcctggatgaagcgttttcgaggcttgcccagtctcggacaaaccctcaggtcctggacactggcctgacagcccaggacatgcattacgcccagtgcctctcgcctgtcgactgggacaagcctgacagcagcggcacagagcaggatgacctcttcagcttctgagggcccggggccagccggacacaagcggccctgacacgtgatggaccaaagccacctgctgcgggggagccagttctggggcccgcctgccacctctcccagccctcagcattgtcagcctgaagatcagagctgcagccagtcaggcaggggagagatttttcttttaagccctgctctttctctgagaaccaaaagatgccttgaatatttattcagtgacttctggcttatgctcagaagccagtctgcgtcaggcacgtctcctgctgcgtgacatgtgcagtgctgtaatcggctcccgcttgctctcctggagcaagctctgccctggctgtgggtatcaggactgtgaccaaagcatttctagtcccttctctctttctaaggacccaaatttccctgggggcatcctgcttcctgaaagctgttggatttcagtgatttttccccccaccccccagcacaggagagcacccacagccgcagaaggggaatgtgtcctcctgctctgcttcctcagggcccagcaggcgggggtttgagccctggaccccaggctcttagagactaaggggcagctcctgaccaaagacgatacagcttggcactttaaagcattaacagcaggtgtgaccctgagggctcctccatggtgctgcattgagtccagctttccttctgcccttcctccaggagaaggggcccaaggtccccgtggatggtctccacctgtgcttggaaccagtgtaactggctgctccctgctcccagggactgacacggggatcatctctgtgaccgccctccgtcgggcccctgcctgccttctcccctccacgcaaggctgtgctcttcctctggtttctgtgtgtccgtttgagtgtctgcgccccgcctccccatacttcctgggatgatgtgtgaaacctgacacctagatttatttggaaatattctatgaccactttacagatgaggaaactgaggcctcaagcgtggaggggtagagtgaagagtagaacccaggtctgatgccaaagctgctttcttctctgcctcctcctcacgcaactcacacctccttttcttctagctttgttgtcctcccaggaaccaaaaaaccccagctattttctgaccaaaatgtgtttcataacaaaccatctggtgcctttccacacagaactggcaggagcctcgtgtcctgctagctgtctctcttgttgatttccgtgaaaatgcaagtgtttgaagtctgctcattccgagggtgaaacaaaatccaaccctgtcagaatcatgctgttctctttgctgacactgtgaccctgggtcgggacagaccagcagcaatctgtctttagaatcgctttccttcctccccttttgcccccgtggggctcccggcatcctgaaagccagcaaagcctccagcatcttttccatcctgaggtgcctcccagtggcctggcttgtcggagcaagtttcatcagccctagggaaaacacggccctcctgggaacctccttacctggagtaaccggacaccttagacggaggtgcctgagggtggggtgggatttgcagggtcattatcagaacatgaggataacttccttgcccctgctctgtagccacctccttggcaccggcctctatttgtcataaggcggcgtgggcgaggcctgacacaggccagccttggcacgaggggggccaggggttctgagaagcgctgccctgtgagagccacgctggccttcgtctccatctctggttgacgggctgtccgtttgcctcctgtgtgtctgcagacaagtcttgctgtgctttatttgtgaaactttaatgaggaaaaaacaaataataaatgttctcgttttgaaactc

SEQ ID NO: 101 - protein, 221 aa, Homo sapien
MLFSLKYLGMTLVEQPKGEELSAAAIKRIVATAKASGKKLQKVTLKVSPRGIILTDNLTNQLIENVSIYRISYCTADKMHDKVFAYIAQSQHNQSLECHAFLCTKRKMAQAVTLTVAQAFKVAFEFWQVSKEEKEKRDKASQEGGDVLGARQDCTPPLKSLVATGNLLDLEETAKAPLSTVSANTTNMDEVPRPQALSGSSVVWVSGCVASRSVILSLTSG

SEQ ID NO: 102 - DNA, 3900 bp, Homo sapien
cgatggccctgcccagtcccagacagaacctactacgtgcggcggcagctggggcgggaaggcgggcgctgggggcgctgcggccgctgcagcgcagggtccacctggtcggctgcacctgtggaggaggaggtggatttcaggcttcccgtagactggaagaatcggctcaaaaccgcttgcctcgcaggggctgagctggaggcagcgaggccgcccgacgcaggcttccggcgagacatggcagggcaaggatggcagcccggcggcagggcccggcgaggagcgcgaacccgcggccgcagttcccaggcgtctgcgggcgcgagcacgccgcgaccctgcgtgcgccggggcgggggggcggggcctcgcctgcacaaatagggacgagggggcggggcggccacaatttcgcgccaaacttgaccgcgcgttctgctgtaacgagcgggctcggaggtcctcccgctgctgtcatggttggttcgctaaactgcatcgtcgctgtgtcccagaacatgggcatcggcaagaacggggacctgccctggccaccgctcaggaatgaattcagatatttccagagaatgaccacaacctcttcagtagaaggtaaacagaatctggtgattatgggtaagaagacctggttctccattcctgagaagaatcgacctttaaagggtagaattaatttagttctcagcagagaactcaaggaacctccacaaggagctcattttctttccagaagtctagatgatgccttaaaacttactgaacaaccagaattagcaaataaagtagacatggtctggatagttggtggcagttctgtttataaggaagccatgaatcacccaggccatcttaaactatttgtgacaaggatcatgcaagactttgaaagtgacacgttttttccagaaattgatttggagaaatataaacttctgccagaatacccaggtgttctctctgatgtccaggaggagaaaggcattaagtacaaatttgaagtatatgagaagaatgattaatatgaaggtgttttctagtttaagttgttccccctccctctgaaaaaagtatgtatttttacattagaaaaggttttttgttgactttagatctataattatttctaagcaacttgtttttattccccactactcttctctctatcagataccatttatgagacattcttgctataactaagtgcttctccaagaccccaactgagtccccagcacctgctacagtgagctgccattccacacccatcacatgtggcactcttgccagtccttgacattgtcgggcttttcacatgttggtaatatttattaaagatgaagatccacatacccttcaactgagcagtttcactagtggaaataccaaaagcttcctacgtgtatatccagaggtttgtagataaatgttgccaccttgtttgtaacagtgaaaaattgaaaacaacctggaagtccagtgatgggaaaatgagtatgtttctgtcttagattggggaacccaaagcagattgcaagactgaaatttcagtgaaagcagtgtatttgctaggtcataccagaaatcatcaattgaggtacggagaaactgaactgagaaggtaagaaaagcaatttaaagtcagcgagcaggttctcattgataacaagctccatactgctgagatacagggaaatggaggggggaaagctggagtattgatcccgcccccctccttggttgtcagctccctgtcctgtgtgtgggcggaacatagtccagctgctctatagcaagtctcaggtgtttgcagtaagaagctgctggcatgcacgggaacagtgaatgccaaacacttaaagcaattcgatgtttaagtatgtaagttcttttttttttagacagcgtttcgctcttgttgcccaggctagcatgcaatggtgtgacctcggcttactgcaacctccgccttcccagattcaagcgattctcctgcctcaggctcccaagtagctaggaccaggtgcgcgccaccacgcccggctaatttttgtattttgtatttttagtagagatggggtttcaccatgttggtcaggctagtctcgaactcgtgaccgcaagcgattcacccacctcagcctcccaaagtgctgggattaccggcttgagccaccacacccggcacatcttcattctttttatgtagtaaaaagtataaggccacacatggtttatttgaagtattttataatttaaaaaaatacagaagcaggaaaaccaattataagttcaagtgagggatgatggttgcttgaaccaaagggttgcatgtagtaagaaattgtgatttaagatatattttaaagttataagtagcaggatattctgatggagtttgactttggttttgggcccagggagtttcagatgcctttgagaaatgaatgaagtagagagaaaataaaagaaaaaccagccaggcacagtggctcacacctgtaatcccagcgctttgggaggctaaggcaggcagatcacttgagaccagcttgggcaacatggcaaagccccatctctacaaaaaacacaaaaattagctgggcattgtggcgcacacctgtattcccatctagtcaggaagctgagatggaagaattaattgagcccacgagttcaaggctgcagtgagtcgtgattgtgccactgcactccagccggggtgacagaagagaccttgtctcgaaaacgaatctgaaaacaatggaaccatgccttcataattctagaaagttattttcaactgataaatctatattcacccaaataatcaagggtgaaggtaaaataatacatttttagacaagcaaagactcaggggttacctccatgtgccctttttagggaagctgttggagaaaatactccagcaaaatgaaggagtacacaaaccagagaatgacatgaatccagcaaataggatccaacacaggcaatattccagctatggagctagctttaaaaaggaacagtaaaaatattaatcggttagctgggtggaatggcccatgcctgtagtcccagctactcaggaggctcagcagcaggacgacttgagcccaagagttccagaccagcctggccaccttagtgagatcccttctcttaaaaataataacttattgccagatttggggcatttggaaagaagttcattgaagataaagcaaaagtaaaaaaaaaaaaaaaaaaaacaaggggaaagggttggttaggcaatcattctagggcagaaagaagtacaggataggaagagcataatacactgtttttctcaacaaggagcagtatgtacacagtcataatgatgtgactgcttagcccctaaatatggtaactactctgggacaatatgggaggaaaagtgaagattgtgatggtgtaagagctaatcctcatctgtcatatccagaaatcactatataatatataataatgaaatgactaagttatgtgaggaaaaaaacagaagacattgctaaaagagttaaaagtcattgctctggagaattaggagggatggggcaggggactgttaggatgcattataaactgaaaagcctttttaaaattttatgtattaatatatgcattcacttgaaaaactaaaaaaaaacaataatttggaaaaacccatgaaggtaactaacggaaggaaaaactaagagaatgaaaagtatttgcctctggaaagaacaactggcaggactgttgttttcattgtaagacttttggagccatttaattgtacttaaccattttcatctatttctttaataagaacaattccatcttaataaagagttacacttgttaata

SEQ ID NO: 103 - protein, 187 aa, Homo sapien
MVGSLNCIVAVSQNMGIGKNGDLPWPPLRNEFRYFQRMTTTSSVEGKQNLVIMGKKTWFSIPEKNRPLKGRINLVLSRELKEPPQGAHFLSRSLDDALKLTEQPELANKVDMVWIVGGSSVYKEAMNHPGHLKLFVTRIMQDFESDTFFPEIDLEKYKLLPEYPGVLSDVQEEKGIKYKFEVYEKND

SEQ ID NO: 104 - DNA, 1891 bp, Homo sapien
ctttctgcccgactcccacagctacaccatgcaggaattcgcccggcgttacttccggaggtcccaggccttgctgggccagactgatggaggtgccgcaggaaaggacacggacagcctggtgcagtacaccaaggctcccatccaggagtcgctcctcagcctcagtgatgatgtgagcaagctggctgtagccagcttcctggccctgatgcggtttatgggtgaccagtccaagccccggggcaaggatgagatggatctgctctatgaactgctgaagctgtgccagcaggagaagctgagggatgagatttactgccaggttatcaagcaggtcacgggacacccccggccggaacactgcactcgaggctggagcttcctcagccttctcacaggcttcttccccccgtcgaccaggctgatgccctacctgaccaagtttctgcaggattcaggccccagccaagagctggcccggagcagccaggagcacctccagcgcacagtcaaatatggggggcgccggcggatgcccccaccgggtgaaatgaaggctttcctgaaaggacaagcgattcgcctgcttcttattcacctgccggggggtgtggattataggacgaatatccagactttcacagtagcagcagaagtgcaggaggagctgtgccggcaaatgggtatcacggagcctcaggaagtgcaggaattcgccctcttcctcatcaaagagaagagccagctggtgcggcccctgcagcccgccgaatgcctcaacagcgtggtagtggaccaggacgtgagcctgcacagccggcggctccactgggagaccccactgcacttcgataactccacctacatcagcacccactacagccaggtgctgtgggactaccttcaggggaagctgccagtcagcgccaaggcagacgcgcagctcgccaggctggccgccctgcagcacctcagcaaggccaacaggaataccccctcagggcaggacctgctagcttacgtgccaaagcagctgcaacggcaggtgaacacggcctccatcaagaacctgatgggtcaggagctgagacggctggaaggacacagcccccaggaagcacagatcagcttcatcgaggccatgagccagctgcccctcttcggctacaccgtctatggggtgctgcgagtgagcatgcaggccctgtccggacccactctcctggggctcaaccgccagcatctcatcctcatggaccccagctcccagagcctgtactgccgcattgccctgaagagcctgcagcggctccacctgctaagccctctggaggagaaggggccccctggcctggaagtcaactatggctcagctgacaacccccagaccatctggtttgagctgccacaggcccaggagctgctatacaccactgtcttcctgatagacagcagtgcctcttgcactgagtggcccagcatcaactgagaggagtgcaggccggggagagaagaggatgaggcctcccccggcccaagtctcacccacatggtctgccttggatgctatcagatcactgttctagaacctgcctcagcacagcccagccggcccacatgcaggccatgaggcaggggctgctatcacgtcaccagcaggcaaagaaaacagccagaccctctccaggacggcctggggccaaagcgggctgcaggaactcggctggggcacctgaggttgcccagtctgagggagatgcccacccgaccccaggctccgcccaggccccacattagcacaagcccaggcatgggagaaacagctgctgaggaaataaaactccctggagaaaaaaaaaaaaaaaaaaaaaaaaaaaaaaaaaaaaaa

SEQ ID NO: 105 - protein, 487 aa, Homo sapien
MQEFARRYFRRSQALLGQTDGGAAGKDTDSLVQYTKAPIQESLLSLSDDVSKLAVASFLALMRFMGDQSKPRGKDEMDLLYELLKLCQQEKLRDEIYCQVIKQVTGHPRPEHCTRGWSFLSLLTGFFPPSTRLMPYLTKFLQDSGPSQELARSSQEHLQRTVKYGGRRRMPPPGEMKAFLKGQAIRLLLIHLPGGVDYRTNIQTFTVAAEVQEELCRQMGITEPQEVQEFALFLIKEKSQLVRPLQPAECLNSVVVDQDVSLHSRRLHWETPLHFDNSTYISTHYSQVLWDYLQGKLPVSAKADAQLARLAALQHLSKANRNTPSGQDLLAYVPKQLQRQVNTASIKNLMGQELRRLEGHSPQEAQISFIEAMSQLPLFGYTVYGVLRVSMQALSGPTLLGLNRQHLILMDPSSQSLYCRIALKSLQRLHLLSPLEEKGPPGLEVNYGSADNPQTIWFELPQAQELLYTTVFLIDSSASCTEWPSIN

SEQ ID NO: 106 - DNA, 3474 bp, Homo sapien
  Unsure 541: Unknown base
gatcattctagctatcccagaagccttttggaaaaagccccacatgtcttctttctttggtgttcaagctgaccttcctacctctttgccattgataattaggggcagaattaagtattgtaagttgttattctaagtttaaatagcttcctgtggtttttagaacaagcaggatatctttggagatgcaaaaagctcttgaattggatctgtctttgtgagatccttatgaacaatataacctgataacttgagaatcagaaaaacactgcatcttctggataagttaaccattgttagttttctgtagctactgatgttcatttgtactatatgttgcctttcagaatgtggtaattgtaatctttaacattttcatgtaaaacatatttcctgatcatctttccattgtcttcatggaaaattgataaatatttgtgccttccaactctcgtcttggttgaatgacttcatcttaatacaagcattttgatttcctttctttttacagcatggacaccacgttgctgaaaacatgctntgggactgccactgaatttatcttttgcggttttatgacaaagttattagtagtttcccttttttgaattagtattttcgaagttaatatcacaatgagttcaggcttatggagccaagaaaaagtcacttcaccctactgggaagagcggattttttacttgcttcttcaagaatgcagcgttacagacaaacaaacacaaaagctccttaaagtaccgaagggaagtataggacagtatattcaagatcgttctgtggggcattcaaggattccttctgcaaaaggcaagaaaaatcagatcggattacaacattctagagcaagctcatgcagttctcttggtgatgacaaggatgtcgtagagataaatgaaaagttcacagagttacttttggcaattaccaattgtgaggagaggtcagcctgtttaaaaacagaaacagactaagtaaaggcctccaaatagacgtgggctgtcctgtgaaagtacagctgagatctggggaagaaaaatttcctggagttgtacgcttcagaggacccctgttagcagagaggacagtctccggaatattctttggagttgaattgctggaagaaggtcgtggtcaaggtttcactgacggggtgtaccaagggaaacagctttttcagtgtgatgaagattgtggcgtgtttgttgcattggacaagctagaactcatagaagatgatgacactgcattggaaagtgattacgcaggtcctggggacacaatgcaggtcgaacttcctcctttggaaataaactccagagtttctttgaaggttggagaaacaatagaatctggaacagttatattctgtgatgttttgccaggaaaagaaagcttaggatattttgttggtgtggacatggataaccctattggcaactgggatggaagatttgatggagtgcagctttgtagttttgcgtgtgttgaaagtacaattctattgcacatcaatgatatcatcccagagagtgtgacgcaggaaaggaggcctcccaaacttgcctttatgtcaagaggtgttggggacaaaggttcatccagtcataataaaccaaaggctacaggatctacctcagaccctggaaatagaaacagatctgaattattttataccttaaatgggtcttctgttgactcacaaccacaatccaaatcaaaaaatacatggtacattgatgaagttgcagaagaccctgcaaaatctcttacagagatatctacagactttgaccgttcttcaccaccactccagcctcctcctgtgaactcactgaccaccgagaacagattccactctttaccattcagtctcaccaagatgcccaataccaatggaagtattggccacagtccactttctctgtcagcccagtctgtaatggaagagctaaacactgcacccgtccaagagagtccacccttggccatgcctcctgggaactcacatggtctagaagtgggctcattggctgaagttaaggagaaccctcctttctatggggtaatccgttggatcggtcagccaccaggactgaatgaagtgctcgctggactggaactggaagatgagtgtgcaggctgtacggatggaaccttcagaggcactcggtatttcacctgtgccctgaagaaggcgctgtttgtgaaactgaagagctgcaggcctgactctaggtttgcatcattgcagccggtttccaatcagattgagcgctgtaactctttagcatttggaggctacttaagtgaagtagtagaagaaaatactccaccaaaaatggaaaaagaaggcttggagataatgattgggaagaagaaaggcatccagggtcattacaattcttgttacttagactcaaccttattctgcttatttgcttttagttctgttctggacactgtgttacttagacccaaagaaaagaacgatgtagaatattatagtgaaacccaagagctactgaggacagaaattgttaatcctctgagaatatatggatatgtgtgtgccacaaaaattatgaaactgaggaaaatacttgaaaaggtggaggctgcatcaggatttacctctgaagaaaaaggtgaccatcttaacttatatgcgttaaaaataactgaagagcatattcacatgtcaaagtattagctgaaatgtgtgtctgtgtagttggggggttttcttttaaattagaaatttctttttatgtgatatatggttagctcctctttttgtaaattcttcctctcttctaaaagtgattgatgatgtggaataatgaactcctttaagaagctggctggttctagtatattaaatgcttaaataaaaagtcctttcctttccacctagcaatgatattctcagttgtttctctcttgtggtgcagagttgcattgggttttctacattttcccactgagtcttccctgttgtaaaagggagttagaaagctgctaactaggattaagtttatagtcagggaacagtgttataatctcttcctagctaatgggcttactcaaagattcaccacctgactttgaatttgtcagcagcatactgtaaacagctgtaatgttcagaggcttgcaggaaaaaacagagcatacttcagattgtactccatttaccttaacccctccaaaggaaataacagctatttcattatgtgcaatgtgttacaccctttcaaatgtaataaactcacaacaaaattgaaacataatacttgattataacttattaaatgtcttttatgtttttcctttgtcaggaaaacttgaaaactgtgcttttaattgaaataatattggatgaatgaaactgaattcagtattaaaatttgactgttagaaatgaaaaataaaatgatttaaaaatttaaaaaa

SEQ ID NO: 107 - protein, 698 aa, Homo sapien
MSSGLWSQEKVTSPYWEERIFYLLLQECSVTDKQTQKLLKVPKGSIGQYIQDRSVGHSRIPSAKGKKNQIGLQHSRASSCSSLGDDKDVVEINEKFTELLLAITNCEGEVSLFKNRNRLSKGLQIDVGCPVKVQLRSGEEKFPGVVRFRGPLLAERTVSGIFFGVELLEEGRGQGFTDGVYQGKQLFQCDEDCGVFVALDKLELIEDDDTALESDYAGPGDTMQVELPPLEINSRVSLKVGETIESGTVIFCDVLPGKESLGYFVGVDMDNPIGNWDGRFDGVQLCSFACVESTILLHINDIIPESVTQERRPPKLAFMSRGVGDKGSSSHNKPKATGSTSDPGNRNRSELFYTLNGSSVDSQPQSKSKNTWYIDEVAEDPAKSLTEISTDFDRSSPPLQPPPVNSLTTENRFHSLPFSLTKMPNTNGSIGHSPLSLSAQSVMEELNTAPVQESPPLAMPPGNSHGLEVGSLAEVKENPPFYGVIRWIGQPPGLNEVLAGLELEDECAGCTDGTFRGTRYFTCALKKALFVKLKSCRPDSRFASLQPVSNQIERCNSLAFGGYLSEVVEENTPPKMEKEGLEIMIGKKKGIQGHYNSCYLDSTLFCLFAFSSVLDTVLLRPKEKNDVEYYSETQELLRTEIVNPLRIYGYVCATKIMKLRKILEKVEAASGFTSEEKGDHLNLYALKITEEHIHMSKY

SEQ ID NO: 108 - DNA, 2793 bp, Homo sapien
caggtcccccagaccatccgaaccagccgcccatgatgacctgcgagagactcccatgccccactgcaggcctgggccccctcagggaggaagcgatgaagccaggggcagcctccagtcccttgcagcaggtccccgccccgccactgcctgcgaagaagaaccttcccactgcccctcccagacgccgcgtttccgagagggtgtccttagaagaccaaagtccggggatggcggcagagggggaccagctcagcctgcctccccaagggacctcagacggccctgaggacacgccccgggagagcacggagcaaggccaggacacagaggtgaaagccagcgatcctcacagcatgccagagctgcccaggacagccaaacaacccccagtcccgccccccaggaaaaaacggatctctcgacaactggcctcgaccctcccagctcccttagagaacgctgagctctgcacacaggcgatggccttggagacacccacgccgggtccacccagagagggccaaagccctgcttctcaggctgggactcagcaccctcctgcccaggccactgcccattcccagagctctccagagttcaagggctccctggcctccctctcagacagcttgggggtgtctgtcatggccaccgaccaggactcctactccaccagcagcacggaggaggagctggagcagttcagcagccccagcgtgaagaagaagccctccatgatcctgggcaaggctcggcaccggctgagctttgccagtttcagcagcatgttccacgctttcctctccaacaaccgcaagctgtacaagaaggtggtggagctggcgcaggacaagggctcgtactttggcagcctggtgcaggactacaaggtgtacagcctggagatgatggcgcgccagacctccagcacggagatgctgcaggagattcgcaccatgatgacccagctcaagagctacctgctgcagagcaccgagctcaaggccctggtggaccccgccctgcactccgaggaggagctcgaagcaattgtagagtctgccttgtacaaatgtgtcctgaagcccctgaaggaagccatcaactcatgcctgcatcagatccacagcaaggatggttcgctgcagcagctcaaggagaaccagttagtgatcctggccaccaccaccactgacctaggtgtgaccaccagcgtgccggaggtgcccatgatggagaagttcctgcagaagttcaccagcatgcacaaggcctactcacctgagaagaagatctccatcctgctcaagacctgcaaactcatctacgactccatggccctcggcaacccagggaagccctatggggcggatgacttcctgcctgtgctcatgtatgtgctggcccgcagcaacctcacggagatgcttctcaatgtggagtacatgatggagctcatggaccccgccctgcagctgggggagggttcctactatctgaccaccacctacggggccctggagcacatcaagagctacgacaagatcacggtgacccggcagctgagtgtggaggtgcaggactccatccaccgctgggagcgccggcgtactctcaacaaggcccgggcctcccgctcctccgtacaggacttcatctgcgtgtcgtacctggagcccgagcagcaggcgcggacgctggcgtcgcgggcggacacccaggcccaggcgctgtgcgcgcagtgcgcggagaagttcgcggtggagcggccgcaggcgcaccggctgttcgtgctggtggacgggcgctgcttccagctggcggacgacgcgctgccgcactgcatcaagggctacctgctgcgcagcgagcccaagcgcgacttccactttgtctaccggcccctggacggtggtggcggcggcggcgggagcccgccctgcctggtggtgcgggagcccaacttcctgtgaggccctcccggggcgcctcccctcacccccaggcgcacgtctggccccgcctctggctgcgcactcccgaccgcgacgtccacgcagcagagggacatgggccattccatgacgtgcccaggccaacgtcgcaggacagttgtgaaaataacatgacgctcgtccaaggccacttcctgagggcaagtcctaatagccctgagacaccgagacggcatgttcttcattagacggaaagggaaactgaggctcaggagagaggcgctccaggccgctgcagccaacaaaccggcgccctcttcacacgtagctcctcaggccattccccatgagtcccccacacccaccccatcctcggtctttgcaaagaagggcccgagcttagtttccccaggactggcctaggaaggagcaccggccacagctgctccccgtgccactcagggtggacccagcatctcaggagcacctcagggtgtcggttaagagacaggcctccacccctgcaccagagcctgctcttagctcccggtgcccccagaccccgcagctctgtgcccggcaagaagcagctagacacacgccagggcgccaagcacggccagctccgcggacccatggacaagcccagccccgcctcagggaaaacagggcctttccctacaggacacgccccagagctgtggcagattgcaggagccatcgtgtggggagaatttaataaaagcccttttgaaaaaaaaaaaaaaaaaaaaaaaaaaaaaaaaaaaaaaaaaaaaaaaaaaaaaaaaaaaaaaaaaaaaaaaaaaaaaaaaaa

SEQ ID NO: 109 - protein, 497 aa, Homo sapien
MALETPTPGPPREGQSPASQAGTQHPPAQATAHSQSSPEFKGSLASLSDSLGVSVMATDQDSYSTSSTEEELEQFSSPSVKKKPSMILGKARHRLSFASFSSMFHAFLSNNRKLYKKVVELAQDKGSYFGSLVQDYKVYSLEMMARQTSSTEMLQEIRTMMTQLKSYLLQSTELKALVDPALHSEEELEAIVESALYKCVLKPLKEAINSCLHQIHSKDGSLQQLKENQLVILATTTTDLGVTTSVPEVPMMEKFLQKFTSMHKAYSPEKKISILLKTCKLIYDSMALGNPGKPYGADDFLPVLMYVLARSNLTEMLLNVEYMMELMDPALQLGEGSYYLTTTYGALEHIKSYDKITVTRQLSVEVQDSIHRWERRRTLNKARASRSSVQDFICVSYLEPEQQARTLASRADTQAQALCAQCAEKFAVERPQAHRLFVLVDGRCFQLADDALPHCIKGYLLRSEPKRDFHFVYRPLDGGGGGGGSPPCLVVREPNFL

SEQ ID NO: 110 - DNA, 3352 bp, Homo sapien
acgagggacgcagccatggcggaggcggctttggaagccgtgcggagcgagttacgagaattcccggccgctgcaagggagctctgcgtgcctcttgctgtgccctacctggacaaacccccaactccgctccacttctaccgggactgggtctgccccaacaggccgtgcattatccgcaacgctctgcagcactggccggccctccagaagtggtccctcccctatttcagagccacagtgggctccacagaggtgagtgtggccgtgaccccagatggttacgcggatgccgtgagaggggatcgcttcatgatgccagctgagcgccgcctgcccctgagcttcgtgctggatgtgctggagggccgggcccagcaccctggagtcctctatgtgcagaagcagtgctccaacctgcccagcgagctgccccagctgctgcctgatctggaatcccatgtgccctgggcctccgaagccctgggaaagatgcccgatgctgtgaacttctggctgggggaggcggctgcagtgacttctttgcacaaggaccactatgagaacctctactgcgtggtctcaggagagaagcatttcctgttccatccgcccagcgaccggcccttcatcccctatgagctgtacacgccggcaacctaccagctaactgaagagggcacctttaaggtggtggatgaagaggccatggagaaggcagaggtgtccaggacctgcctgctcacggttcgtgtcctgcaggcccatcgcctaccctctaaggacctagtgaccccctctgactgctacgtgactctctggctgcccacggcctgcagccacaggctccagacacgcacggtcaagaacagcagtagccctgtctggaaccagagctttcacttcaggatccacaggcagctcaagaatgtcatggaactgaaagtctttgaccaggacctggtgaccggagatgaccctgtgttgtcagtactgtttgatgcggggactctgcgggctggggagttccggcgcgagagcttctcactgagccctcagggtgaggggcgcctggaagttgaatttcgcctgcagagtctggctgaccgtggcgagtggctcgtcagcaatggcgttctggtggcccgggagctctcctgcttgcacgttcaactggaggagacaggagaccagaagtcctcagagcacagagttcagcttgtggttcctgggtcctgtgagggtccgcaggaggcctctgtgggcactggcaccttccgcttccactgcccagcctgctgggagcaggagctgagtattcgcctgcaggatgcccccgaggagcaactaaaggcgccactgagtgccctgccctctggtcaagtggtgaggcttgtcttccccacgtcccaggagcccctgatgagagtggagctgaaaaaagaagcaggactgagggagctggccgtgcgactgggcttcgggccctgtgcagaggagcaggccttcctgagcaggaggaagcaggtggtggccgcggccttgaggcaggccctgcagctggatggagacctgcaggaggatgagatcccagtggtagctattatggccactggtggtgggatccgggcaatgacttccctgtatgggcagctggctggcctgaaggagctgggcctcttggattgcgtctcctacatcaccggggcctcgggctccacctgggccttggccaacctttatgaggacccagagtggtctcagaaggacctggcagggcccactgagttgctgaagacccaggtgaccaagaacaagctgggtgtgctggcccccagccagctgcagcggtaccggcaggagctggccgagcgtgcccgcttgggctacccaagctgcttcaccaacctgtgggccctcatcaacgaggcgctgctgcatgatgagccccatgatcacaagctctcagatcaacgggaggccctgagtcatggccagaaccctctgcccatctactgtgccctcaacaccaaagggcagagcctgaccacttttgaatttggggagtggtgcgagttctctccctacgaggtcggcttccccaagtacggggccttcatcccctctgagctctttggctccgagttctttatggggcagctgatgaagaggcttcctgagtcccgcatctgcttcttagaaggtatctggagcaacctgtatgcagccaacctccaggacagcttatactgggcctcagagcccagccagttctgggaccgctgggtcaggaaccaggccaacctggacaaggagcaggtcccccttctgaagatagaagaaccaccctcaacagccggcagratagctgagtttttcaccgatcttctgacgtggcgtccactggcccaggccacacataatttcctgcgtggcctccatttccacaaagactactttcagcatcctcacttctccacatggaaagctaccactctggatgggctccccaaccagctgacaccctcggagccccacctgtgcctgctggatgttggctacctcatcaataccagctgcctgcccctcctgcagcccactcgggacgtggacctcatcctgtcattggactacaacctccacggagccttccagcagttgcagctcctgggccggttctgccaggagcaggggatcccgttcccacccatctcgcccagccccgaagagcagctccagcctcgggagtgccacaccttctccgaccccacctgccccggagcccctgcggtgctgcactttcctctggtcagcgactccttccgggagtactcggcccctggggtccggcggacacccgaggaggcggcagctggggaggtgaacctgtcttcatcggactctccctaccactacacgaaggtgacctacagccaggaggacgtggacaagctgctgcacctgacacattacaatgtctgcaacaaccaggagcagctgctggaggctctgcgccaggcagtgcagcggaggcggcagcgcaggccccactgatggccggggcccctgccacccctaactctcattcattccctggctgctgagttgcaggtgggaactgtcatcacgcagtgcttcagagcctcgggctcaggtggcackgtcccagggtccaggctgagggctgggagctcccttgcgcctcagcagtttgcagtggggtaaggaggccaagcccatttgtgtaatcacccaaaaccccccggcctgtgcctgttttcccttctgcgctaccttgagtagttggagcacttgatacatcacagactcatacaaaaaaaaaaaaaaaaaa

SEQ ID NO: 111 - protein, 1012 aa, Homo sapien
MAEAALEAVRSELREFPAAARELCVPLAVPYLDKPPTPLHFYRDWVCPNRPCIIRNALQHWPALQKWSLPYFRATVGSTEVSVAVTPDGYADAVRGDRFMMPAERRLPLSFVLDVLEGRAQHPGVLYVQKQCSNLPSELPQLLPDLESHVPWASEALGKMPDAVNFWLGEAAAVTSLHKDHYENLYCVVSGEKHFLFHPPSDRPFIPYELYTPATYQLTEEGTFKVVDEEAMEKAEVSRTCLLTVRVLQAHRLPSKDLVTPSDCYVTLWLPTACSHRLQTRTVKNSSSPVWNQSFHFRIHRQLKNVMELKVFDQDLVTGDDPVLSVLFDAGTLRAGEFRRESFSLSPQGEGRLEVEFRLQSLADRGEWLVSNGVLVARELSCLHVQLEETGDQKSSEHRVQLVVPGSCEGPQEASVGTGTFRFHCPACWEQELSIRLQDAPEEQLKAPLSALPSGQVVRLVFPTSQEPLMRVELKKEAGLRELAVRLGFGPCAEEQAFLSRRKQVVAAALRQALQLDGDLQEDEIPVVAIMATGGGIRAMTSLYGQLAGLKELGLLDCVSYITGASGSTWALANLYEDPEWSQKDLAGPTELLKTQVTKNKLGVLAPSQLQRYRQELAERARLGYPSCFTNLWALINEALLHDEPHDHKLSDQREALSHGQNPLPIYCALNTKGQSLTTFEFGEWCEFSPYEVGFPKYGAFIPSELFGSEFFMGQLMKRLPESRICFLEGIWSNLYAANLQDSLYWASEPSQFWDRWVRNQANLDKEQVPLLKIEEPPSTAGRIAEFFTDLLTWRPLAQATHNFLRGLHFHKDYFQHPHFSTWKATTLDGLPNQLTPSEPHLCLLDVGYLINTSCLPLLQPTRDVDLILSLDYNLHGAFQQLQLLGRFCQEQGIPFPPISPSPEEQLQPRECHTFSDPTCPGAPAVLHFPLVSDSFREYSAPGVRRTPEEAAAGEVNLSSSDSPYHYTKVTYSQEDVDKLLHLTHYNVCNNQEQLLEALRQAVQRRRQRRPH

SEQ ID NO: 112 - DNA, 1877 bp, Homo sapien
ccgggatccggagccgcccgaagccggtgccgcagccccctgcgcccccggtgcccccgacatgtccttccgcaaagtggtccggcagagcaaattccggcatgtgttcgggcagccggtcaagaacgaccagtgctatgaggacattcgcgtgtcccgtgttacctgggacagcaccttctgcgccgtcaaccccaagttcctggcggtgattgtggaggccagtggagggggtgcctttctggtgctccccctaagcaagacgggccgcattgacaaggcctacccgacggtgtgtgggcacacgggacctgtcctggacatcgactggtgtcctcacaacgacgaagtcatagccagcggctcggaggactgcacggtcatggtgtggcagatcccagagaacgggctgacctccccgctgacagagccggtggtggtactggaggggcacaccaagcgagtgggcatcatcgcctggcaccccacggcccgaaacgtgctgctcagtgcaggctgcgacaacgtggtactcatctggaatgtgggcacagcggaggagctgtaccgcctggacagcctgcaccctgacctcatctacaatgtcagctggaaccacaatggcagcctgttttgctcagcatgcaaggacaagagcgtgcgcatcatcgacccccgtcggggcaccctggtggcagagcgggagaaggctcatgagggggcccggcccatgcgggccatcttcctggcagatggcaaggtgttcaccacaggcttcagccgaatgagcgagcggcagctggcgctctgggacccagaaaacctcgaggaacccatggccctgcaggaactggactcgagcaacggggccctgctgcccttctacgaccccgacaccagtgtggtctacgtctgcggcaagggtgactccagcatccggtactttgagatcacagaggagcctccctacatccacttcctgaacacgttcaccagcaaggagccgcagcggggtatgggcagcatgcccaagcggggcctggaggtcagcaagtgcgagatcgcccggttctacaaactgcatgagcgcaagtgtgagcccatcgtcatgactgtgccaagaaagtcggacctcttccaggatgatctgtaccccgacacagccgggcccgaggcagccctggaggctgaggagtgggtgagcgggcgggatgccgacccgatcctcatctcactgcgggaggcctacgtgcccagcaagcagcgggacctgaagatcagccggcgcaacgtgttgtctgacagccggcccgccatggccccgggctcctcccacctaggggcccccgcctccaccaccactgctgctgatgccacccccagcggcagcctggccagagccggggaggctgggaagctggaggaggtgatgcaggagctgcgggccctgagggcgctggtcaaggagcagggcgaccgcatctgccgcctggaggagcagctgggccgcatggagaacggggatgcgtagggccacagccacacgccaccttcatctcctccgccgcccccttcccactcagcttctgccagcgggtcgcaccgggctagctggctgcccagagcctctgaggcagcgcaggggtcagttcccacccccacccgtcccaggcccaggccgaagccagcgcccagctttcctcactgttcctgtggaggatgtctacgcccaggcgagctcctcgacctctgagggaccatctccccgaccactgcccagccctctgctccctccccagaggaggcgggagggtgggctctatattttcattccaaataaaattctctttctaaaagccaaaaaaaaaaaaaaaaaa

SEQ ID NO: 113 - protein, 489 aa, Homo sapien
MSFRKVVRQSKFRHVFGQPVKNDQCYEDIRVSRVTWDSTFCAVNPKFLAVIVEASGGGAFLVLPLSKTGRIDKAYPTVCGHTGPVLDIDWCPHNDEVIASGSEDCTVMVWQIPENGLTSPLTEPVVVLEGHTKRVGIIAWHPTARNVLLSAGCDNVVLIWNVGTAEELYRLDSLHPDLIYNVSWNHNGSLFCSACKDKSVRIIDPRRGTLVAEREKAHEGARPMRAIFLADGKVFTTGFSRMSERQLALWDPENLEEPMALQELDSSNGALLPFYDPDTSVVYVCGKGDSSIRYFEITEEPPYIHFLNTFTSKEPQRGMGSMPKRGLEVSKCEIARFYKLHERKCEPIVMTVPRKSDLFQDDLYPDTAGPEAALEAEEWVSGRDADPILISLREAYVPSKQRDLKISRRNVLSDSRPAMAPGSSHLGAPASTTTAADATPSGSLARAGEAGKLEEVMQELRALRALVKEQGDRICRLEEQLGRMENGDA

SEQ ID NO: 114 - DNA, 1586 bp, Homo sapien
tccgaaagtgcccgagcggtgccggacggactaatcgggcctcggccgtggctcggacgtccgctcccgaaacgcggcgcggtcgggccccttcgtcaggagacgcgaaaatggccgaaggagcgcgagcgcgcgggccgagaggctgccgggatcgcgacggaccggcgggcggggcggggagaggatcctccacagtgctctcttcagttccccttcaaatgctgttttatctcagcggaacgtactacgccctgtatttcctcgccacgctcctgatgatcacgtataaaagtcaggtgttcagctatcctcaccgctacctggtcctcgatcttgctctgctgtttctgatggggattctagaagcagttcggttatacctgggcaccaggggcaacctgacagaggctgagaggccgctggccgccagcctggccctcacggctggcaccgccctcctctctgcccacttcctgctttggcaggccctagtgttgtgggcggactgggccctcagcgccacgctcctggcccttcacggcctggaggccgtcctgcaggtggttgccatcgcggccttcaccaggtagctacggacacccgggataccccacactggggccctcctcctgggcctgaccagtcccccagctgtcacctccccattcctggacaggaagggcacttttcctagtgactggccatagatggttttggatggttccatctgttctggcaggagtgggagcaggagccagggcagaacaaactgctggaggccctggtgttgggaacagctgcggggagggtagggaccagacagaactgccttcaagatgagtcccaggagcgcacactcagccctgtcagtggggtctggctttagcagccaggcctccacagacccccatgggcccccagggccgagagggaggacagagcccttcagaacagaggcctcatctcactgcatcccccatcaccccctagttccccaatggtcctaatttgtgttctgagatcccagtttactctgtggccaggccccacctgtgtttccaagtcgggctggagacgcaggatggggtaggccttgtgctctgagcaaccccagctctgcctcacaggcaggcaggcccggtgcaagagtggactctgggttcctaaagcaataaatgcaaacaagccaacagctctgctgcctagcaatttccatcttagccacacttctcccttcaggggcttcggaggagaggtcagggctaaggccggggatgagactgcaggagagagagcagcggagggccacattcggagcctccgtccactccagttttatcagcttttgccttttgcacggagtgctaaacaaattctagctctgtgtttttttcccattcccagatttactatcagttctccttaaaaagtatctaagctgttacagtagctttcccttcacttgattctattgtgtgttttctatgtttggaataattacacccaaatatctagatattttctcttcaccgcattttgtaaataaagagatgtgtatgcctccctgaaaaaaaaaaaaaaaa

SEQ ID NO: 115 - protein, 123 aa, Homo sapien
MLFYLSGTYYALYFLATLLMITYKSQVFSYPHRYLVLDLALLFLMGILEAVRLYLGTRGNLTEAERPLAASLALTAGTALLSAHFLLWQALVLWADWALSATLLALHGLEAVLQVVAIAAFTR

SEQ ID NO: 116 - DNA, 4263 bp, Homo sapien
gggaatacccagcttcctccccgcaacccggtgaaagccaacgcaatgttcggtgcgggggacgaggacgacaccgatttcctctcgccgagcggcggtgccagattggcctcactttttggactggatcaggcagctgctggccatggaaatgaatttttccagtacacagccccaaaacagcctaagaaaggccagggaacggcagcaacaggaaatcaggcaacaccaaaaacagcaccagccaccatgagcactcccacaatactggtcgcaacagcagtccatgcatatcgatacacaaatggtcaatatgtaaagcagggcaaatttggtgctgcagttctggggaaccacacagccagagagtataggattcttctttatatcagtcaacaacagccagttacggttgctaggattcatgtgaactttgagctaatggttcggcccaataactatagcaccttttatgatgaccagagacagaactggtccatcatgtttgagtcggaaaaggctgctgtggagttcaataagcaggtgtgcattgctaagtgcaacagtacctcttccctggatgcagtgctctcccaggacctcattgtggcagacggccctgctgtagaagttggagattctttggaagtggcctataccggctggctctttcagaatcatgtgctgggccaggttttcgactccactgctaacaaagataagttgcttcgcttgaagttaggatcaggaaaagtcatcaagggctgggaggatggaatgctgggcatgaaaaaaggaggaaagcgattgcttattgtccctccagcctgtgctgttggctcagaaggggtaataggctggactcaagcaacggactcgatcctggtgttcgaggtggaggttaggcgggtgaagtttgccagagattctggctctgatggtcacagtgttagttcccgcgattctgcagctccgtctcccatccctggtgctgacaacctctctgctgatcctgttgtgtcaccacccacatcaatacctttcaaatcaggggagccagctcttcgtaccaaatctaactccctcagtgaacaacttgcaataaatacaagtcccgatgcagtcaaagccaagttgatctctcggatggctaaaatgggccagcccatgctgcccatccttccaccacagctggattccaatgattcagaaatcgaagatgtgaacactctgcaaggaggtgggcagcctgtggtgactccgtccgtccagccctctcttcagccggcccatccagcgttaccacagatgacctcacaggcacctcagccatctgttactgggctccaggcaccttctgctgccttaatgcaagtgtcatctctcgattcccactcagctgtatctggaaatgcccaatcctttcagccctatgcaggtatgcaagcctacgcttatccccaggcatctgccgtcacctcccagctgcagcccgttcggcctttgtacccagcaccgctctctcagcctccccatttccaaggatcaggtgatatggcttcatttctcatgactgaagcccggcaacataacactgaaattcgaatggcagtcagcaaagtggctgataaaatggatcatctcatgactaaggttgaagagttacagaaacatagtgctggcaattccatgcttattcctagcatgtcagttacaatggaaacaagcatgattatgagcaacatccagcgaatcattcaggaaaatgaaagattgaagcaagagatccttgaaaagagcaatcggatagaagaacagaatgacaagattagtgaactaattgaacgaaatcagaggtatgttgagcagagtaacctgatgatggagaagaggaacaactcacttcagacagccacagaaaacacacaggcaagagtattgcatgctgaacaagagaaggccaaggtgacagaggagttagcagcggccactgcgcaggtctctcatctgcagctgaaaatgactgctcaccaaaaaaaggaaacagagctgcagatgcagctgacagaaagcctgaaggagacagatcttctcaggggccagctcaccaaagtgcaggcaaagctctcagagctccaagaaacctctgagcaagcacagtccaaattcaaaagtgaaaagcagaaccggaaacaactggaactcaaggtgacatccctggaggaggaactgactgaccttcgagttgagaaggagtccttggaaaagaacctctcagaaaggaaaaagaagtcagctcaagagcgttctcaggccgaggaggagatagatgaaattcgcaagtcataccaggaggaattggacaaacttcgacagctcttgaaaaagactcgagtgtccacagaccaagcagctgcagagcagctgtctttagtacaggctgagctacagacccagtgggaagcaaaatgtgaacatttgttggcctccgccaaggatgagcacctgcagcagtaccaggaggtgtgcgcacagagagatgcctaccagcagaagctggtacaacttcaggaaaagtgtttagccctccaggcccaaatcacagctctcaccaagcaaaatgaacagcacatcaaggaactagagaagaacaagtcccagatgtctggggttgaagctgctgcatctgacccctcagagaaggtcaagaagatcatgaaccaggtgttccagtccttacggagagagtttgagctggaggaatcttacaatggcaggaccattctgggaaccatcatgaatacgatcaagatggtgactcttcagctgttaaaccaacaggagcaagagaaggaagagagcagcagtgaagaagaagaagaaaaagcagaagagcggccacgaagaccttcccaggagcagtcagcctcagccagttctgggcagcctcaagcacccctgaatagggagaggccagagtcccccatggtgccctcagagcaggtggtcgaggaagctgtcccgttgcctcctcaggccctcaccacttcccaggatggacacagaaggaaaggggactcagaagctgaggcactctcagagataaaagatggttcccttccacccgaactgtcttgcatcccatcccacagagttctagggcccccgacttcaattccacctgagcccctaggccctgtatccatggactctgagtgtgaggagtcacttgctgccagcccaatggcagctaagcccgacaacccatcaggaaaggtctgtgtcagggaagtagcaccagatggcccactacaagaaagctccacaagactgtccctgacttcagaccccgaggagggggacccactggccttagggcctgaaagcccaggagagcctcagcctccacagctcaagaaagatgatgtcactagctccaccggtccccacaaggagctgtcaagcacagaggcaggttccacagttgcaggagcagccctcagacccagccatcattcccagcgttccagtctctctggggatgaagaggatgaactgtttaaaggggcaactctgaaagctctgaggcccaaagcacagcctgaggaggaggatgaagacgaggtgagcatgaagggacgcccgcccccaacgcccctttttggagatgatgatgatgacgatgacattgactggctgggatgaagacccaggaaactggtgcaaaggtttctctgcaacccttccctaagcatgattttgcacagccaaccctgggtctaggcgagccacagggtgaggtcaaggtgagcattctgggaacaatatttgggctcagagggtgggttggccaccttctgagccccacccccgccagacctggtgaagaggatcataaccctgtcttcaagaacactgggatttcagcagcaagttggaagaaggactggtaggttcccctccaagccagtcacctgtaagagtcctgtcctctgccagactttttaatctcttcattaactctcagactgacctgggagccctcctctacctgaatccagtgctcaactgtgccccggcaacaagacctgggctgaggtctccctggtagaactaagggagattacaccatctaaatcccagtgcagtcaacagcctggcctatagtcctgggacatgtatcttcttctttgccttaaatctgatacaagaggtcaatgactttgaaaataaaactaaaataaatgtctataatgaaacttg

SEQ ID NO: 117 - protein, 1234 aa, Homo sapien
GNTQLPPRNPVKANAMFGAGDEDDTDFLSPSGGARLASLFGLDQAAAGHGNEFFQYTAPKQPKKGQGTAATGNQATPKTAPATMSTPTILVATAVHAYRYTNGQYVKQGKFGAAVLGNHTAREYRILLYISQQQPVTVARIHVNFELMVRPNNYSTFYDDQRQNWSIMFESEKAAVEFNKQVCIAKCNSTSSLDAVLSQDLIVADGPAVEVGDSLEVAYTGWLFQNHVLGQVFDSTANKDKLLRLKLGSGKVIKGWEDGMLGMKKGGKRLLIVPPACAVGSEGVIGWTQATDSILVFEVEVRRVKFARDSGSDGHSVSSRDSAAPSPIPGADNLSADPVVSPPTSIPFKSGEPALRTKSNSLSEQLAINTSPDAVKAKLISRMAKMGQPMLPILPPQLDSNDSEIEDVNTLQGGGQPVVTPSVQPSLQPAHPALPQMTSQAPQPSVTGLQAPSAALMQVSSLDSHSAVSGNAQSFQPYAGMQAYAYPQASAVTSQLQPVRPLYPAPLSQPPHFQGSGDMASFLMTEARQHNTEIRMAVSKVADKMDHLMTKVEELQKHSAGNSMLIPSMSVTMETSMIMSNIQRIIQENERLKQEILEKSNRIEEQNDKISELIERNQRYVEQSNLMMEKRNNSLQTATENTQARVLHAEQEKAKVTEELAAATAQVSHLQLKMTAHQKKETELQMQLTESLKETDLLRGQLTKVQAKLSELQETSEQAQSKFKSEKQNRKQLELKVTSLEEELTDLRVEKESLEKNLSERKKKSAQERSQAEEEIDEIRKSYQEELDKLRQLLKKTRVSTDQAAAEQLSLVQAELQTQWEAKCEHLLASAKDEHLQQYQEVCAQRDAYQQKLVQLQEKCLALQAQITALTKQNEQHIKELEKNKSQMSGVEAAASDPSEKVKKIMNQVFQSLRREFELEESYNGRTILGTIMNTIKMVTLQLLNQQEQEKEESSSEEEEEKAEERPRRPSQEQSASASSGQPQAPLNRERPESPMVPSEQVVEEAVPLPPQALTTSQDGHRRKGDSEAEALSEIKDGSLPPELSCIPSHRVLGPPTSIPPEPLGPVSMDSECEESLAASPMAAKPDNPSGKVCVREVAPDGPLQESSTRLSLTSDPEEGDPLALGPESPGEPQPPQLKKDDVTSSTGPHKELSSTEAGSTVAGAALRPSHHSQRSSLSGDEEDELFKGATLKALRPKAQPEEEDEDEVSMKGRPPPTPLFGDDDDDDDIDWLG

SEQ ID NO: 118 - DNA, 2700 bp, Homo sapien
ggcacgagggatggcggcagcggcgctggggagggcgaggcggaggcggcaaaacgggcggtcgagcagaacgtgtagccgcgtcccctccagtccgctccgggcagctgctgatgcaaggaatcccctgggctcccgtccactccactgctgaccagcccattcgcctgtgctgagtcttcctgcaggcctttccttgcctctgtgggaccctgtgggggtccatccggctggagaagaaaagcctctcatgctaacgttgcagaccccagagggtcctgtgtgggtgtggagatggccaatgagaatcacggcagcccccgggaggaagcgtccctgctgagtcactccccaggtacctccaatcagagccagccctgttctccaaagccaatccgcctggttcaggacctcccagaggagctggtgcatgcaggctgggagaagtgctggagccggagggagaatcgtccctactacttcaaccgattcaccaaccagtccctgtgggagatgcccgtgctggggcagcacgatgtgatttcggaccctttggggctgaatgcgaccccactgccccaagactcaagcttggtggaaactcccccggctgagaacaagcccagaaagcggcagctctcggaagagcagccaagcggcaatggtgtgaagaagcccaagattgaaatcccagtgacacccacaggccagtcggtgcccagctcccccagtatcccaggaaccccaacgctgaagatgtggggtacgtcccctgaagataaacagcaggcagctctcctacgacccactgaggtctactgggacctggacatccagaccaatgctgtcatcaagcaccgggggccttcagaggtgctgcccccgcatcccgaagtggaactgctccgctctcagctcatcctgaagcttcggcagcactatcgggagctgtgccagcagcgagagggcattgagcctccacgggagtctttcaaccgctggatgctggagcgcaaggtggtagacaaaggatctgaccccctgttgcccagcaactgtgaaccagtcgtgtcaccttccatgtttcgtgaaatcatgaacgacattcctatcaggttatcccgaatcaagttccgggaggaagccaagcgcctgctctttaaatatgcggaggccgccaggcggctcatcgagtccaggagtgcatcccctgacagtaggaaggtggtcaaatggaatgtggaagacacctttagctggcttcggaaggaccactcagcctccaaggaggactacatggatcgcctggagcatctgcggaggcagtgtggcccccacgtctcggccgcagccaaggactccgtggaaggcatctgcagtaagatctaccacatctccctggagtacgtcaaacggatccgagagaagcaccttgccatcctcaaggaaaacaacatctcagaggaggtggaggcccctgaggtggagccccgcctagtgtactgctacccagtccggctggctgtgtctgcaccgcccatgcccagcgtggagatgcacatggagaacaacgtggtctgcatccggtataagggagagatggtcaaggtcagccgcaactacttcagcaagctgtggctcctttaccgctacagctgcattgatgactctgcctttgagaggttcctgccccgggtctggtgtcttctccgacggtaccagatgatgttcggcgtgggcctctacgaggggactggcctgcagggatcgctgcctgtgcatgtctttgaggccctccaccgactctttggcgtcagcttcgagtgcttcgcctcacccctcaactgctacttccgccagtactgttctgccttccccgacacagacggctactttggctcccgcgggccctgcctagactttgctccactgagtggttcatttgaggccaaccctcccttctgcgaggagctcatggatgccatggtctctcactttgagagactgcttgagagctcaccggagcccctgtccttcatcgtgttcatccctgagtggcgggaacccccaacaccagcgctcacccgcatggagcagagccgcttcaaacgccaccagttgatcctgcctgcctttgagcatgagtaccgcagtggctcccagcacatctgcaagaaggaggaaatgcactacaaggccgtccacaacacggctgtgctcttcctacagaacgaccctggctttgccaagtgggcgccgacgcctgaacggctgcaggagctgagtgctgcctaccggcagtcaggccgcagccacagctctggttcttcctcatcgtcctcctcggaggccaaggaccgggactcgggccgtgagcagggtcctagccgcgagcctcaccccacttaacatatcctgcggggaggaggagccccaggggtgctagtctggactgctgggactcgggcccctggggcctcagagggaccccggctgccactgacatatgaagattatggttctgccagggctcccctccctgcctgtccccaagtcctcacctcaaactccctccaagtcccatgtatataggtcctgatgccttcccaaccccgcccctcaccctgttgccaccttgtttcatttgtaaaaggaaatacagaaacccccccaaaaaaaaaaaaaaaaaaaaaaaaaaaa

SEQ ID NO: 119 - protein, 704 aa, Homo sapien
MANENHGSPREEASLLSHSPGTSNQSQPCSPKPIRLVQDLPEELVHAGWEKCWSRRENRPYYFNRFTNQSLWEMPVLGQHDVISDPLGLNATPLPQDSSLVETPPAENKPRKRQLSEEQPSGNGVKKPKIEIPVTPTGQSVPSSPSIPGTPTLKMWGTSPEDKQQAALLRPTEVYWDLDIQTNAVIKHRGPSEVLPPHPEVELLRSQLILKLRQHYRELCQQREGIEPPRESFNRWMLERKVVDKGSDPLLPSNCEPVVSPSMFREIMNDIPIRLSRIKFREEAKRLLFKYAEAARRLIESRSASPDSRKVVKWNVEDTFSWLRKDHSASKEDYMDRLEHLRRQCGPHVSAAAKDSVEGICSKIYHISLEYVKRIREKHLAILKENNISEEVEAPEVEPRLVYCYPVRLAVSAPPMPSVEMHMENNVVCIRYKGEMVKVSRNYFSKLWLLYRYSCIDDSAFERFLPRVWCLLRRYQMMFGVGLYEGTGLQGSLPVHVFEALHRLFGVSFECFASPLNCYFRQYCSAFPDTDGYFGSRGPCLDFAPLSGSFEANPPFCEELMDAMVSHFERLLESSPEPLSFIVFIPEWREPPTPALTRMEQSRFKRHQLILPAFEHEYRSGSQHICKKEEMHYKAVHNTAVLFLQNDPGFAKWAPTPERLQELSAAYRQSGRSHSSGSSSSSSSEAKDRDSGREQGPSREPHPT

SEQ ID NO: 120 - DNA, 2895 bp, Homo sapien
gagatgcctgaacccagccttggggaatctcacagccctcacctacctcaacctcagccgaaaccagctgtcgctgctgccaccctacatctgccagctgcccctgagggtcctcatcgtcagcaacaacaagctgggagccctgccccctgacatcggcaccctgggaagcctgcgacagcttgacgtgagcagcaacgagctccaatccctgccctcggaactgtgtggcctctcttccctgcgggacctcaatgtccggaggaaccagctcagtacgctgcccgaagagctgggggacctccctctggtccgcctggatttctcctgtaaccgcgtctcccgaatcccagtctccttctgccgcctgaggcacctgcaggtcattctgctggacagcaaccctctgcagagtccacctgcccaggtctgcctgaaggggaaacttcacatcttcaagtatttgtccacagaggccgggcagcgtgggtcggccctgggggacctggccccttctcggcccccgagtttcagtccctgccctgcagaggatctatttccgggacatcggtacgatggtgggctggactcaggcttccacagcgttgatagtggcagcaagaggtggtctggaaatgagtcaacagatgaattttcagagctgtcattccggatctcagagctggcccgggagccccgggggcccagagaacgcaaggaggatggctcagcggacggagaccctgtgcagattgacttcatcgacagccatgtccccggggaggatgaagagcgaggcactgtggaggagcagcgaccacccgaattaagccctggggcaggggacagggagagggcaccaagcagcaggcgggaggagccggcaggggaggagcggcggcgcccggacaccttgcagctgtggcaggagcgggaacggcggcagcagcagcagagcggggcgtggggggccccgaggaaggatagcctcttgaagccagggctcagggctgttgtgggaggggccgccgccgtgtccactcaagccatgcacaacggctcgcctaagtccagtgcctcccaagcaggggctgcagcggggcagggagcccccgcccctgcccctgcctcccaagagccccttcccatagctggaccagcgacagcacctgctccacggccacttggctccattcagagaccaaacagcttcctcttccgttcctcctctcagagtggctcaggcccttcctcaccagactctgtcctgagacctcggcggtacccccaggttccagatgagaaggacttaatgactcagctgcgccaggtccttgagtcccggctgcagcggcccctgcctgaggacctggccgaggctctggccagtggggtcatcctgtgccagctggccaaccagctacggccgcgctccgtgcccttcatccatgtgccctcccctgctgtgccaaaactcagtgccctcaaggctcggaagaatgtggagagttttctagaagcctgtcgaaaaatgggggtgcctgaggctgacctgtgctcgccctcggatctcctccagggcactgcccgggggctgcggaccgcgctggaggccatgaagcgggtggggggcaaggccctaccgcccctctggcccccctctggtctgggcggcttcgtcgtcttctacgtggtcctcatgctgctgctctatgtcacctacactcggctcctgggttcctaggccccaaaatcggccctccctcacccctttcccttcctctctatttataaggtccctgctccacccgaccccacctgcggtgccttcagccccaaccaaagacactagtgcacccccttcacagacactgacctcagaggccccactctggtgcccccagaccctgggcccccagcctctggcctccctccagtagccccacgagtccccacctctcagtgctgacggtgccttcatgtccccgccggccctgcccctgccctctgtaccccgtgaggggtggcaggagctggagtctcccccttcctcctgtgccctccccttccccccccaacagctgctatgggggggctaaattatctctattttgtagagaggatctatatttgtaggggttcggggcccaggccgggtccctatctctgtgtataaactgtacagaccgtggccgccctgcctgtgtgtgtgtgtgtgcgcgcgcgcgcgcgtctgctccgcgtgttggtggctgtggccatggctctgtgcccaccagcatctccctcctgagatgccggcctctcatgctcccggagcgtccgccaaccccccgtgtcacctcccttctgttatcgctgacagctttcttgcgtctcatttgtcgccgagccccgagcgcacggtgatgctcgggtctgcccccgaccccctgccacaggccggaagccgcagggggcaccgtggggaagctaacccggccccttcccccaggagtcactgtgccagccccaccacatcctggaagaggagggggccccgggaaggggcctcccctacatcgctgctgtcgtccacgccctgctggaccggccttaggggtgaaggtgggggcacagggcccaccccgcccgggaccccgggagcagaagacgcgcctgggctccgcgctctcagagaagcacgtggtgagggtggcctgggcctgggcacccttggcctgccggcctggctgcctctggggtcgagggtctgggtggaaggaccgcgggtgtcgcaggtgtcgtgtcagccgcaataaacagaagccagaagccctctgggtggccctcagaaaaaaaaaaaaaaaaaaaaaaaaaaaaaaaaaaaaaaaaaaaaaaaaaaaaaaaaaaaaa

SEQ ID NO: 121 - DNA, 3036 bp, Homo sapien
gctgggagcaaagcgctgagggagctcggtacgccgccgcctcgcacccgcagcctcgcgcccgccgccgcccgtccccagagaaccatggagtctggcagtaccgccgccagtgaggaggcacgcagccttcgagaatgtgagctctacgtccagaagcataacattcaagcgctgctcaaagattctattgtgcagttgtgcactgctcgacctgagagacccatggcattcctcagggaatactttgagaggttggagaaggaggaggcaaaacagattcagaatctgcagaaagcaggcactcgtacagactcaagggaggatgagatttctcctcctccacccaacccagtggttaaaggtaggaggcgacgaggtgctatcagcgctgaggtctacacggaggaagatgcggcatcctatgttagaaaggttataccaaaagattacaagacaatggccgctttagccaaagccattgaaaagaatgtgctgttttcacatcttgatgataatgagagaagtgatatttttgatgccatgttttcggtctcctttatcgcaggagagactgtgattcagcaaggtgatgaaggggataacttctatgtgattgatcaaggagagacggatgtctatgttaacaatgaatgggcaaccagtgttggggaaggagggagctttggagaacttgctttgatttatggaacaccgagagcagccactgtcaaagcaaagacaaatgtgaaattgtggggcatcgaccgagacagctatagaagaatcctcatgggaagcacactgagaaagcggaagatgtatgaggaattccttagtaaagtctctattttagagtctctggacaagtgggaacgtcttacggtagctgatgcattggaaccagtgcagtttgaagatgggcagaagattgtggtgcagggagaaccaggggatgagttcttcattattttagaggggtcagctgctgtgctacaacgtcggtcagaaaatgaagagtttgttgaagtgggaagattggggccttctgattattttggtgaaattgcactactgatgaatcgtcctcgtgctgccacagttgttgctcgtggccccttgaagtgcgttaagctggaccgacctagatttgaacgtgttcttggcccatgctcagacatcctcaaacgaaacatccagcagtacaacagttttgtgtcactgtctgtctgaaatctgcctcctgtgcctcccttttctcctctccccaatccatgcttcactcatgcaaactgctttattttccctacttgcagcgccaagtggccactggcatcgcagcttcctgtctgtttatatattgaaagttgcttttattgcaccattttcaatttggagcattaactaaatgctcatacacagttaaataaatagaaagagttctatggagactttgctgttactgcttctctttgtgcagtgttagtattcaccctgggcagtgagtgccatgctttttggtgagggcagatccagcacctattgaattaccatagagtaatgatgtaacagtgcaagatttttttttttaagtgacataattgtccagttataagcgtatttagactgtggccatatatgctgtatttctttgtagaataaatggtttctcattaaactctaaagattagggaaatggatatagaaaatcttagtatagtagaaagacatctgcctgtaattaaactagtttaagggtggaaaaatgaaaatttttgctaattatcaatgggatatgattggttcagttttttttttccagagttgttgtttgccaagctaatctgcctggtttatttatatcttgttattaatgtttcttctccaattctgaaatacttttgagtatggctatctatacctgccttttaagtttgaaactaactcatagatgcaaatattggttagtatttaactacatctgcctcggctcacaaattccgattagacctttatccagctagtgccaaataattgatcagatgctgaattgagaataagaatttgaggtctacattcttggttgttaatttagagcgtttggttaaagtatgtccttcagctgactccagtataatctcctctgctcattaaactgattccaggagattggatttgctgtgactagatacagatggagcaaatgtcctaacagagaaatagaggtgatgctgctaaagggagaaatgccaggcggacaaagttcagtgtcgggaattttccccgtgacattcactggggcatgagattttggaagaagttttttactttggtttagtctttttttcctcctttttattcagctagaatttctggtgggttgatggtagggtataatgtgtctgtgttgcttcaaattggtctgaaaggctatcctgctgaaagtcctgctttcctatctagcatttattcctctggcaaacttttctttcttttcttttttaaagtaaacttgtgtattgagtcttaactgtatttcagtattttccagccttatgtgttacattattccaatgatacccaacagtttatttttattatttttttaaacaaaatttcacagttctgtaatgtaggcacttttattttcattgtgatttatatataaggtaatgtagggttatatttgggagtgactgcaagcatttttccatctgtgtgcaactaactgactctgttattgatcccttctcctgccctttcccaggtaatttaaattggtcatggtagatttttttcatagatttgaaaaacttttaggttgttaccaagtatgaagtataaatctggggaagaggttttatttacattttagggtgggtaagaaagccaccttgttacaaattttttaatttccaaaataatctatattaaatgagggtttctgatctgtactttgtgtttagctacctttttatatttaaaaaattaaaaatgaaaattatgttcttacaagcttaaagcttgatttgatct

SEQ ID NO: 122 - protein, 381 aa, Homo sapien
MESGSTAASEEARSLRECELYVQKHNIQALLKDSIVQLCTARPERPMAFLREYFERLEKEEAKQIQNLQKAGTRTDSREDEISPPPPNPVVKGRRRRGAISAEVYTEEDAASYVRKVIPKDYKTMAALAKAIEKNVLFSHLDDNERSDIFDAMFSVSFIAGETVIQQGDEGDNFYVIDQGETDVYVNNEWATSVGEGGSFGELALIYGTPRAATVKAKTNVKLWGIDRDSYRRILMGSTLRKRKMYEEFLSKVSILESLDKWERLTVADALEPVQFEDGQKIVVQGEPGDEFFIILEGSAAVLQRRSENEEFVEVGRLGPSDYFGEIALLMNRPRAATVVARGPLKCVKLDRPRFERVLGPCSDILKRNIQQYNSFVSLSV

SEQ ID NO: 123 - DNA, 6111 bp, Homo sapien
ccgcccccgacccgagctctttcgtctgcctgccagtttcctgcgtccccggagaggatcctgctgagcccagcctcccccctccccttctcctcctctcccttggagagcccgggcagccactgccccgcagccccagtgacaggaggagaccataacccccgacagcgccatggcccagattctgccaattcgttttcaggagcatctccagctccagaacctgggtatcaacccagcaaacattggcttcagtaccctgactatggagtctgacaaattcatctgcattagagaaaaagtaggagagcaggcccaggtggtaatcattgatatgaatgacccaagtaatccaattcgaagaccaatttcagcagacagcgccatcatgaatccagctagcaaagtaattgcactgaaagctgggaaaactcttcagatttttaacattgaaatgaaaagtaaaatgaaggctcataccatgactgatgatgtcaccttttggaaatggatctctttgaatacggttgctcttgttacggataatgcagtttatcactggagtatggaaggagagtctcagccagtgaaaatgtttgatcgccattctagccttgcagggtgccagattatcaattaccgtacagatgcaaaacaaaagtggttacttctgactggtatatctgcacagcaaaatcgtgtggtgggagctatgcagctatattctgtagataggaaagtgtctcagcccattgaaggacatgcagctagctttgcacagtttaagatggaaggaaatgcagaagaatcaacgttattttgttttgcagttcggggccaagctggagggaagttacatattattgaagttggcacaccacctacagggaaccagccctttccaaagaaggcagtggatgtcttctttcctccagaagcacaaaatgattttcctgttgcaatgcagatcagtgaaaagcatgatgtggtgttcttgataaccaagtatggttatatccacctctatgatcttgagactggtacctgcatctacatgaatagaatcagtggagaaacaatttttgttactgcacctcatgaagccacagctggaataattggagtaaacagaaagggacaagttctgtcagtgtgtgtggaagaagaaaacataattccttacatcaccaatgttctacaaaatcctgatttggctctgagaatggctgtacgtaataacttagccggtgctgaagaactctttgcccggaaatttaatgctctttttgcccagggaaattactcggaggcagcaaaggtggctgctaatgcaccaaagggaattcttcgtactccagacactatccgtcggttccagagtgtcccagcccagccaggtcaaacttctcctctacttcagtactttggtatccttttggaccagggacagctcaacaaatacgaatccttagagctttgtaggcctgtacttcagcaagggcgaaaacagcttttggagaaatggttaaaagaagataagctggaatgttctgaagaactgggtgatcttgtgaaatctgtggaccctacattggcacttagtgtgtacctaagggctaacgtcccaaataaagtcattcagtgctttgcagaaacaggtcaagtccaaaagattgttttatatgctaaaaaagttggatacactccagattggatatttctgctgagaaatgtaatgcgaatcagtccagatcagggacagcagtttgcccaaatgttagttcaagatgaagagcctcttgctgacatcacacagattgtagatgtctttatggaatacaatctaattcagcagtgtactgcattcttgcttgatgctctgaagaataatcgcccatctgaaggtcctttacagacgcggttacttgagatgaaccttatgcatgcgcctcaagttgcagatgctattctaggcaatcagatgttcacacattatgaccgggctcatattgctcaactgtgtgaaaaggctggcctactgcagcgtgcattagaacatttcactgatttatatgatataaaacgtgcagtggttcacacccatcttcttaaccctgagtggttagtcaactactttggttccttatcagtagaagactccctagaatgtctcagagccatgctgtctgccaacatccgtcagaatctgcagatttgtgttcaggtggcttctaaatatcatgaacaactgtcaactcagtctctgattgaactttttgaatctttcaagagttttgaaggtctcttttattttctgggatccattgttaactttagccaggacccagatgtgcactttaaatatattcaggcagcttgcaagactgggcaaatcaaagaagtagaaagaatctgtagagaaagcaactgctacgatcctgagcgagtcaagaattttcttaaggaagcaaaactaacagatcagctaccacttatcattgtgtgtgatcgatttgactttgtccatgatttggtgctctatttatatagaaataatcttcaaaagtatatagagatatatgtacagaaggtgaatccaagtcgacttcctgtagttattggaggattacttgatgttgactgttctgaagatgtcataaaaaacttgattcttgttgtaagaggtcaattctctactgatgagcttgttgctgaggttgaaaaaagaaacagattgaaactgcttctgccttggctagaggccagaattcatgagggctgtgaggagcctgctactcacaatgccttagccaaaatctacatagacagtaataacaacccggagagatttcttcgtgaaaatccctactatgacagtcgcgttgttggaaagtattgtgagaagagagatccacatctggcctgtgttgcttatgaacgtggccaatgtgatctggaacttattaatgtttgcaatgagaattccctcttcaaaagtctttctcgctacctggtacgtcgaaaggatccagaattgtggggcagcgtgctgctggaaagcaatccttacaggagacccctaattgaccaggttgtacaaacagctttgtctgagactcaggaccctgaagaagtgtcagtaactgtaaaggctttcatgactgcagaccttcctaatgaactcattgaactgctggagaaaattgtccttgataactctgtattcagtgaacacaggaatctgcaaaacctccttatcctcactgcaattaaggctgaccgtacacgtgttatggagtatattaaccgcctggataattatgatgccccagatattgccaatatcgccatcagcaatgagctgtttgaagaagcatttgccattttccggaaatttgatgtcaatacttcagcagttcaggtcttaattgagcatattggaaacttggatcgggcatatgagtttgctgaacgttgcaatgaacctgcggtctggagtcaacttgcaaaagcccagttgcagaaaggaatggtgaaagaagccattgattcttatatcaaagcagatgatccttcctcctacatggaagttgttcaggctgccaatactagtggaaactgggaagaactggtgaagtacttgcagatggcccgtaagaaggctcgagagtcctatgtggagacagaactgatattcgcactggctaaaacaaaccgccttgcagagttagaagaatttatcaatggaccaaataatgctcatatccaacaagttggtgaccgttgttatgatgaaaaaatgtatgatgctgctaagttgttgtacaataatgtttccaattttggacgtttggcatctaccctggttcacctgggtgaatatcaggcagctgttgatggggctaggaaagctaacagtactcgaacatggaaagaggtctgcttcgcctgtgtagatgggaaagaattccgtcttgctcagatgtgtggacttcatattgttgtacatgcagatgaattagaagaacttatcaactactatcaggatcgtggctattttgaagagctgatcaccatgttggaagcagcactgggacttgagcgagctcacatgggaatgtttactgaattagctattctatactctaaatttaagcctcagaaaatgagggagcacctggagctgttctggtctagagtgaatattcccaaggtgctaagagctgcagaacaagctcatctttgggcagaactggtgtttttgtatgacaagtatgaagaatatgataatgccataattaccatgatgaatcatccaactgatgcctggaaagaagggcaattcaaagatatcattaccaaggttgccaatgtggaactatactacagagcaatacagttctacttagaattcaagcctctgttgttaaatgatttgctgatggtgctgtctccacggttggatcacactcgtgcagtcaattatttcagcaaggttaaacagctaccactggtgaaaccgtatttgcgttcagttcagaaccataacaacaaatctgtgaatgaatcattgaacaatctttttattacagaagaagattatcaggctctgcgaacatcaatagatgcttatgacaactttgacaatatctcgcttgctcagcgtttggaaaaacatgaactcattgagttcaggagaattgctgcttatctcttcaaaggcaacaatcgctggaaacagagtgtagagctgtgcaagaaagacagcctttacaaggatgcaatgcagtatgcttctgaatctaaagatactgaattggctgaagaactcctgcagtggtttttgcaggaagaaaaaagagagtgctttggagcttgtctgtttacctgttacgatcttttaaggccagatgtcgtcctagaaactgcatggaggcacaatatcatggattttgccatgccctatttcatccaggtcatgaaggagtacttgacaaaggtggataaattagatgcttcagaatcactgagaaaagaagaagaacaagctacagagacacaacccattgtttatggtcagccccagttgatgctgacagcaggacccagtgttgccgtccctccccaggcaccttttggttatggttataccgcaccaccgtatggacagccacagcctggctttgggtacagcatgtgagatgaagcgctgatcctgtagtcacctattttcgtactgaaacatcgtctttacccacttctcagtttataatgggggaaaacaggcaacgtgttcttgtaacctttatttcatgaaggacttctttttgtttctaactataaacttggatcacctatgttaaaaccttatttcacattccacatcattttagaatttattttcgaaggggaatagtttcaatgttttattcacttgggctttttttcttccccctctttctttaaagaactgctcaatattcaatctgttgtgaagaacctgatttgcactctgtagtgtttaaagaaacaaagaaactctaatattgaatctcttaaatttagtgtatgtaaacagcttacaaatacgtattgtctaaatgcatttaaatctgttttattcaaagaaaagctaaagcaaaaacactggcatatgaccatgcaagactgtcagtgccaacaaagacaacactaatcagcacatcgtacactggattgcagtgcttcccagattattgaaaaatgttacagacaacttgcctgatttttaaatgagcgtaaaaggccctctaacctatgcaggtttccccattatgcatatagaaaatgctagtatgttttgctcacttcatatgtaacaggtgcccttatgttgtgctgtatcctgtgctttttctgtgggaccattccattcaggagcaaagagcaccatgattccaatcttgtgtgtgtttactaacccttccctgaggcttgtgtatgttggatattgtggtgttttagatcactgagtgtacagaagagagaaattcaaacaaaatattgctgttcttcagttttgtttgtggaatttgaaattactcaaatttaaaataaattactggactgtgg

SEQ ID NO: 124 - protein, 1675 aa, Homo sapien
MAQILPIRFQEHLQLQNLGINPANIGFSTLTMESDKFICIREKVGEQAQVVIIDMNDPSNPIRRPISADSAIMNPASKVIALKAGKTLQIFNIEMKSKMKAHTMTDDVTFWKWISLNTVALVTDNAVYHWSMEGESQPVKMFDRHSSLAGCQIINYRTDAKQKWLLLTGISAQQNRVVGAMQLYSVDRKVSQPIEGHAASFAQFKMEGNAEESTLFCFAVRGQAGGKLHIIEVGTPPTGNQPFPKKAVDVFFPPEAQNDFPVAMQISEKHDVVFLITKYGYIHLYDLETGTCIYMNRISGETIFVTAPHEATAGIIGVNRKGQVLSVCVEEENIIPYITNVLQNPDLALRMAVRNNLAGAEELFARKFNALFAQGNYSEAAKVAANAPKGILRTPDTIRRFQSVPAQPGQTSPLLQYFGILLDQGQLNKYESLELCRPVLQQGRKQLLEKWLKEDKLECSEELGDLVKSVDPTLALSVYLRANVPNKVIQCFAETGQVQKIVLYAKKVGYTPDWIFLLRNVMRISPDQGQQFAQMLVQDEEPLADITQIVDVFMEYNLIQQCTAFLLDALKNNRPSEGPLQTRLLEMNLMHAPQVADAILGNQMFTHYDRAHIAQLCEKAGLLQRALEHFTDLYDIKRAVVHTHLLNPEWLVNYFGSLSVEDSLECLRAMLSANIRQNLQICVQVASKYHEQLSTQSLIELFESFKSFEGLFYFLGSIVNFSQDPDVHFKYIQAACKTGQIKEVERICRESNCYDPERVKNFLKEAKLTDQLPLIIVCDRFDFVHDLVLYLYRNNLQKYIEIYVQKVNPSRLPVVIGGLLDVDCSEDVIKNLILVVRGQFSTDELVAEVEKRNRLKLLLPWLEARIHEGCEEPATHNALAKIYIDSNNNPERFLRENPYYDSRVVGKYCEKRDPHLACVAYERGQCDLELINVCNENSLFKSLSRYLVRRKDPELWGSVLLESNPYRRPLIDQVVQTALSETQDPEEVSVTVKAFMTADLPNELIELLEKIVLDNSVFSEHRNLQNLLILTAIKADRTRVMEYINRLDNYDAPDIANIAISNELFEEAFAIFRKFDVNTSAVQVLIEHIGNLDRAYEFAERCNEPAVWSQLAKAQLQKGMVKEAIDSYIKADDPSSYMEVVQAANTSGNWEELVKYLQMARKKARESYVETELIFALAKTNRLAELEEFINGPNNAHIQQVGDRCYDEKMYDAAKLLYNNVSNFGRLASTLVHLGEYQAAVDGARKANSTRTWKEVCFACVDGKEFRLAQMCGLHIVVHADELEELINYYQDRGYFEELITMLEAALGLERAHMGMFTELAILYSKFKPQKMREHLELFWSRVNIPKVLRAAEQAHLWAELVFLYDKYEEYDNAIITMMNHPTDAWKEGQFKDIITKVANVELYYRAIQFYLEFKPLLLNDLLMVLSPRLDHTRAVNYFSKVKQLPLVKPYLRSVQNHNNKSVNESLNNLFITEEDYQALRTSIDAYDNFDNISLAQRLEKHELIEFRRIAAYLFKGNNRWKQSVELCKKDSLYKDAMQYASESKDTELAEELLQWFLQEEKRECFGACLFTCYDLLRPDVVLETAWRHNIMDFAMPYFIQVMKEYLTKVDKLDASESLRKEEEQATETQPIVYGQPQLMLTAGPSVAVPPQAPFGYGYTAPPYGQPQPGFGYSM

SEQ ID NO: 125 - DNA, 6322 bp, Homo sapien
ctgagagcgacatgtccccggcggctcaggcggagcggcccgtggcgctgtttttctgagtccggggtggcctggcagccggccgaggacgagggtcggcgggggctgcccccgtggtggtggccgccatgctgggagcctgggcggttgagggaaccgctgtggcgctcctgcgactgctgctgctgctgctgccgccggcgatccggggacccgggctcggcgtggccggcgtggccggcgcggcgggggccgggctgcccgagagcgtcatttgggcggtcaacgcgggtggagaggcgcatgtggacgtgcacgggatccacttccgcaaggaccctttggaaggccgggtgggccgagcctcagactatggcatgaaactgccaatcctgcgttccaaccctgaggaccagatcctgtatcaaactgagcggtacaatgaggagacctttggctacgaagtgcccatcaaagaggagggggactacgtgctggtcttgaaatttgcagaggtctactttgcacagtcccagcaaaaggtatttgatgtacgattgaatggccacgtcgtggtgaaggacttggatatctttgatcgtgttgggcatagcacagctcacgatgaaattatacctatgagcatcagaaaggggaagctgagtgtccagggggaggtgtccaccttcacagggaaactctacattgagtttgtcaaggggtactatgacaatcccaaggtctgtgcactctacatcatggctgggacagtggatgatgtaccaaagcttcagcctcatccgggattggagaagaaagaagaggaagaagaagaagaagaatatgatgaagggtctaatctcaaaaaacagaccaataagaaccgggtgcagtcaggcccccgcacacccaacccctatgcctcggacaacagcagcctcatgtttcccatcctggtggccttcggagtcttcattccaaccctcttctgcctctgccggttgtgagaacaaatgactatcctgaacagggtggaggggtgtgggaaagaaaccagccatattggttttggtttctgtatttttcacaatgattaatgaacaaaaacaaagagaaaaaaaacacacatcaattaaaggagacaaaaagaggcagagcgagtagagagcagccctcattcaccacctggtcccagacgtgcttcagtcctcgtcctctctttgtggctggctcccagccttctctttcctcttgaggatacttagggtaaactggatccttcctgctcaaggatcctcatttgtatacctagtggaaaggactctgaactcagaggagtcactgttcctttttttaggttagaaattaacagcagggaaatgccatcttattacctgagacgaccagcactgggagttaggtacggtctgaagttatgtctagataagacttcagacgtcctgggattgaaagaatgtgtgtgaaggggtagaatttgtgcggtaaagacttaaaaaaaaaagtagggagattaaaaaaaaagaaagaaaatgcttccttatctggaagcctttctggattaatccagtgatggtcccacctttagtgtttgagctttgtcattgcttgtctccctggcatgtgccagttatagactgtccagcatccaagacgtttcggttatgtcgggtcctcagatcgcctctgacttgttaccacaacaaatcattttgatttcagtgcctgttggggacttgatttcttctcaggttttgtttgtttgtttgtttccttaatctggctcatttgaaatttcttctccctctcaaccatcccactaagttatagccaagaagggaaggagacacggggatttggggttctctgcttgaatgtcttctcctttaccacctcaccttgttggtacctccctccctggatctctgagccagcagccaggaggacctgacccagcagttctttactggcccctttgtagggccttgctgccagggggcagggatgctttccagcctgcagcaacagaacacttgaccttaaaagtctcttctggtctttggattagaaaaggcttatgttagcatagcttaagagcaacctcagagacttgagccctactaagtgactgaccactgtttagagtgtctggtatctgatgttcatttattcccatgttcttgtgtgtcacagttcagccagttttggtttatgcctagagctacttcaaggaactagactaattagctatataggcccagcgatgcttcttattgatcttaatagtatgcccttccttcccctgtcctttcatttctctatccaagtagcagtcaggttcttggtgtgatgggactgaaagaattccagtcagccagagccttggcagctctgaagctaaccttagcatctaagtgtcgatcttgaattccctgaaaaaatttctataggaaatgaagcttccctggtcccctcctttctggccattgtcatccatttcccagttagggcaacaatgaaggaggacccagccaagctagaaggaattttgtggatgggagacagcaggattagcttcagcttgggctggagcagtcaatataggatctcaggccaggcccgcttttctagaatgtgtttaattttgagtttgctttattagatatgttttttaagagctctgtatatttgaactgctccttatgtgacaaaataggtagctcttgggctcatgtcctgggttttggctctttaatgattactccaggccagcatttagtcgtttgagaattgtagcctgttgttttcgctgtgacttgggtctcagtgctagggtattgagtcaggcagctggagggttgtggcccgaggctgcagtcagaggtatacttcccatagtgcttcacacagctcccctgcttctaaaggataaggtactgtagccttggtcctggggaccacctgcctggggcagtggacatcctaactaaacaggcttctggcagtagctttggttcctatcccatcgaaattccccaaagccctgggccactgccattgggttagtcaagatgaaggaggaggactggctgcctccattttgccttgtttgttagtttgcctgggtctgtctgaggaaggagggggtcccgccttccacctcaacacatcccttcagtgactcagagtctcagaaggaaaccctgactcctggggccatttcctaatggtactgtaagccaagcagctttgcttctgcctctgtttccaagcccacccttttcccctgagctcagggttagggatgggcgctttcctctctggttgtgaacgaaaggaaggaacatctttctatggctaacaaaaactaaaggggaagtgaggaaacaggaagaagtatggtgggggctggggtagactcccctggagccaagcctatccagctaacaagagctccctggggctggtcacagctggctcatgatgctgaacttgaaagtttttttgtttttgtttttgttttgtggctcctccaagatataggtacatgaagtttaggttaaaggggtgggattctttatttttatttttgtattgtatgtgtcaagaattactctgttgttcaccttttgctttttgcactgtttgttctcttatctgtattttgagcttagtgctaggactgagaggctgcaccatagggaatgtatgggagatggtgaggggtgccagtgaggggtgcgtggaggagaggcctgggctcctctactggatctacactctgtcccaggtttttagatcccactgagcccagctgactgaaaacaaggacagtcagggtgaaacttcttttgccagaagtgtggcctgagttgaatttctgggaggatgacgcagatgtctgctgcagagctgggctgagagttctgcagtctagctctgacttaggtcaggggcctgttggtctctcattggacgtttttgggtctcactcatgcttactgaaacattgtgccaagaaactctgtgggatttgtgtcccttaaaccagactcacttttctgaaaaatctccattgttgaggagaggctgctcaatcgacaccccgagttctcatgactgggaagatagttttcttcaggtgtcaatggcgttagactcccaggaagactagccctgcccacagggccacctgttggtttgagagcgtgttcgtgttctcttgccctccctgcctaagagctactgggatcacgttagcgggcatttaggctttgatgagagggcacagtttgagttaggtttacctccccctttctgtgcctgggaactgtttggtccagctttagaactgtggttttgacttccttatctcttgggagaagcttctgttttaaggaatttctcttccttcttctcctgcctctagcctctcctggaaaggcctggatatggtttctaaaatctcagctgagaacttcagaaaacagcagcagtattttccttttcctagtgctaaaatccctttccctagaaattggctcaccttgggaaacccagggaaagaatcagcaggttctctgccctccctaggggttggggaaggacccaccccggtcagcacagtgccttttcctctcctgctctgagccagggtggggcattccctctagattcaggtttgggcaggggtcctatagtccctgccatggggctgcttccctgtcccttccctcccctttgctggcctactctggcataattcaagtgtcttcttgccttggggatccttagtggcatcaaatggcaacatggaatattgtcctccatgcccctccagaaggacctaggagagtaggtgagctttccaaagtgagagacgaatctttctttctttttttttttaaagggcaggatgggtatgctttgggctttctccttctgtggccccggaggaaggagagactgaggcaaggcaaagtgatagtacactgaagcagaaccggaaacacccaggaactgttcagaaatctcagaagaaatctgcttctcttcgatggaaagatataattaacgatcaaagagctctaagaaaattgcaaagaagccttaatgttcaagctttagaaagatcagagcaatttttctctttcagtccaaactaagactctctgtatttaaatctctctggggcaagagggctagatttcctcattttgttatgagactagattggtaccagtagatcagctgcctagcgagggcaggtttcttctttgcatctgtgtggcttgcttccagtctggcctgtcctttccagctgccttttgtctagcctgctatggggggccagattatcttgataagagcaggtgatttggggactagctgggttggtaggaaaagagcaggatggatctcttgggacaggttcccccaggagtataaacacaaggagccaggattgtcctggcagccaaggaaacagtagtgcctgtttgagttggcagagagggccttggcacctcttgcatccaggcagtcttgtgagatgggggcacatagcactggggaaagcagaactccattctcacctctattttgagcttcagtgctttatttcagtatgaggaaaaacaacaacaaactgaagtgcgctttccgtcctttcaaaggacaactgtcgggaagggagagccgagttgcgaggtaggaggggagcactggcagggagagacattcttgactcctctcttccctggtgtgttgtgatccagggaatgaaaagaaatttgaccctggattggttctctccttggacttaaggaatcttaccttttccttccacaaagttctcccaggcaaggaccagctgcccattctgagcccagggcagcctcttcaaccattattggtctaacctggcttgtcaggaaaccaagcccacccttccacattgggcctggctgctctattctgtaccaagtactggagaaaaagcatcaagttcttagcccttgtagcttctaccctagtttcccatcctctctctgtggaggccaaaccaactctttgccagcagccacaacatgcattgacagcggcacagtgagatataactgatgggctttgaacctggttggccggggaagctgtaggggtggatagagctggctttccttctgggctgtctccatctgaccctaccccttccatgtcccaccccactcccaccaaaaagtacaaaatcaggatgtttttcactgtccattgctttgtgttttaataaacaatttgcagtgac

SEQ ID NO: 126 - protein, 292 aa, Homo sapien
MLGAWAVEGTAVALLRLLLLLLPPAIRGPGLGVAGVAGAAGAGLPESVIWAVNAGGEAHVDVHGIHFRKDPLEGRVGRASDYGMKLPILRSNPEDQILYQTERYNEETFGYEVPIKEEGDYVLVLKFAEVYFAQSQQKVFDVRLNGHVVVKDLDIFDRVGHSTAHDEIIPMSIRKGKLSVQGEVSTFTGKLYIEFVKGYYDNPKVCALYIMAGTVDDVPKLQPHPGLEKKEEEEEEEEYDEGSNLKKQTNKNRVQSGPRTPNPYASDNSSLMFPILVAFGVFIPTLFCLCRL

SEQ ID NO: 127 - DNA, 2693 bp, Homo sapien
cgaaaaaagaggggaagagtattaaagaccatttctggctgggcagggcactctcagcagctcaactgcccagcgtgaccagtggccacctctgcagtgtcttccacaacctggtcttgactcgtctgctgaacaaatcctctgacctcaggccggctgtgaacgtagttcctgagagatagcaaacatgcccaacagtgagcccgcatctctgctggagctgttcaacagcatcgccacacaaggggagctcgtaaggtccctcaaagcgggaaatgcgtcaaaggatgaaattgattctgcagtaaagatgttggtgtcattaaaaatgagctacaaagctgccgcgggggaggattacaaggctgactgtcctccagggaacccagcacctaccagtaatcatggcccagatgccacagaagctgaagaggattttgtggacccatggacagtacagacaagcagtgcaaaaggcatagactacgataagctcattgttcggtttggaagtagtaaaattgacaaagagctaataaaccgaatagagagagccaccggccaaagaccacaccacttcctgcgcagaggcatcttcttctcacacagagatatgaatcaggttcttgatgcctatgaaaataagaagccattttatctgtacacgggccggggcccctcttctgaagcaatgcatgtaggtcacctcattccatttattttcacaaagtggctccaggatgtatttaacgtgcccttggtcatccagatgacggatgacgagaagtatctgtggaaggacctgaccctggaccaggcctatggcgatgctgttgagaatgccaaggacatcatcgcctgtggctttgacatcaacaagactttcatattctctgacctggactacatggggatgagctcaggtttctacaaaaatgtggtgaagattcaaaagcatgttaccttcaaccaagtgaaaggcattttcggcttcactgacagcgactgcattgggaagatcagttttcctgccatccaggctgctccctccttcagcaactcattcccacagatcttccgagacaggacggatatccagtgccttatcccatgtgccattgaccaggatccttactttagaatgacaagggacgtcgcccccaggatcggctatcctaaaccagccctgttgcactccaccttcttcccagccctgcagggcgcccagaccaaaatgagtgccagcgacccaaactcctccatcttcctcaccgacacggccaagcagatcaaaaccaaggtcaataagcatgcgttttctggagggagagacaccatcgaggagcacaggcagtttgggggcaactgtgatgtggacgtgtctttcatgtacctgaccttcttcctcgaggacgacgacaagctcgagcagatcaggaaggattacaccagcggagccatgctcaccggtgagctcaagaaggcactcatagaggttctgcagcccttgatcgcagagcaccaggcccggcgcaaggaggtcacggatgagatagtgaaagagttcatgactccccggaagctgtccttcgactttcagtagcactcgttttacatatgcttataaaagaagtgatgtatcagtaatgtatcaataatcccagcccagtcaaagcaccgccacctgtaggcttctgtctcatggtaattactgggcctggcctctgtaagcctgtgtatgttatcaatactgtttcttcctgtgagttccattatttctatctcttatgggcaaagcattgtgggtaattggtgctggctaacattgcatggtcggatagagaagtccagctgtgagtctctccccaaagcagccccacagtggagccttcggctggaagtccatgggccaccctgttcttgtccatggaggacttccgagggttccaagtatactcttaagacccactctgtttaaaaatatatattctatgtatgcgtatatggaattgaaatgtcattattgtaacctagaaagtgctttgaaatattgatgtggggaggtttattgagcacaagatgtatttcagcccatgccccctcccaaaaagaaattgataagtaaaagcttcgttatacatttgactaagaaatcacccagctttaaagctgcttttaacaatgaagattgaacagagttcagcaattttgattaaattaagacttgggggtgaaactttccagtttactgaactccagaccatgcatgtagtccactccagaaatcatgctcgcttcccttggcacaccagtgttctcctgccaaatgaccctagaccctctgtcctgcagagtcagggtggcttttcccctgactgtgtccgatgccaaggagtcctggcctccgcagatgcttcattttgacccttggctgcagtggaagtcagcacagagcagtgccctggctgtgtcctggacgggtggacttagctagggagaaagtcgaggcagcagccctcgaggccctcacagatgtctaggcaggcctcatttcatcacgcagcatgtgcaggcctggaagagcaaagccaaatctcagggaagtccttggttgatgtatctgggtctcctctggagcactctgccctcctgtcacccagtagagtaaataaacttccttggctcctaaaaaa

SEQ ID NO: 128 - protein, 471 aa, Homo sapien
MPNSEPASLLELFNSIATQGELVRSLKAGNASKDEIDSAVKMLVSLKMSYKAAAGEDYKADCPPGNPAPTSNHGPDATEAEEDFVDPWTVQTSSAKGIDYDKLIVRFGSSKIDKELINRIERATGQRPHHFLRRGIFFSHRDMNQVLDAYENKKPFYLYTGRGPSSEAMHVGHLIPFIFTKWLQDVFNVPLVIQMTDDEKYLWKDLTLDQAYGDAVENAKDIIACGFDINKTFIFSDLDYMGMSSGFYKNVVKIQKHVTFNQVKGIFGFTDSDCIGKISFPAIQAAPSFSNSFPQIFRDRTDIQCLIPCAIDQDPYFRMTRDVAPRIGYPKPALLHSTFFPALQGAQTKMSASDPNSSIFLTDTAKQIKTKVNKHAFSGGRDTIEEHRQFGGNCDVDVSFMYLTFFLEDDDKLEQIRKDYTSGAMLTGELKKALIEVLQPLIAEHQARRKEVTDEIVKEFMTPRKLSFDFQ

SEQ ID NO: 129 - DNA, 2693 bp, Homo sapien; identical to SEQ ID NO: 127

SEQ ID NO: 130 - protein, 471 aa, Homo sapien; identical to SEQ ID NO: 128

SEQ ID NO: 131 - DNA, 3137 bp, Homo sapien
gcggagcgtgtgagcagtactgcggcctcctctcctctcctaacctcgctctcgcggcctacctttacccgcccgcctgctcggcgaccagcggggatcctcccccagccgcaagtccacgaagaaagcaacgaatgaaaattatgaagacaacgagaagtcagactcctccgggtcgcgctccagctgcttcggcttcgtcgcctactctgtgaactccggggagagatctcgagtcaagattaagaccttaacccaccaacctgcctgttcggacaccccccgggccggccgctgtctgtccccttctccatcgccctctcccagaaagctccggtgcttggaccagctagagtctgagaaagaggagaggcgcgaacgccactccaaaaagagaagggttaaagagggcaaccctaacgatacgcttgactttctgtggctgggaacaccttccaccatgaccacctcagcaagttcccacttaaataaaggcatcaagcaggtgtacatgtccctgcctcagggtgagaaagtccaggccatgtatatctggatcgatggtactggagaaggactgcgctgcaagacccggaccctggacagtgagcccaagtgtgtggaagagttgcctgagtggaatttcgatggctccagtactttacagtctgagggttccaacagtgacatgtatctcgtgcctgctgccatgtttcgggaccccttccgtaaggaccctaacaagctggtgttatgtgaagttttcaagtacaatcgaaggcctgcagagaccaatttgaggcacacctgtaaacggataatggacatggtgagcaaccagcacccctggtttggcatggagcaggagtataccctcatggggacagatgggcacccctttggttggccttccaacggcttcccagggccccagggtccatattactgtggtgtgggagcagacagagcctatggcagggacatcgtggaggcccattaccgggcctgcttgtatgctggagtcaagattgcggggactaatgccgaggtcatgcctgcccagtgggaatttcagattggaccttgtgaaggaatcagcatgggagatcatctctgggtggcccgtttcatcttgcatcgtgtgtgtgaagactttggagtgatagcaacctttgatcctaagcccattcctgggaactggaatggtgcaggctgccataccaacttcagcaccaaggccatgcgggaggagaatggtctgaagtacatcgaggaggccattgagaaactaagcaagcggcaccagtaccacatccgtgcctatgatcccaagggaggcctggacaatgcccgacgtctaactggattccatgaaacctccaacatcaacgacttttctgctggtgtagccaatcgtagcgccagcatacgcattccccggactgttggccaggagaagaagggttactttgaagatcgtcgcccctctgccaactgcgaccccttttcggtgacagaagccctcatccgcacgtgtcttctcaatgaaaccggcgatgagcccttccagtacaaaaattaagtggactagacctccagctgttgagcccctcctagttcttcatcccactccaactcttccccctctcccagttgtcccgattgtaactcaaagggtggaatatcaaggtcgtttttttcattccatgtgcccagttaatcttgctttctttgtttggctgggatagaggggtcaagttattaatttcttcacacctaccctcctttttttccctatcactgaagctttttagtgcattagtggggaggagggtggggagacataaccactgcttccatttaatggggtgcacctgtccaataggcgtagctatccggacagagcacgtttgcagaagggggactcttcttccaggtagctgaaaggggaagacctgacgtactctggttaggttaggacttgccctcgtggtggaaacttttcttaaaaagttataaccaacttttctattaaaagtgggaattaggagagaaggtaggggttgggaatcagagagaatggctttggtctcttgcttgtgggactagcctggcttgggactaaatgccctgctctgaacacgaagcttagtataaactgatggatatccctaccttgaaagaagaaaaggttcttactgcttggtccttgatttatcacacaaagcagaatagtatttttatatttaaatgtaaagacaaaaaactatatgtatggttttgtggattatgtgtgttttgctaaaggaaaaaaccatccaggtcacggggcaccaaatttgagacaaatagtcggattagaaataaagcatctcattttgagtagagagcaagggaagtggttcttagatggtgatctgggattaggccctcaagacccttttgggtttctgccctgcccaccctctggagaaggtgggcactggattagttaacagacgacacgttactagcagtcacttgatctccgtggctttggtttaaaagacacacttgtccacataggtttagagataagagttggctgttcaacttgagcatgttactgacagagggggtattggggttattttctggtaggaatagcatgtcactaaagcaggccttttgatattaaattttttaaaaagcaaaattatagaagtttagattttaatcaaatttgtagggtttctaggtaatttttacagaattgcttgtttgcttcaactgtctcctacctctgctcttggaggagatggggacagggctggagtcaaaacacttgtaattttgtatcttgatgtctttgttaagactgctgaagaattattttttttcttttataataaggaataaaccccacctttattccttcatttcatctaccattttctggttcttgtgttggctgtggcaggccagctgtggttttcttttgccatgacaacttctaattgccatgtacagtatgttcaaagtcaaataactcctcattgtaaacaaactgtgtaactgcccaaagcagcacttataaatcagcctaacataaaaaaaaaaaaaaaaaaaaaaaaaaaaaaaaaaaaaaaaaaaaaaaa

SEQ ID NO: 132 - protein, 373 aa, Homo sapien
MTTSASSHLNKGIKQVYMSLPQGEKVQAMYIWIDGTGEGLRCKTRTLDSEPKCVEELPEWNFDGSSTLQSEGSNSDMYLVPAAMFRDPFRKDPNKLVLCEVFKYNRRPAETNLRHTCKRIMDMVSNQHPWFGMEQEYTLMGTDGHPFGWPSNGFPGPQGPYYCGVGADRAYGRDIVEAHYRACLYAGVKIAGTNAEVMPAQWEFQIGPCEGISMGDHLWVARFILHRVCEDFGVIATFDPKPIPGNWNGAGCHTNFSTKAMREENGLKYIEEAIEKLSKRHQYHIRAYDPKGGLDNARRLTGFHETSNINDFSAGVANRSASIRIPRTVGQEKKGYFEDRRPSANCDPFSVTEALIRTCLLNETGDEPFQYKN

SEQ ID NO: 133 - DNA, 1661 bp, Homo sapien
tgctgcagccgctgccgccgattccggatctcattgccacgcgcccccgacgaccgcccgacgtgcattcccgattccttttggttccaagtccaatatggcaactctaaaggatcagctgatttataatcttctaaaggaagaacagaccccccagaataagattacagttgttggggttggtgctgttggcatggcctgtgccatcagtatcttaatgaaggacttggcagatgaacttgctcttgttgatgtcatcgaagacaaattgaagggagagatgatggatctccaacatggcagccttttccttagaacaccaaagattgtctctggcaaagactataatgtaactgcaaactccaagctggtcattatcacggctggggcacgtcagcaagagggagaaagccgtcttaatttggtccagcgtaacgtgaacatatttaaattcatcattcctaatgttgtaaaatacagcccgaactgcaagttgcttattgtttcaaatccagtggatatcttgacctacgtggcttggaagataagtggttttcccaaaaaccgtgttattggaagtggttgcaatctggattcagcccgattccgttacctgatgggggaaaggctgggagttcacccattaagctgtcatgggtgggtccttggggaacatggagattccagtgtgcctgtatggagtggaatgaatgttgctggtgtctctctgaagactctgcacccagatttagggactgataaagataaggaacagtggaaagaggttcacaagcaggtggttgagagtgcttatgaggtgatcaaactcaaaggctacacatcctgggctattggactctctgtagcagatttggcagagagtataatgaagaatcttaggcgggtgcacccagtttccaccatgattaagggtctttacggaataaaggatgatgtcttccttagtgttccttgcattttgggacagaatggaatctcagaccttgtgaaggtgactctgacttctgaggaagaggcccgtttgaagaagagtgcagatacactttgggggatccaaaaggagctgcaattttaaagtcttctgatgtcatatcatttcactgtctaggctacaacaggattctaggtggaggttgtgcatgttgtcctttttatctgatctgtgattaaagcagtaatattttaagatggactgggaaaaacatcaactcctgaagttagaaataagaatggtttgtaaaatccacagctatatcctgatgctggatggtattaatcttgtgtagtcttcaactggttagtgtgaaatagttctgccacctctgacgcaccactgccaatgctgtacgtactgcatttgccccttgagccaggtggatgtttaccgtgtgttatataacttcctggctccttcactgaacatgcctagtccaacattttttcccagtgagtcacatcctgggatccagtgtataaatccaatatcatgtcttgtgcataattcttccaaaggatcttattttgtgaactatatcagtagtgtacattaccatataatgtaaaaagatctacatacaaacaatgcaaccaactatccaagtgttataccaactaaaacccccaataaaccttgaacagtg

SEQ ID NO: 134 - protein, 332 aa, Homo sapien
MATLKDQLIYNLLKEEQTPQNKITVVGVGAVGMACAISILMKDLADELALVDVIEDKLKGEMMDLQHGSLFLRTPKIVSGKDYNVTANSKLVIITAGARQQEGESRLNLVQRNVNIFKFIIPNVVKYSPNCKLLIVSNPVDILTYVAWKISGFPKNRVIGSGCNLDSARFRYLMGERLGVHPLSCHGWVLGEHGDSSVPVWSGMNVAGVSLKTLHPDLGTDKDKEQWKEVHKQVVESAYEVIKLKGYTSWAIGLSVADLAESIMKNLRRVHPVSTMIKGLYGIKDDVFLSVPCILGQNGISDLVKVTLTSEEEARLKKSADTLWGIQKELQF

SEQ ID NO: 135 - DNA, 1093 bp, Homo sapien
ggctctcttcctgtctttgtggctccggaaaggcgtttgggatgccaacgatgaggctgctgtcatttgtggtgttggctctatttgctgtcactcaagcagaggaaggagccaggcttttggcttccaaatcactgctgaacagatacgccgtggagggacgagacctgaccttgcagtacaacatctacaatgttggctcaagtgctgcattagacgtggaactatctgatgattccttccctccagaagactttggcattgtgtctggaatgctcaatgtcaaatgggaccggattgcccctgctagcaatgtctcccacactgtggtcctgcgccctctcaaggctggttatttcaacttcacctcggcaacaattacttacctggcccaggaggatgggcccgttgtgattggctctaccagtgcacctggacagggaggaatcctggctcagcgggagtttgacaggcgattctcccctcattttctggactgggcagcctttggggtcatgacccttccctccatcggcatccccctgctattgtggtactccagcaagaggaaatatgacactcccaaaacgaagaagaactgattggggcttccacagccctcctctcccaagaaatccaggctcctctcccaagaaatccaggtgctttccagactccaaagggtatcttaaatgcaatctcttctctcttagcccttggccactttctcctggatcctgccctgctctcagccatagtgaaggaccagccctaggagtctgcgagagcctccttggttccatcgtgaagccataaacaggaatgcctttggcaatagccttgagcctagagggccctctgatgccccactgaggtgctgttggtttattgctggcaacgtgaattctctcaggggtctaggaggggcattttggagactgcctgacaccacccctatcccctgcctccccctctcagaagagggtggaagatgaaatgaaagctatgggactcttggaggatacccagtgtctattctgggttagagaagtgcttactaaggggttttctaataaaaacaaatgccaattgc

SEQ ID NO: 136 - protein, 183 aa, Homo sapien
MRLLSFVVLALFAVTQAEEGARLLASKSLLNRYAVEGRDLTLQYNIYNVGSSAALDVELSDDSFPPEDFGIVSGMLNVKWDRIAPASNVSHTVVLRPLKAGYFNFTSATITYLAQEDGPVVIGSTSAPGQGGILAQREFDRRFSPHFLDWAAFGVMTLPSIGIPLLLWYSSKRKYDTPKTKKN

SEQ ID NO: 137 - DNA, 1526 bp, Homo sapien
agtggtgctgggagtgtcgtggacgccgtgccgttactcgtagtcaggcggcggcgcaggcggcggcggcggcatagcgcacagcgcgccttagcagcagcagcagcagcagcagcatcggaggtacccccgccgtcgcagcccccgcgctggtgcagccaccctcgctccctctgctcttcctcccttcgctcgcaccatggctgatcagctgaccgaagaacagattgctgaattcaaggaagccttctccctatttgataaagatggcgatggcaccatcacaacaaaggaacttggaactgtcatgaggtcactgggtcagaacccaacagaagctgaattgcaggatatgatcaatgaagtggatgctgatggtaatggcaccattgacttccccgaatttttgactatgatggctagaaaaatgaaagatacagatagtgaagaagaaatccgtgaggcattccgagtctttgacaaggatggcaatggttatatcagtgcagcagaactacgtcacgtcatgacaaacttaggagaaaaactaacagatgaagaagtagatgaaatgatcagagaagcagatattgatggagacggacaagtcaactatgaagaattcgtacagatgatgactgcaaaatgaagacctactttcaactcctttttcccccctctagaagaatcaaattgaatcttttacttacctcttgcaaaaaaaagaaaaaagaaaaaagttcatttattcattctgtttctatatagcaaaactgaatgtcaaaagtaccttctgtccacacacacaaaatctgcatgtattggttggtggtcctgtcccctaaagatcaagctacacatcagttttacaatataaatacttgtactaccttaatgataaggactccttaaagttccatttgctaatgattaatacactgtttgggctggccagtttttcatgcatgcagcttgacgattgagcacagtcaggcctttgtattaaaaatgaaaaatgaaaaaacaaattcaaaacctattcaaatgggttctagttcaatttgtttagtataaattgtcatagctggtttactgaaaacaaacacatttaaaattggtttacctcaggatgacgtgcagaaaaatgggtgaaggataaaccgttgagacgtggccccactggtaggatggtcctcttgtacttcgtgtgctccgacccatggtgacgatgacacaccctggtggcatgcccgtgtatgttggtttagcgttgtctgcattgttctagagtgaaacaggtgtcaggctgtcactgttcacacaaatttttaataagaaacatttaccaagggagcatctttggactctctgtttttaaaaccttctgaaccatgacttggagccggcagagtaggctgtggctgtggacttcagcacaaccatcaacattgctgttcaaagaaattacagtttacgtccattccaagttgtaaatgctagtcttttttttttttttttccaataaa

SEQ ID NO: 138 - protein, 149 aa, Homo sapien [sequence omitted]

SEQ ID NO: 139 - DNA, 1826 bp, Homo sapien
agtatgtgtggttggggaattcatgtggaggtcagagtggaagcaggtgtgagagggtccagcagaaggaaacatggctgccaaagtgtttgagtccattggcaagtttggcctggccttagctgttgcaggaggcgtggtgaactctgccttatataatgtggatgctgggcacagagctgtcatctttgaccgattccgtggagtgcaggacattgtggtaggggaagggactcattttctcatcccgtgggtacagaaaccaattatctttgactgccgttctcgaccacgtaatgtgccagtcatcactggtagcaaagatttacagaatgtcaacatcacactgcgcatcctcttccggcctgtcgccagccagcttcctcgcatcttcaccagcatcggagaggactatgatgagcgtgtgctgccgtccatcacaactgagatcctcaagtcagtggtggctcgctttgatgctggagaactaatcacccagagagagctggtctccaggcaggtgagcgacgaccttacagagcgagccgccacctttgggctcatcctggatgacgtgtccttgacacatctgaccttcgggaaggagttcacagaagcggtggaagccaaacaggtggctcagcaggaagcagagagggccagatttgtggtggaaaaggctgagcaacagaaaaaggcggccatcatctctgctgagggcgactccaaggcagctgagctgattgccaactcactggccactgcaggggatggcctgatcgagctgcgcaagctggaagctgcagaggacatcgcgtaccagctctcacgctctcggaacatcacctacctgccagcggggcagtccgtgctcctccagctgccccagtgagggcccaccctgcctgcacctccgcgggctgactgggccacagccccgatgattcttaacacagccttccttctgctcccaccccagaaatcactgtgaaatttcatgattggcttaaagtgaaggaaataaaggtaaaatcacttcagatctctaattagtctatcaaatgaaactctttcattcttctcacatccatctacttttttatccacctccctaccaaaaattgccaagtgcctatgcaaaccagctttaggtcccaattcggggcctgctggagttccggcctgggcaccagcatttggcagcacgcaggcggggcagtatgtgatggactggggagcacaggtgtctgcctagatccacgtgtggcctccgtcctgtcactgatggaaggtttgcggatgagggcatgtgcggctgaactgagaaggcaggcctccgtcttcccagcggttcctgtgcagatgctgctgaagagaggtgccggggaggggcagagaggaagtggtctgtctgttaccataagtctgattctctttaactgtgtgaccagcggaaacaggtgtgtgtgaactgggcacagattgaagaatctgcccctgttgaggtgggtgggcctgactgttgccccccagggtcctaaaacttggatggacttgtatagtgagagaggaggcctggaccgagatgtgagtcctgttgaagacttcctctctaccccccaccttggtccctctcagatacccagtggaattccaacttgaaggattgcatcctgctggggctgaacatgcctgccaaagacgtgtccgacctacgttcctggccccctcgttcagagactgcccttctcacgggctctatgcctgcactgggaaggaaacaaatgtgtataaactgctgtcaataaatgacacccagaccttcc

SEQ ID NO: 140 - protein, 272 aa, Homo sapien
MAAKVFESIGKFGLALAVAGGVVNSALYNVDAGHRAVIFDRFRGVQDIVVGEGTHFLIPWVQKPIIFDCRSRPRNVPVITGSKDLQNVNITLRILFRPVASQLPRIFTSIGEDYDERVLPSITTEILKSVVARFDAGELITQRELVSRQVSDDLTERAATFGLILDDVSLTHLTFGKEFTEAVEAKQVAQQEAERARFVVEKAEQQKKAAIISAEGDSKAAELIANSLATAGDGLIELRKLEAAEDIAYQLSRSRNITYLPAGQSVLLQLPQ

SEQ ID NO: 141 - DNA, 2233 bp, Homo sapien
gggacggcgacagcgggtcggcgggccgcaggagggggtcatgggtaaagactactaccagacgttgggcctggcccgcggcgcgtcggacgaggagatcaagcgggcctaccgccgccaggcgctgcgctaccacccggacaagaacaaggagcccggcgccgaggagaagttcaaggagatcgctgaggcctacgacgtgctcagcgacccgcgcaagcgcgagatcttcgaccgctacggggaggaaggcctaaaggggagtggccccagtggcggtagcggcggtggtgccaatggtacctctttcagctacacattccatggagaccctcatgccatgtttgctgagttcttcggtggcagaaatccctttgacaccttttttgggcagcggaacggggaggaaggcatggacattgatgacccattctctggcttccctatgggcatgggtggcttcaccaacgtgaactttggccgctcccgctctgcccaagagcccgcccgaaagaagcaagatcccccagtcacccacgaccttcgagtctcccttgaagagatctacagcggctgtaccaagaagatgaaaatctcccacaagcggctaaaccccgacggaaagagcattcgaaacgaagacaaaatattgaccatcgaagtgaagaaggggtggaaagaaggaaccaaaatcactttccccaaggaaggagaccagacctccaacaacattccagctgatatcgtctttgttttaaaggacaagccccacaatatctttaagagagatggctctgatgtcatttatcctgccaggatcagcctccgggaggctctgtgtggctgcacagtgaacgtccccactctggacggcaggacgatacccgtcgtattcaaagatgttatcaggcctggcatgcggcgaaaagttcctggagaaggcctccccctccccaaaacacccgagaaacgtggggacctcattattgagtttgaagtgatcttccccgaaaggattccccagacatcaagaaccgtacttgagcaggttcttccaatatagctatctgagctccccaaggactgaccagggacctttccagagctcaaggatttctggacctttctaccagttgtggaccatgagagggtgggagggcccagggagggctttcgtactgctgaatgttttccagagcatatattacaatctttcaaagtcgcacactagacttcagtggtttttcgagctatagggcatcaggtggtgggaacagcaggaaaaggcattccagtctgccccactgggtctggcagccctcccgggatgggcccacatccacctccagtccctggccaggggtgagaggcagaccagcagatggacttgatccctctgtgtctttgggcttctggctggtagataatgtcaacctgcagtcttgattcccagaccctgtacactcctccttttctgttgtgtgatcagtttgtgctttattctgtatttgtctcccatgtcttgctcttctcctggagaattctgtcttctctttggccatctcaaattgagaacctaaactattcctgcagaactgcctggttggcgtccacaagcaatacctctcgttccagcaggaccaagggagccagcctccagtgagtgactccagcaagtgcagccacctctcccttgatggtctgggagcctggcctcagcaaggggccttcctgacctctggctccagtgaagctgaatgtcctcactttgtgggtcacactctttacatttctgtaaggcaatcttggcacacgtggggcttaccagtggcccaggtaattttttgtttcatggactatggactctttcaaagggatctgatccttttgaattttgcacagccctagatacaatcccttttgataaaagggtctttgcttctgattacaggagcactgtggaacgtctgtaaatatgtttttataattccatgtatagttggtgtacactcaaaacctgtccccggcagccagtgctctctgtatagggccataatggaattctgaagaaatcttggggagggaaggggagttggaacaaatgtctgttccctggaggccagtccagtgctcagacctttagactcattgtaagttgccactgccaacatgagaccaaagtgtgtgactagtcaatgaagtgcgacagcattaaagactgatgctaaacctc

SEQ ID NO: 142 - protein, 340 aa, Homo sapien
MGKDYYQTLGLARGASDEEIKRAYRRQALRYHPDKNKEPGAEEKFKEIAEAYDVLSDPRKREIFDRYGEEGLKGSGPSGGSGGGANGTSFSYTFHGDPHAMFAEFFGGRNPFDTFFGQRNGEEGMDIDDPFSGFPMGMGGFTNVNFGRSRSAQEPARKKQDPPVTHDLRVSLEEIYSGCTKKMKISHKRLNPDGKSIRNEDKILTIEVKKGWKEGTKITFPKEGDQTSNNIPADIVFVLKDKPHNIFKRDGSDVIYPARISLREALCGCTVNVPTLDGRTIPVVFKDVIRPGMRRKVPGEGLPLPKTPEKRGDLIIEFEVIFPERIPQTSRTVLEQVLPI

SEQ ID NO: 143 - DNA, 2233 bp, Homo sapien; identical to SEQ ID NO: 141

SEQ ID NO: 144 - protein, 340 aa, Homo sapien; identical to SEQ ID NO: 142

SEQ ID NO: 145 - DNA, 4190 bp, Homo sapien
gctaagttagcttttcaactggcactgtatggcagcatttttggtatggttagcgtggcacatggcgaaacataaagcattttactgtacaggtaaggaatgtgccatgtgttttacctatctctctttctctctcactcccatgcacacatcctgtgtgtattcagagaccttcagaaacattcatattcattttcatgagtcagcaaaagccctatgcttgattccaacagaatatttcctttacatactttcttctcttaatttttacaaaattgtatggtaggtgtaaaagaaaatcatagtaactgtaccatattattaacccctaaatcaaactttttttgtcttgtgtatcttgatttttctgtgtgctttatagtgaagcagccgacacgagtcgttgttcataaaacagcttttgaaagttgagagcacacccctggagaaccgactgtgcttgcttacgtttggttcatgacttaaaaatcgagtacaggtgatgaaatcttggcagtgttaacaaaaaagtagtgtgtattgtgctattttttttttactctagaaacttaaccatttgtagagaaaaaggaaacaaattttcacacattgaagttcattctgacataaaattaatgataaataatcatagaaatcaagctttgtattttagcgaacataagtactttcaacaaactcaggtggtgtatcagggagacattttctgggtgtttttgtgtgttttctgtcttagaaaagaatgtgttctaatgcaaggatgtttctctgcaggagttattcctgatgaagctaaagctttgtctctgttggcaccagctaatgcagtggcaggtcttctgcctggtggtggactcctgcctactcctaacccacttacccagattggcgctgttccactggctgctttgggggctcctactcttgatcctgcccttgctgcacttgggcttcctggagcaaacttgaactctcagtctcttgctgcagatcagttgctgaagcttatgagtactgttgatcccaagttgaatcatgtagctgctggtctcgtttcaccaagtctgaaatcggatacctctagtaaagaaatagaggaagctatgaaaagagtacgagaagcacagtccctaatttctgctgctatagaaccagataagaaagaagaaaaaagaaggcattcaagatcaagatcacgttctaggaggaggaggactccctcatcttctagacacaggcggtcaagaagcagatcgagacggcggtcacattctaagtctaggagtcggcgacgatccaaaagcccaaggcggagaagatctcattccagagaaagaggtagaaggtcaaggagcacatcaaaaacaagagacaaaaagaaagaagacaaagaaaagaaacgttctaaaacaccaccaaaaagttacagcacagccagacgttctagaagtgcaagcagagtatatttgaagtaacatggaattcaagagagagagagacgacgacgaagaagcaggagtggcacaagatctcctaaaaagcctcggtctcctaaaagaaaattgtcccgctcaccatcccctaggagacataaaaaggagaagaagaaagataaagacaaagaaagaagtagggatgaaagagaacgatcaacaagcaagaagaagaagagtaaagataaggaaaaggaccgggaaagaaaatcagagagtgataaagatgtaaaacaggttacacgggattatgatgaagaggaacaggggtatgacagtgagaaagagaaaaaagaagagaagaaaccaatagaaacaggttcccctaaaacaaaggaatgttctgtggaaaagggaactggtgattcactaagagaatccaaagtgaatggggatgatcatcatgaagaagacatggatatgagtgactgaatattgcctctgagggagtccaactgtatacctgcatcagtgtcattcctttgtgtgatttcttaatgctgtatttgttcatctcaaacctagatgtatacagctctgagttataaatggttataaagctcctgttactcatattagttatttacatcaaaaagcttttagaaaatggtacgaggtaaccaattcttgtcatggtgaaatctgattgagtaaccaagcagttttactattctggtgctgcttcataacaaaaatgaaaagctgcatgcatctacagcaggcatggattgtttatgtcgtatgatatcctttattaagtaagttcacttatagtatttctataatttgattcattgccgtaatagagccatgtaggaaatgcactgattgcatgttattgtggcaagaatatcctaaatgtcattaaaatcctccaacatgatggatctacttatggtcttgtttgttgacatgacaaattaacattcttatagttacatctggaaatgagcatttgaaatagataatcctttaagccttgtggcaaaatttttgtggcttttgtttaactttgaaaggttattatgcactaaccttttttggtggctaattagggtttaaatacagaaacaagatttcaaataaaactgtctttggcagtgagtaaatagcatattttgaagtagagttgtatactttttcataagatgtttgggaatttttttcctgaagtaataatttattccacatctacatcagtgaaagctatctacctatcctgagtctatcttaaaggaaaaaaagaaaaaaaccttatctcttgcccttattttgaattttccactctttcattaatttgttttaagctccgtgttggaaaaaaggggtagtgcattttaaattgaccttcatacgcttttaaaataagacaaatctacttgataatgtacctttatttgatctcaagttgtataaaaccaataaatttgtgttactgcagtagtaatcttatgcacacggtgatttcatgttatatatgcaaagtaggcaactgttttcttagttacagaagtttcaagcttcacttttgtgcagtagaaacaaaagtaggctacagtctgtgccatgttgatgtacagtttctgaaattgttttacaagactttgataataaaacccttaaacttatgttcatgttcctgtaaaaccgtatttgtatttatttacgctactgaatgtatgacatttacctcattcattttacaaattctttccctttctgtccacatatttcagtatagtaaaaagaggaagtctatcactgtagtgataattgccatcaaaattgtcaaaaatgatttaatttctatccaaaatagtccttttcttagcttagtatcattttattgcttattttttgtgtgggaatggggttggataaagcaatgaactttagtataaacaaatcccacctatatctagcaaatttatattttcggtgaaatacagatatttgcctttctggagtagtatagaagctgtcaatatgtatctactgtacagtactaaatagtattcatttatgaaatgagtagtgtttgggtggctggggttaagggaaaatgagacttggaattgtagcttttatccaagttttgagtataaatagggttttgttttgttttttttaacctaaaaactgaaatgccatatagaaaaacagcattgtttttacagtttgtagtaagtaactttttaaagattttatcaaaaagaattttgtctatagtgagtaaaagaagttctaataatggtcctaatcactgcatttttaaaaaacaaagttcaacacaaatgacatttgttttaaactttagtagataaaaggtgaaccatgtgacatgggcatttttgtaagtcaaaaacaaatttcacatatggtaaacctaatattcacagtgtgttccctcacttgtaatctctgaatacaaatatactagcttttctaaagggaatcatttttttaaaagtagtgccactgacaagatgctacagtgaagattatccattcttaggatatttattttcagtgaacattttctgcacaaaggtagtgttgcactgggacacaagccttttaacagataaccagttgaaatcaaacactgcctccacaccgagttctgttgtgtatttgatagtaaattgatttaaaaataaaagtggtttttgttagaaa

SEQ ID NO: 146 - protein, 285 aa, Homo sapien
MINNHRNQALYFSEHKYFQQTQVVYQGDIFWVFLCVFCLRKECVLMQGCFSAGVIPDEAKALSLLAPANAVAGLLPGGGLLPTPNPLTQIGAVPLAALGAPTLDPALAALGLPGANLNSQSLAADQLLKLMSTVDPKLNHVAAGLVSPSLKSDTSSKEIEEAMKRVREAQSLISAAIEPDKKEEKRRHSRSRSRSRRRRTPSSSRHRRSRSRSRRRSHSKSRSRRRSKSPRRRRSHSRERGRRSRSTSKTRDKKKEDKEKKRSKTPPKSYSTARRSRSASRVYLK

SEQ ID NO: 147 - DNA, 4294 bp, Homo sapien
cgccagtatgttggagttggtggtggcttaagttttgaagggaggtagcatccgttggatatccacaccatccttctcgctgcaggctttcttggactccgtactgttggtgtaaccaaggcctggaggtctgggtggctcaggtttcctgcagccatgtttctgtacaacttaaccttgcagagagccactggcatcagctttgccattcatggaaacttttctggaaccaaacaacaagaaattgttgtttcccgtgggaagatcttggagctgcttcgcccagaccccaacactggcaaagtacataccctactcactgtggaagtattcggtgttatccggtcactcatggcctttaggctgacaggtggcaccaaagactacattgtagttggcagtgactctggtcgaattgttattttggaataccagccatctaagaatatgtttgagaagattcaccaagaaacctttggcaagagtggatgccgtcgcatcgttcctggccagttcttagctgtggatcccaaagggcgagccgttatgattagtgccattgagaaacagaaattggtgtatattttgaacagagatgctgcagcccgacttaccatttcatctcccctggaagcccacaaagcaaacactttagtgtatcatgtagttggagtagatgtcggatttgaaaatccaatgtttgcttgtctggaaatggattatgaggaagcagacaatgatccaacaggggaagcagcagctaatacccagcagacacttactttctatgagctagaccttggtttaaatcatgtggtccgaaaatacagtgaacctttggaggaacacggcaacttccttattacagttcctggagggtcagatggtccaagtggagtactgatctgctctgaaaactatattacttacaagaactttggtgaccagccagatatccgctgtccaattcccaggaggcggaatgacctggatgaccctgaaagaggaatgatttttgtctgctctgcaacccataaaaccaaatcgatgttcttctttttggctcaaactgagcagggagatatctttaagatcactttggagacagatgaagatatggttactgagatccggctcaaatattttgatactgtacccgttgctgctgccatgtgtgtgcttaaaacagggttcctttttgtagcatcagaatttggaaaccattacttatatcaaattgcacatcttggagatgatgatgaagaacctgagttttcatcagccatgcctctggaagaaggagacacattcttttttcagccaagaccacttaaaaaccttgtgctggttgatgagttggacagcctctctcccattctgttttgccagatagctgatctggccaatgaagatactccacagttgtatgtggcctgtggtaggggaccccgatcatctctgagagtcctaagacatggacttgaggtgtcagaaatggctgtttctgagctacctggtaaccccaacgctgtctggacagtgcgtcgacacattgaagatgagtttgatgcctacatcattgtgtctttcgtgaatgccaccctagtgttgtccattggagaaactgtagaagaagtgactgactctgggttcctggggaccaccccgaccttgtcctgctccttattaggagatgatgccttggtgcaggtctatccagatggcattcggcacatacgagcagacaagagagtcaatgagtggaagacccctggaaagaaaacaattgtgaagtgtgcagtgaaccagcgacaagtggtgattgccctgacaggaggagagctggtctatttcgagatggatccttcaggacagctgaatgagtacacagaacggaaggagatgtcagcagatgtggtgtgcatgagtctggccaatgtaccccctggagagcagcggtctcgcttcctggctgtggggcttgtggacaacactgtcagaatcatctccctggatccctcagactgtttgcaacctctaagcatgcaggctctcccagcccagcctgagtccttgtgtatcgtggaaatgggtgggactgagaagcaggatgagctgggtgagaggggctcgattggcttcctatacctgaatattgggctacagaacggtgtgctgctgaggactgtcttggaccctgtcactggggatttgtctgatactcgcactcggtacctggggtcccgtcctgtgaagctcttccgagtccgaatgcaaggccaggaggcagtattggccatgtcaagccgctcatggttgagctattcttaccaatctcgcttccatctcaccccactgtcttacgagacactggaatttgcatcgggttttgcctcggaacagtgtcccgagggcattgtggccatctccaccaacaccctacggattttggcattagagaagctcggtgctgtcttcaatcaagtagccttcccactgcagtacacacccaggaaatttgtcatccaccctgagagtaacaaccttattatcattgaaacggaccacaatgcctacactgaggccacgaaagctcagagaaagcagcagatggcagaggaaatggtggaagcagcaggggaggatgagcgggagctggccgcagagatggcagcagcattcctcaatgaaaacctccctgaatccatctttggagctcccaaggctggcaatgggcagtgggcctctgtgatccgagtgatgaatcccattcaagggaacacactggaccttgtccagctggaacagaatgaggcagcttttagtgtggctgtgtgcaggttttccaacactggtgaagactggtatgtgctggtgggtgtggccaaggacctgatactaaacccccgatctgtggcagggggcttcgtctatacttacaagcttgtgaacaatggggaaaaactggagtttttgcacaagactcctgtggaagaggtccctgctgctattgccccattccaggggagggtgttgattggtgtggggaagctgttgcgtgtctatgacctgggaaagaagaagttactccgaaaatgtgagaataagcatattgccaattatatctctgggatccagactattggacatagggtaattgtatctgatgtccaagaaagtttcatctgggttcgctacaagcgtaatgaaaaccagcttatcatctttgctgatgatacctacccccgatgggtcactacagccagcctcctggactatgacactgtggctggggcagacaagtttggcaacatatgtgtggtgaggctcccacctaacaccaatgatgaagtagatgaggatcctacaggaaacaaagccctgtgggaccgtggcttgctcaatggggcctcccagaaggcagaggtgatcatgaactaccatgtcggggagacggtgctgtccttgcagaagaccacgctgatccctggaggctcagaatcacttgtctataccaccttgtctggaggaattggcatccttgtgccattcacgtcccatgaggaccatgacttcttccagcatgtggaaatgcacctgcggtctgaacatccccctctctgtgggcgggaccacctcagctttcgctcctactacttccctgtgaagaatgtgattgatggagacctctgtgagcagttcaattccatggaacccaacaaacaaaagaacgtctctgaagaactggaccgaaccccacccgaagtgtccaagaaactcgaggatatccggacccgctacgccttctgagccctcctttcccggtggggcttgccagagactgtgtgttttgtttcccccaccaccatcactgccacctggcttctgccatgtggcaggagggtgactggataattaagactgcattatgaaagtcaacagctctttcccctcagctcttctcctggaatgactggcttcccctcaaattggcactgagatttgctacacttctccccacctggtacatgatacatgaccccaggttccagtgtagaacctgagtcccccattccccaaagccatccctgcattgatatgtcttgactctcctgtctacttttgcacacacccttaatttttaattggttttcttgtaaatacagttttgtacaatgttatctctgtgggaggaaggaggcaggctgtggtgggactgggtagggtatagtatcactcctgagttccactgctctagaatctaaccagaaatagaaacctagtttttaaggtg

SEQ ID NO: 148 - protein, 1217 aa, Homo sapien
MFLYNLTLQRATGISFAIHGNFSGTKQQEIVVSRGKILELLRPDPNTGKVHTLLTVEVFGVIRSLMAFRLTGGTKDYIVVGSDSGRIVILEYQPSKNMFEKIHQETFGKSGCRRIVPGQFLAVDPKGRAVMISAIEKQKLVYILNRDAAARLTISSPLEAHKANTLVYHVVGVDVGFENPMFACLEMDYEEADNDPTGEAAANTQQTLTFYELDLGLNHVVRKYSEPLEEHGNFLITVPGGSDGPSGVLICSENYITYKNFGDQPDIRCPIPRRRNDLDDPERGMIFVCSATHKTKSMFFFLAQTEQGDIFKITLETDEDMVTEIRLKYFDTVPVAAAMCVLKTGFLFVASEFGNHYLYQIAHLGDDDEEPEFSSAMPLEEGDTFFFQPRPLKNLVLVDELDSLSPILFCQIADLANEDTPQLYVACGRGPRSSLRVLRHGLEVSEMAVSELPGNPNAVWTVRRHIEDEFDAYIIVSFVNATLVLSIGETVEEVTDSGFLGTTPTLSCSLLGDDALVQVYPDGIRHIRADKRVNEWKTPGKKTIVKCAVNQRQVVIALTGGELVYFEMDPSGQLNEYTERKEMSADVVCMSLANVPPGEQRSRFLAVGLVDNTVRIISLDPSDCLQPLSMQALPAQPESLCIVEMGGTEKQDELGERGSIGFLYLNIGLQNGVLLRTVLDPVTGDLSDTRTRYLGSRPVKLFRVRMQGQEAVLAMSSRSWLSYSYQSRFHLTPLSYETLEFASGFASEQCPEGIVAISTNTLRILALEKLGAVFNQVAFPLQYTPRKFVIHPESNNLIIIETDHNAYTEATKAQRKQQMAEEMVEAAGEDERELAAEMAAAFLNENLPESIFGAPKAGNGQWASVIRVMNPIQGNTLDLVQLEQNEAAFSVAVCRFSNTGEDWYVLVGVAKDLILNPRSVAGGFVYTYKLVNNGEKLEFLHKTPVEEVPAAIAPFQGRVLIGVGKLLRVYDLGKKKLLRKCENKHIANYISGIQTIGHRVIVSDVQESFIWVRYKRNENQLIIFADDTYPRWVTTASLLDYDTVAGADKFGNICVVRLPPNTNDEVDEDPTGNKALWDRGLLNGASQKAEVIMNYHVGETVLSLQKTTLIPGGSESLVYTTLSGGIGILVPFTSHEDHDFFQHVEMHLRSEHPPLCGRDHLSFRSYYFPVKNVIDGDLCEQFNSMEPNKQKNVSEELDRTPPEVSKKLEDIRTRYAF

SEQ ID NO: 149 - DNA, 2811 bp, Homo sapien
ggcacgaggggagcgcttgtttgctgcctcgtactcctccatttatccgccatgataagtgccagccgagctgcagcagcccgtctcgtgggcgccgcagcctcccggggccctacggccgcccgccaccaggatagctggaatggccttagtcatgaggcttttagacttgtttcaaggcgggattatgcatcagaagcaatcaagggagcagttgttggtattgatttgggtactaccaactcctgcgtggcagttatggaaggtaaacgagcaaaggtgctggagaatgccgaaggtgccagaaccaccccttcagttgtggcctttacagcagatggtgagcgacttgttggaatgccggccaagcgacaggctgtcaccaacccaaacaatacattttatgctaccaagcgtctcattggccggcgatatgatgatcctgaagtacagaaagacattaaaaatgttccctttaaaattgtccgtgcctccaatggtgatgcctgggttgaggctcatgggaaattgtattctccgagtcagattggagcatttgtgttgatgaagatgaaagagactgcagaaaattacttggggcgcacagcaaaaaatgctgtgatcacagtcccagcttatttcaatgactcgcagagacaggccactaaagatgctggccagatatctggactgaatgtgcttcgggtgattaatgagcccacagctgctgctcttgcctatggtctagacaaatcagaagacaaagtcattgctgtatatgatttaggtggtggaacttttgatatttctatcctggaaattcagaaaggagtatttgaggtgaaatccacaaatggggataccttcttaggtggggaagactttgaccaggccttgctacggcacattgtgaaggagttcaagagagagacaggggttgatttgactaaagacaacatggcacttcagagggtacgggaagctgctgaaaaggctaagtgtgaactctcctcatctgtgcagactgacatcaatttgccctatcttacaatggattcttctggacccaagcatttgaatatgaagttgacccgtgctcaatttgaagggattgtcactgatctaatcagaaggactatcgctccatgccaaaaagctatgcaagatgcagaagtcagcaagagtgacataggagaagtgattcttgtgggtggcatgactaggatgcccaaggttcagcagactgtacaggatctttttggcagagccccaagtaaagctgtcaatcctgatgaggctgtggccattggagctgccattcagggaggtgtgttggccggcgatgtcacggatgtgctgctccttgatgtcactcccctgtctctgggtattgaaactctaggaggtgtctttaccaaacttattaataggaataccactattccaaccaagaagagccaggtattctctactgccgctgatggtcaaacgcaagtggaaattaaagtgtgtcagggtgaaagagagatggctggagacaacaaactccttggacagtttactttgattggaattccaccagcccctcgtggagttcctcagattgaagttacatttgacattgatgccaatgggatagtacatgtttctgctaaagataaaggcacaggacgtgagcagcagattgtaatccagtcttctggtggattaagcaaagatgatattgaaaatatggttaaaaatgcagagaaatatgctgaagaagaccggcgaaagaaggaacgagttgaagcagttaatatggctgaaggaatcattcacgacacagaaaccaagatggaagaattcaaggaccaattacctgctgatgagtgcaacaagctgaaagaagagatttccaaaatgagggagctcctggctagaaaagacagcgaaacaggagaaaatattagacaggcagcatcctctcttcagcaggcatcattgaagctgttcgaaatggcatacaaaaagatggcatctgagcgagaaggctctggaagttctggcactggggaacaaaaggaagatcaaaaggaggaaaaacagtaataatagcagaaattttgaagccagaaggacaacatatgaagcttaggagtgaagagacttcctgagcagaaatgggcgaacttcagtctttttactgtgtttttgcagtattctatatataatttccttaatttgtaaatttagtgaccattagctagtgatcatttaatggacagtgattctaacagtataaagttcacaatattctatgtccctagcctgtcatttttcagctgcatgtaaaaggaggtaggatgaattgatcattataaagatttaactattttatgctgaagtgaccatattttcaaggggtgaaaccatctcgcacacagcaatgaaggtagtcatccatagacttgaaatgagaccacatatggggatgagatccttctagttagcctagtactgctgtactggcctgtatgtacatggggtccttcaactgaggccttgcaagtcaagctggctgtgccatgtttgtagatggggcagaggaatctagaacaatgggaaacttagctatttatattaggtacagctattaaaacaaggtaggaatgaggctagacctttaacttccctaaggcatacttttctagctaccttctgccctgtgtctggcacctacatccttgatgattgttctcttacccattctggaattttttttttttttaaataaatacagaaagcatcttgaaaaaaaaaaaaaaaaaa

SEQ ID NO: 150 - protein, 679 aa, Homo sapien
MISASRAAAARLVGAAASRGPTAARHQDSWNGLSHEAFRLVSRRDYASEAIKGAVVGIDLGTTNSCVAVMEGKRAKVLENAEGARTTPSVVAFTADGERLVGMPAKRQAVTNPNNTFYATKRLIGRRYDDPEVQKDIKNVPFKIVRASNGDAWVEAHGKLYSPSQIGAFVLMKMKETAENYLGRTAKNAVITVPAYFNDSQRQATKDAGQISGLNVLRVINEPTAAALAYGLDKSEDKVIAVYDLGGGTFDISILEIQKGVFEVKSTNGDTFLGGEDFDQALLRHIVKEFKRETGVDLTKDNMALQRVREAAEKAKCELSSSVQTDINLPYLTMDSSGPKHLNMKLTRAQFEGIVTDLIRRTIAPCQKAMQDAEVSKSDIGEVILVGGMTRMPKVQQTVQDLFGRAPSKAVNPDEAVAIGAAIQGGVLAGDVTDVLLLDVTPLSLGIETLGGVFTKLINRNTTIPTKKSQVFSTAADGQTQVEIKVCQGEREMAGDNKLLGQFTLIGIPPAPRGVPQIEVTFDIDANGIVHVSAKDKGTGREQQIVIQSSGGLSKDDIENMVKNAEKYAEEDRRKKERVEAVNMAEGIIHDTETKMEEFKDQLPADECNKLKEEISKMRELLARKDSETGENIRQAASSLQQASLKLFEMAYKKMASEREGSGSSGTGEQKEDQKEEKQ

SEQ ID NO: 151 - DNA, 1153 bp, Homo sapien
gccgccgccgccatgaacattttccggctgactggggacctgtcccacctggcggccatcgtcatcctgctgctgaagatctggaagacgcgctcctgcgccggtatttctgggaaaagccagcttctgtttgcactggtcttcacaactcgttacctggatctttttacttcatttatttcattgtataacacatctatgaaggttatctaccttgcctgctcctatgccacagtgtacctgatctacctgaaatttaaggcaacctacgatggaaatcatgataccttccgagtggagtttctggtggtccctgtgggaggcctctcatttttagttaatcacgatttctctcctcttgagatcctctggaccttctccatctacctggagtccgtggctatccttccgcagctgtttatgatcagcaagactggggaggccgagaccatcaccacccactacctgttcttcctgggcctctatcgtgctttgtatcttgtcaactggatctggcgcttctactttgagggcttctttgacctcattgctgtggtggccggcgtagtccagaccatcctatactgtgacttcttctacttgtacattacaaaagtactcaagggaaagaagctcagtttgccagcataagtgccaaagaccatcaccagcatctgtccttcagggtgctcggacagaattcttaccacagcaaaggcataagatgcttgatacggaaaatcagaaacttaactcttttgttgcagatagtcatcagtggctctgtaaaaacgcagaggaaaagagccagaaggtttctgtttaatgcatcttgccttatctttttttattactgtgtacaaagatttttttacacaaagaaacttaatgctgtattaataaattcagtgtgtagcttcaattgggatagttccaaaagtgaagattttgtgaggaataagtgcaaattttttttttattttaaaaaattctttgaaactcttaagtctttgtgtctgcaatgaaattgtactccttgacagttgatagattatgtattcttccatccctcaaacttgcattccactatatttattttttggcaaaagatgagctgtatttgtttgaaatctgagacactatgttcaattgg

SEQ ID NO: 152 - protein, 212 aa, Homo sapien
MNIFRLTGDLSHLAAIVILLLKIWKTRSCAGISGKSQLLFALVFTTRYLDLFTSFISLYNTSMKVIYLACSYATVYLIYLKFKATYDGNHDTFRVEFLVVPVGGLSFLVNHDFSPLEILWTFSIYLESVAILPQLFMISKTGEAETITTHYLFFLGLYRALYLVNWIWRFYFEGFFDLIAVVAGVVQTILYCDFFYLYITKVLKGKKLSLPA

SEQ ID NO: 153 - DNA, 643 bp, Homo sapien
ggtagcgacggtagctctagccgggcctgagctgtgctagcacctcccccaggagaccgttgcagtcggccagcccccttctccacggtaaccatgtgcgaccgaaaggccgtgatcaaaaatgcggacatgtcggaagagatgcaacaggactcggtggagtgcgctactcaggcgctggagaaatacaacatagagaaggacattgcggctcatatcaagaaggaatttgacaagaagtacaatcccacctggcattgcatcgtggggaggaacttcggtagttatgtgacacatgaaaccaaacacttcatctacttctacctgggccaagtggccattcttctgttcaaatctggttaaaagcatggactgtgccacacacccagtgatccatccagaaacaaggactgcagcctaaattccaaataccagagactgaaattttcagccttgctaagggaacatctcgatgtttgaacctttgttgtgttttgtacagggcattctctgtactagtttgtcgtggttataaaacaattagcagaatagcctacatttgtatttattttctattccatacttctgcccacgttgttttctctcaaaatccattcctttaaaaaataaatctgatgcaccg

SEQ ID NO: 154 - protein, 89 aa, Homo sapien
MCDRKAVIKNADMSEEMQQDSVECATQALEKYNIEKDIAAHIKKEFDKKYNPTWHCIVGRNFGSYVTHETKHFIYFYLGQVAILLFKSG

SEQ ID NO: 155 - DNA, 2368 bp, Homo sapien
gtttctctccctgcccccgcgacttcgcgcaagatccgggaaggacacccgaggcccctgggagaccctggggaggtgaaagtcagagagcgaagcgggccgtggcccctaggcctgacccctccccgcggggtaaggcgggcaccccgcgagcgcaggggtcctcttactgctgatggcacccagctctgggcccagacgccgctcaccgtccaccgccggtgctgggtaaaatgtcggttccaggaccttaccaggcggccactgggccttcctcagcaccatccgcacctccatcctatgaagagacagtggctgttaacagttattaccccacacctccagctcccatgcctgggccaactacggggcttgtgacggggcctgatgggaagggcatgaatcctccttcgtattatacccagccagcgcccatccccaataacaatccaattaccgtgcagacggtctacgtgcagcaccccatcacctttttggaccgccctatccaaatgtgttgtccttcctgcaacaagatgatcgtgagtcagctgtcctataacgccggtgctctgacctggctgtcctgcgggagcctgtgcctgctggggtgcatagcgggctgctgcttcatccccttctgcgtggatgccctgcaggacgtggaccattactgtcccaactgcagagctctcctgggcacctacaagcgtttgtaggactcagccagacgtggagggagccgggtgccgcaggaagtcctttccacctctcatccagcttcacgcctggtggaggttctgccctggtggtctcacctctccagggggcccaccttcatgtcttcttttggggggaatacgtcgcaaaactaacaaatctccaaaccccagaaattgctgcttggagtcgtgcataggacttgcaaagacattccccttgagtgtcagttccacggtttcctgcctccctgagaccctgagtcctgccatctaactgtgatcattgccctatccgaatatcttcctgtgatctgccatcagtggctcttttttcctgcttccatgggcctttctggtggcagtctcaaactgagaagccacagttgccttatttttgaggctgttctgcccagagctcggctgaaccagcctttagtgcctaccattatcttatccgtctcttcccgtccctgatgacaaagatcttgccttacagactttacaggcttggctttgagattctgtaactgcagacttcattagcacacagattcactttaatttcttaattttttttttaaatacaaggagggggctattaacacccagtacagacatatccacaaggtcgtaaatgcatgctagaaaaatagggctggatcttatcactgccctgtctccccttgtttctctgtgccagatcttcagtgcccctttccatacagggatttttttctcatagagtaattatatgaacagtttttatgacctccttttggtctgaaatacttttgaacagaatttcttttttttaaaaaaaaacagagatggggtcttactatgttgcccaggctggtgtcgaactcctgggctcaagcgatccttctgccttggcctcccgaagtgctgggattgcaggcataagctaccatgctgggcctgaacataatttcaagaggaggatttataaaaccattttctgtaatcaaatgattggtgtcattttcccatttgccaatgtagtctcacttaaaaaaaaaaaaaagaaaaagaaatggataatttcatctactgcctttacttggggttaatgtgattcttaaacaccttcatcatggaactctcagagtggggtccgttttggtttcctggtggtgggttttgaaagataagggaaagcacattttgagcatgtctgggtaccatggtgcggatgcttgggaaccagaactgtttcagaggaatctaaagtctgattttagttttcagagacacagcttgttgtaaaacatgagaagacatgatttctaggactcaagcagcaagccaggattctaggttggctgctgtgtcatctttgaagtcaagacaaagctgggctcgaccttcaagggtcctcgttttgataatacttcagaatagggaactcatgtgaatactactatgtagaaataaaacctagaccttgagcgaacatctgtatattggttgaaaacgatagtggtaaccattgatcccccttcatttgatgtttggaaaattccagtaattatcatttttgcaacgaatatggataccacatagtactttggtgttacctgcttttgaaaaataaagtctttggttcacccggtaaaaaaaaaaaa

SEQ ID NO: 156 - protein, 161 aa, Homo sapien
MSVPGPYQAATGPSSAPSAPPSYEETVAVNSYYPTPPAPMPGPTTGLVTGPDGKGMNPPSYYTQPAPIPNNNPITVQTVYVQHPITFLDRPIQMCCPSCNKMIVSQLSYNAGALTWLSCGSLCLLGCIAGCCFIPFCVDALQDVDHYCPNCRALLGTYKRL

SEQ ID NO: 157 - DNA, 1773 bp, Homo sapien
gtttctctccctgcccccgcgacttcgcgcaagatccgggaaggacacccgaggcccctgggagaccctggggaggtgaaagtcagagagcgaagcgggccgtggcccctaggcctgacccctccccgcggggtaaggcgggcaccccgcgagcgcaggggtcctcttactgctgatggcacccagctctgggcccagacgccgctcaccgtccaccgccggtgctgggtaaaatgtcggttccaggaccttaccaggcggccactgggccttcctcagcaccatccgcacctccatcctatgaagagacagtggctgttaacagttattaccccacacctccagctcccatgcctgggccaactacggggcttgtgacggggcctgatgggaagggcatgaatcctccttcgtattatacccagccagcgcccatccccaataacaatccaattaccgtgcagacggtctacgtgcagcaccccatcacctttttggaccgccctatccaaatgtgttgtccttcctgcaacaagatgatcgtgagtcagctgtcctataacgccggtgctctgacctggctgtcctgcgggagcctgtgcctgctgggggtgcatagcgggctgctgcttcatccccttctgcgtggatgccctgcaggacgtggaccattactgtcccaactgcagagctctcctgggcacctacaagcgtttgtaggactcagccagacgtggagggagccgggtgccgcaggaagtcctttccacctctcatccagcttcacgcctggtggaggttctgccctggtggtctcacctctccagggggcccaccttcatgtcttcttttggggggaatacgtcgcaaaactaacaaatctccaaaccccagaaattgctgcttggagtcgtgcataggacttgcaaagacattccccttgagtgtcagttccacggtttcctgcctccctgagaccctgagtcctgccatctaactgtgatcattgccctatccgaatatcttcctgtgatctgccatcagtggctcttttttcctgcttccatgggcctttctggtggcagtctcaaactgagaagccacagttgccttatttttgaggctgttctgcccagagctcggctgaaccagcctttagtgcctaccattatcttatccgtctcttcccgtccctgatgacaaagatcttgccttacagactttacaggcttggctttgagattctgtaactgcagacttcattagcacacagattcactttaatttcttaattttttttttaaatacaaggagggggctattaacacccagtacagacatatccacaaggtcgtaaatgcatgctagaaaaatagggctggatcttatcactgccctgtctccccttgtttctctgtgccagatcttcagtgcccctttccatacagggatttttttctcatagagtaattatatgaacagtttttatgacctccttttggtctgaaatacttttgaacagaatttcttttttttaaaaaaaaacagagatggggtcttactatgttgcccaggctggtgtcgaactcctgggctcaagcgatccttctgccttggcctcccgaagtgctgggattgcaggcataagctaccatgctgggcctgaacataatttcaagaggaggatttataaaaccattttctgtaatcaaatgattggtgtcattttcccatttgccaatgtagtctcacttaaaaaaaaaaaaaaaaaaa

SEQ ID NO: 158 - protein, 228 aa, Homo sapien
MSVPGPYQAATGPSSAPSAPPSYEETVAVNSYYPTPPAPMPGPTTGLVTGPDGKGMNPPSYYTQPAPIPNNNPITVQTVYVQHPITFLDRPIQMCCPSCNKMIVSQLSYNAGALTWLSCGSLCLLGVHSGLLLHPLLRGCPAGRGPLLSQLQSSPGHLQAFVGLSQTWREPGAAGSPFHLSSSFTPGGGSALVVSPLQGAHLHVFFWGEYVAKLTNLQTPEIAAWSRA

SEQ ID NO: 159 - DNA, 1142 bp, Homo sapien
cttttccaagcggctgccgaagatggcggaggtgcaggtcctggtgcttgatggtcgaggccatctcctgggccgcctggcggccatcgtggctaaacaggtactgctgggccggaaggtggtggtcgtacgctgtgaaggcatcaacatttctggcaatttctacagaaacaagttgaagtacctggctttcctccgcaagcggatgaacaccaacccttcccgaggcccctaccacttccgggcccccagccgcatcttctggcggaccgtgcgaggtatgctgccccacaaaaccaagcgaggccaggccgctctggaccgtctcaaggtgtttgacggcatcccaccgccctacgacaagaaaaagcggatggtggttcctgctgccctcaaggtcgtgcgtctgaagcctacaagaaagtttgcctatctggggcgcctggctcacgaggttggctggaagtaccaggcagtgacagccaccctggaggagaagaggaaagagaaagccaagatccactaccggaagaagaaacagctcatgaggctacggaaacaggccgagaagaacgtggagaagaaaattgacaaatacacagaggtcctcaagacccacggactcctggtctgagcccaataaagactgttaattcctcatgcgttgcctgcccttcctccattgttgccctggaatgtacgggacccaggggcagcagcagtccaggtgccacaggcagccctgggacataggaagctgggagcaaggaaagggtcttagtcactgcctcccgaagttgcttgaaagcactcggagaattgtgcaggtgtcatttatctatgaccaataggaagagcaaccagttactatgagtgaaagggagccagaagactgattggagggccctatcttgtgagtggggcatctgttggactttccacctggtcatatactctgcagctgttagaatgtgcaagcacttggggacagcatgagcttgctgttgtacacagggtatttctagaagcagaaatagactgggaagatgcacaaccaaggggttacaggcatcgcccatgctcctcacctgtattttgtaatcagaaataaattgcttttaaagaaaaaaaaaaaaaaaaaa

SEQ ID NO: 160 - protein, 203 aa, Homo sapien [sequence omitted]

SEQ ID NO: 161 - DNA, 2038 bp, Homo sapien
gcgccctctcctataaagcagacgccgcgccgcgctgcgacgctgtagtggcttcgtcttcggtttttctcttccttcgctaacgcctcccggctctcgtcagcctcccgccggccgtctccttaacaccgaacaccatgccttcaattaagttgcagagttctgatggagagatatttgaagttgatgtggaaattgccaaacaatctgtgactattaagaccatgttggaaggtcatcctttctgcattgtctgaattagtgagggtcgttctctcattaaatggataaaatcataagatttgggaatggatgatgaaggagatgatgacccagttcctctaccaaatgtgaatgcagcaatattaaaaaaggtcattcagtggtgcacccaccacaaggatgaccctcctcctcctgaagatgatgagaacaaagaaaagcgaacagatgatatccctgtttgggaccaagaattcctgaaagttgaccaaggaacactttttgaactcattctggctgcaaactacttagacatcaaaggtttgcttgatgttacatgcaagactgttgccaatatgatcaaggggaaaactcctgaggagattcgcaagaccttcaatatcaaaaatgactttactgaagaggaggaagcccaggtacgcaaagagaaccagtggtgtgaagagaagtgaaatgttgtgcctgacactgtaacactgtaaggattgttccaaatactagttgcactgctctgtttataattgttaatattagacaaacagtagacaaatgcagcagcaagtcaattgtattagcagaatattgtcctcattgcatgtgtagtttgagcacagatcccaaaccttacggccaagtttcttctagtatgatggaaagtttcttttttctttgctctgaataaaactgaactgtgggttctctataagtggcattttgggctttccctcttttttgtaaagcaatgtctgcctagtttattgtccagttaactttagtgaccttttaaaagttggcattgtaaataaaacaacttgcaaaaaagttttctggaatagaattaacaaaatattatctttattcatgagttggaaactggaaaaaggcttcttgaagtaaatgttctgagtggagctactaggatgtcttccagcctcctgcagtcaaggagtaccactgtattgattagcctgtatgtagcagggctcccttcattgcatctgaggacttgttttctttttctttatttttaatcctcttagttttaaatatattgcctagagactcagttactacccagtttgtggttttttgggagaaatgtaactggacagttagcttttcaattaaaaagacacttaacccatgtgggatgtcatctttttataattagtgttcccatgtggagaaaattattcacactacttgcatgtaaagaataatttaacttttaacattaaaatatgtggtaaaacccagaaagcatccatcatgaatgcaagatactttcaataaaaagtaagttatatagtaggtagttaagtttgcttttgtggacttaaatgtgtctcttcacttaaatgggttgaatgtgtatatatttgttcagcttgaaaagacttagtttatatcctagctcactggaggctgctgacataaccataacttctgtcccttctaattgtcatttatatgcctaactggagctagtactttaattcttaacacaaaattactctgccattgtttccagcttccctcctacaatagaatgaagtttttttgatggcttgagatggctcacaaattttgatttttttttcttccttgtgctccctttttttctccttgcttttccagttaacatctatattcacatgtaatcttgttttctcttcacattcactgagttgttcaggctcagatcatcccttgacagtagtttgccttcatctcacctttcatttgtccccaaattcaccttatttaataaagtcccatatgttgtctcacttaa

SEQ ID NO: 162 - protein, 128 aa, Homo sapien
MDDEGDDDPVPLPNVNAAILKKVIQWCTHHKDDPPPPEDDENKEKRTDDIPVWDQEFLKVDQGTLFELILAANYLDIKGLLDVTCKTVANMIKGKTPEEIRKTFNIKNDFTEEEEAQVRKENQWCEEK

SEQ ID NO: 163 - DNA, 3477 bp, Homo sapien
cagagggctgctggctggctaagtccctcccgctcccggctctcgcctcactaggagcggctctcggtgcagcgggacagggcgaagcggcctgcgcccacggagcgcgcgacactgcccggaagggaccgccacccttgccccctcagctgcccactcgtgatttccagcggcctccgcgcgcgcacgatgccctcggccaccagccacagcgggagcggcagcaagtcgtccggaccgccaccgccgtcgggttcctccgggagtgaggcggccgcgggagccggggccgccgcgccggcttctcagcaccccgcaaccggcaccggcgctgtccagaccgaggccatgaagcagattctcggggtgatcgacaagaaacttcggaacctggagaagaaaaagggtaagcttgatgattaccaggaacgaatgaacaaaggggaaaggcttaatcaagatcagctggatgccgtttctaagtaccaggaagtcacaaataatttggagtttgcaaaagaattacagaggagtttcatggcactaagtcaagatattcagaaaacaataaagaagacagcacgtcgggagcagcttatgagagaagaagctgaacagaaacgtttaaaaactgtacttgagctacagtatgttttggacaaattgggagatgatgaagtgcggactgacctgaaacaaggtttgaatggagtgccaatattgtccgaagaggagttgtcattgttggatgaattctataagctagtagaccctgaacgggacatgagcttgaggttgaatgaacagtatgaacatgcctccattcacctgtgggacctgctggaagggaaggaaaaacctgtatgtggaaccacctataaagttctaaaggaaattgttgagcgtgtttttcagtcaaactactttgacagcacccacaaccaccagaatgggctgtgtgaggaagaagaggcagcctcagcacctgcagttgaagaccaggtacctgaagctgaacctgagccagcagaagagtacactgagcaaagtgaagttgaatcaacagagtatgtaaatagacagttcatggcagaaacacagttcaccagtggtgaaaaggagcaggtagatgagtggacagttgaaacggttgaggtggtaaattcactccagcagcaacctcaggctgcatccccttcagtaccagagccccactctttgactccagtggctcaggcagatccccttgtgagaagacagcgagtacaagaccttatggcacaaatgcagggtccctataatttcatacaggattcaatgctggattttgaaaatcagacacttgatcctgccattgtatctgcacagcctatgaatccaacacaaaacatggacatgccccagctggtttgccctccagttcattctgaatctagacttgctcagcctaatcaagttcctgtacaaccagaagcgacacaggttcctttggtatcatccacaagtgaggggtacacagcatctcaacccttgtaccagccttctcatgctacagagcaacgaccacagaaggaaccaattgatcagattcaggcaacaatctctttaaatacagaccagactacagcatcatcatcccttcctgctgcgtctcagcctcaagtatttcaggctgggacaagcaaacctttacatagcagtggaatcaatgtaaatgcagctccattccaatccatgcaaacggtgttcaatatgaatgccccagttcctcctgttaatgaaccagaaactttaaaacagcaaaatcagtaccaggccagttataaccagagcttttctagtcagcctcaccaagtagaacaaacagagcttcagcaagaacagcttcaaacagtggttggcacttaccatggttccccagaccagtcccatcaagtgactggtaaccaccagcagcctcctcagcagaacactggatttccacgtagcaatcagccctattacaatagtcgtggtgtgtctcgtggaggctcccgtggtgctagaggcttgatgaatggataccggggccctgccaatggattcagaggaggatatgatggttaccgcccttcattctctaacactccaaacagtggttatacacagtctcagttcagtgctccccgggattactctggctatcaacgggatggatatcagcagaatttcaagcgaggctctgggcagagtggaccacggggagccccacgaggtcgtggagggcccccaagacccaacagagggatgccgcaaatgaacactcagcaagtgaattaatctgattcacaggattatgtttaatcgccaaaaacacactggccagtgtaccataatatgttaccagaagagttattatctatttgttctccctttcaggaaacttattgtaaagggactgttttcatcccataaagacaggactacaattgtcagctttctattacctggatatggaaggaaactatttttactctgcatgttctgtcctaagcgtcatcttgagccttgcacatgatactcagattcctcacccttgcttaggagtaaaacaatatactttacagggtgataataatctccatagttatttgaagtggcttgaaaaaggcaagattgacttttatgacattggataaaatctacaaatcagccctcgagttattcaatgataactgacaaactaaattatttccctagaaaggaagatgaaaggagtggagtgtggtttggcagaacaactgcatttcacagcttttccagttaaattggagcactgaacgttcagatgcataccaaattatgcatgggtcctaatcacacatataaggctggctaccagctttgacacagcactgttcatctggccaaacaactgtggttaaaaacacatgtaaaatgctttttaacagctgatactgtataagacaaagccaagatgcaaaattaggctttgattggcactttttgaaaaatatgcaacaaatatgggatgtaatccggatggccgcttctgtacttaatgtgaaatatttagatacctttttgaacacttaacagtttctttgagacaatgacttttgtaaggattggtactatctatcattccttatgacatgtacattgtctgtcactaatccttggattttgctgtattgtcacctaaattggtacaggtactgatgaaaatctctagtggataatcataacactctcggtcacatgtttttccttcagcttgaaagcttttttttaaaaggaaaagataccaaatgcctgctgctaccacccttttcaattgctatcttttgaaaggcaccagtatgtgttttagattgatttccctgtttcagggaaatcacggacagtagtttcagttctgatggtataagcaaaacaaataaaacgtttataaaagttaaaaaaaaaaaaaaaaaa

SEQ ID NO: 164 - protein, 656 aa, Homo sapien
MKQILGVIDKKLRNLEKKKGKLDDYQERMNKGERLNQDQLDAVSKYQEVTNNLEFAKELQRSFMALSQDIQKTIKKTARREQLMREEAEQKRLKTVLELQYVLDKLGDDEVRTDLKQGLNGVPILSEEELSLLDEFYKLVDPERDMSLRLNEQYEHASIHLWDLLEGKEKPVCGTTYKVLKEIVERVFQSNYFDSTHNHQNGLCEEEEAASAPAVEDQVPEAEPEPAEEYTEQSEVESTEYVNRQFMAETQFTSGEKEQVDEWTVETVEVVNSLQQQPQAASPSVPEPHSLTPVAQADPLVRRQRVQDLMAQMQGPYNFIQDSMLDFENQTLDPAIVSAQPMNPTQNMDMPQLVCPPVHSESRLAQPNQVPVQPEATQVPLVSSTSEGYTASQPLYQPSHATEQRPQKEPIDQIQATISLNTDQTTASSSLPAASQPQVFQAGTSKPLHSSGINVNAAPFQSMQTVFNMNAPVPPVNEPETLKQQNQYQASYNQSFSSQPHQVEQTELQQEQLQTVVGTYHGSPDQSHQVTGNHQQPPQQNTGFPRSNQPYYNSRGVSRGGSRGARGLMNGYRGPANGFRGGYDGYRPSFSNTPNSGYTQSQFSAPRDYSGYQRDGYQQNFKRGSGQSGPRGAPRGRGGPPRPNRGMPQMNTQQVN

SEQ ID NO: 165 - DNA, 3268 bp, Homo sapien
cggcttcctcccgctttttcttctctctccttgcggtctgaagatgccctcggccaccagccacagcgggagcgcagcaagtcgtccggaccgccaccgccgtcgggttcctccgggagtgaggcggccgcgggagccggggccgccgcgccggcttctcagcaccccgcaaccggcaccggcgctgtccagaccgaggccatgaagcagattctcggggtgatcgacaagaaacttcggaacctggagaagaaaaagggtaagcttgatgattaccaggaacgaatgaacaaaggggaaaggcttaatcaagatcagctggatgccgtttctaagtaccaggaagtcacaaataatttggagtttgcaaaagaattacagaggagtttcatggcactaagtcaagatattcagaaaacaataaagaagacagcacgtcgggagcagcttatgagagaagaagctgaacagaaacgtttaaaaactgtacttgagctacagtatgttttggacaaattgggagatgatgaagtgcggactgacctgaaacaaggtttgaatggagtgccaatattgtccgaagaggagttgtcattgttggatgaattctataagctagtagaccctgaacgggacatgagcttgaggttgaatgaacagtatgaacatgcctccattcacctgtgggacctgctggaagggaaggaaaaacctgtatgtggaaccacctataaagttctaaaggaaattgttgagcgtgtttttcagtcaaactactttgacagcacccacaaccaccagaatgggctgtgtgaggaagaagaggcagactcagcacctgcagttgaagaccaggtacctgaagctgaacctgagccagcagaagagtacactgagcaaagtgaagttgaatcaacagagtatgtaaatagacagttcatggcagaaacacagttcaccagtggtgaaaaggagcaggtagatgagtggacagttgaaacggttgaggtggtaaattcactccagcagcaacctcaggctgcatccccttcagtaccagagccccactctttgactccagtggctcaggcagatccccttgtgagaagacagcgagtacaagaccttatggcacaaatgcagggtcccgataatttcatacaggattcaatgctggattttgaaaatcagacacttgatcctgccattgtatctgcacagcctatgaatccaacacaaaacatggacatgccccagctggtttgccctccagttcattctgaatctagacttgctcagcctaatcaagttcctgtacaaccagaagcgacacaggttcctttggtatcatccacaagtgaggggtacacagcatctcaacccttgtaccagccttctcatgctacagagcaacgaccacagaaggaaccaattgatcagattcaggcaacaatctctttaaatacagaccagactacagcatcatcatcccttcctgctgcgtctcagcctcaagtatttcaggctgggacaagcaaacctttacatagcagtggaatcaatgtaaatgcagctccattccaatccatgcaaacggtgttcaatatgaatgccccagttcctcctgttaatgaaccagaaactttaaaacagcaaaatcagtaccaggccagttataaccagagcttttctagtcagcctcaccaagtagaacaaacagagcttcagcaagaacagcttcaaacagtggttggcacttaccatggttccccagaccagtcccatcaagtgactggtaaccaccagcagcctcctcagcagaacactggatttccacgtagcaatcagccctattacaatagtcgtggtgtgtctcgtggaggctcccgtggtgctagaggcttgatgaatggataccggggccctgcaatggattcagaggaggatatgatggttaccgcccttcattctctaacactccaaacagtggttatacacagtctcagttcagtgctccccgggattactctggctatcaacgggatggatatcagcagaatttcaagcgaggctctgggcagagtggaccacggggagccccacgaggtcgtggagggcccccaagacccaacagagggatgccgcaaatgaacactcagcaagtgaattaatctgattcacaggattatgtttaatcgccaaaaacacactggccagtgtaccataatatgttaccagaagagttattatctatttgttctccctttcaggaaacttattgtaaagggactgttttcatcccataaagacaggactacaattgtcagctttctattacctggatatggaaggaaactatttttactctgcatgttctgtcctaagcgtcatcttgagccttgcacatgatactcagattcctcacccttgcttaggagtaaaacaatatactttacagggtgataataatctccatagttatttgaagtggcttgaaaaaggcaagattgacttttatgacattggataaaatctacaaatcagccctcgagttattcaatgataactgacaaactaaattatttccctagaaaggaagatgaaaggagtggagtgtggtttggccagaacaactgcatttcacagcttttccagttaaattggagcactgaacgttcagatgcataccaaattatgcatgggtcctaatcacacatataaggctggctaccagctttgacacagcactgttcatctggccaaacaactgtggttaaaaacacatgtaaaatggctttttaacagctgatactgtataagacaaagccaagatgcaaaattaggctttgattggcactttttgaaaaatatgcaacaaatatgggatgtaatccggatggccgcttctgtacttaatgtgaaatatttagatacctttttgaacacttaacagtttctttgagacaatgactttgtaaggattggtactatctatcattccttatgacatgtacattgtctgtcactaatccttggattttgctgtattgtcaccgggattggtacaggtactgatgaaaatctctagtggataatcataacactctcggtcacatgtttttccttcagcttgaaagctttttttaaaaggaaaagataccaaatgcctgctgctaccacccttttcaattgctatgttttgaaaggcaccagtatgtgttttagattgatttccctgtttcagggaaatcacggacagtagtttccg

SEQ ID NO: 166 - protein, 649 aa, Homo sapien
MKQILGVIDKKLRNLEKKKGKLDDYQERMNKGERLNQDQLDAVSKYQEVTNNLEFAKELQRSFMALSQDIQKTIKKTARREQLMREEAEQKRLKTVLELQYVLDKLGDDEVRTDLKQGLNGVPILSEEELSLLDEFYKLVDPERDMSLRLNEQYEHASIHLWDLLEGKEKPVCGTTYKVLKEIVERVFQSNYFDSTHNHQNGLCEEEEADSAPAVEDQVPEAEPEPAEEYTEQSEVESTEYVNRQFMAETQFTSGEKEQVDEWTVETVEVVNSLQQQPQAASPSVPEPHSLTPVAQADPLVRRQRVQDLMAQMQGPDNFIQDSMLDFENQTLDPAIVSAQPMNPTQNMDMPQLVCPPVHSESRLAQPNQVPVQPEATQVPLVSSTSEGYTASQPLYQPSHATEQRPQKEPIDQIQATISLNTDQTTASSSLPAASQPQVFQAGTSKPLHSSGINVNAAPFQSMQTVFNMNAPVPPVNEPETLKQQNQYQASYNQSFSSQPHQVEQTELQQEQLQTVVGTYHGSPDQSHQVTGNHQQPPQQNTGFPRSNQPYYNSRGVSRGGSRGARGLMNGYRGPAMDSEEDMMVTALHSLTLQTVVIHSLSSVLPGITLAINGMDISRISSEALGRVDHGEPHEVVEGPQDPTEGCRK

SEQ ID NO: 167 - DNA, 2188 bp, Homo sapien
ctctttcccttcggtgtgccactgaagatcctggtgtcgccatgggccgccgccccgcccgttgttaccggtattgtaagaacaagccgtacccaaagtctcgcttctgccgaggtgtccctgatgccaagattcgcatttttgacctggggcggaaaaaggcaaaagtggatgagtttccgctttgtggccacatggtgtcagatgaatatgagcagctgtcctctgaagccctggaggctgcccgaatttgtgccaataagtacatggtaaaaagttgtggcaaagatggcttccatatccgggtgcggctccaccccttccacgtcatccgcatcaacaagatgttgtcctgtgctggggctgacaggctccaaacaggcatgcgaggtgcctttggaaagccccagggcactgtggccagggttcacattggccaagttatcatgtccatccgcaccaagctgcagaacaaggagcatgtgattgaggccctgcgcagggccaagttcaagtttcctggccgccagaagatccacatctcaaagaagtggggcttcaccaagttcaatgctgatgaatttgaagacatggtggctgaaaagcggctcatcccagatggctgtggggtcaagtacatccccagtcgtggccctctggacaagtggcgggccctgcactcatgagggcttccaatgtgctgcccccctcttaatactcaccaataaattctacttcctgtccacctatgtctttgtatctacattcttgacggggaaggaacttcctctgggaacctttgggtcattgccctttcacttcagaaacaggttgacaactcagccctgctcatgaggcagcaaaccctgcaaagggctgggactggtggccttatgtcagttgtctactctggagcttgacttggacctccccaggtcctaggcagtaggttgaaaaacactgaagtgcttttcatgaagcacagctgcagcaaagccttgcaatcccaggctggggtcagcctacagttgtgttgcttattacaacacatgcggaccaagaggggcttgtgggctagaggctgaccagcagcgtttatttagcaagggtaggtgtgcatcacattgggcttgttctcacccatctggtttggccattcctccttggtgggaatcatccaggtactgctgaggtcacctgcgatttgccccatttcctatctctagcaacctcctgggccccatgcccccaccccttctagaacctgcattcccagggccttcaccacctgaccaaaggtctaggctaacctttggtcatttgtaacaagacctcggaacagacacgtgtgtggcatggtttggcctggggatcttagatgtctgacctgaactattgtagaacagcgctggcttttgggggagcagcaaaaatgagaggagtgctaggtgggtggcctgagcatctgtatccagggacaggactccaaaggcttttggtcccagagctggggtatgttggccccagcccccagcctgtggctcccaaaaggcctctggttttttgtaatctcagtttacagccatttcttaggtttttaattacctttattttattttgccaaacatacctgggaataccttttattttttttttaccttggggtgatggttccaaaccataaatgtgattatagttaacacatgacccttctagcgtcccagccagtgtttttcctgacctctcttctttggagaggaggatggaagggaggggtccggcatgctgctggcattttgctgtgtcctgcagcccctttccgggacacctgggttcacacagctttttagcttacataactggtgcagattttctgtgtggagatgttgccttgaccagccttggctggactttaccaggcatgcagaagcctgtaccaacacagactacagcacccaggaggtgcgagtgtggctgctcagcggttataacaggcctgactgcattgttcaccggattataatgagccaaaatgtttcccggtgtttgctggtttcagggaaggagtttgatatagcagattaaccaccctccttgtagctattggggcttaatggtttcctggtgattcttaccaatccacaataaacatggcccattggcatatctgcaaaaaaaaaaaaaaaaa

SEQ ID NO: 168 - protein, 214 aa, Homo sapien
MGRRPARCYRYCKNKPYPKSRFCRGVPDAKIRIFDLGRKKAKVDEFPLCGHMVSDEYEQLSSEALEAARICANKYMVKSCGKDGFHIRVRLHPFHVIRINKMLSCAGADRLQTGMRGAFGKPQGTVARVHIGQVIMSIRTKLQNKEHVIEALRRAKFKFPGRQKIHISKKWGFTKFNADEFEDMVAEKRLIPDGCGVKYIPSRGPLDKWRALHS

SEQ ID NO: 169 - DNA, 4394 bp, Mus musculus
ccggctcggtacgcgctctgctccgagccgctcactgcgtggtagagtctggtgcccccgccgtcgcctgcatcgccgccaccgccgctccgccacgaccaccgccgcctcctgccctgcagccaccgccaccgcctgtgtcgccgccgcctcgggaccggctgtatgattaggccacaatcttcaatgagtaaacatattcctcaattctgtggtgttcttggtcacacatttatggagtttctgaagggcagtggagattactgccaggcacagcacgacctctatgcagacaagtgaactgtagaaactgattactgctccaccaagaagcccccataagagtggttatcctggacacagaagtgttgaattgaaatccacagagcattttacaagagttctgacctggatggggtaaacctcagtgcacttcttttctgttggcctcagtattactggattgaagaattgctgcttcttgttaggaggttcatttcacttatcattacttacaacttcatactcaaagcactgagaatttcaagtggagtatattgaagtagacttcagtttctttgcatcatttctgtattcaatttttttaattatttcataaccctattgagtgttttttaactaaattaacatggctcgaatgaaccgcccagctcctgtggaagtcacatacaagaacatgagatttcttattacacacaatccaaccaatgcgaccttaaacaaatttatagaggaacttaagaagtatggagttaccacaatagtaagagtatgtgaagcaacttatgacactactcttgtggagaaagaaggtatccatgttcttgattggccttttgatgatggtgcaccaccatccaaccagattgttgatgactggttaagtcttgtgaaaattaagtttcgtgaagaacctggttgttgtattgctgttcattgcgttgcaggccttgggagagctccagtacttgttgccctagcattaattgaaggtggaatgaaatacgaagatgcagtacaattcataagacaaaagcggcgtggagcttttaacagcaagcaacttctgtatttggagaagtatcgtcctaaaatgcggctgcgtttcaaagattccaacggtcatagaaacaactgttgcattcaataaaattggggtgcctaatgctactggaagtggaacttgagatagggcctaatttgttatacatattagccaacatgttggcttagtaagtctaatgaagcttccataggagtattgaaaggcagttttaccaggcctcaagctagacagatttggcaacctctgtatttgggttacagtcaacctatttggatacttggcaaaagattcttgctgtcagcatataaaatgtgcttgtcatttgtatcaattgacctttccccaaatcatgcagtattgagttatgacttgttaaatctattcccatgccagaatcttatcaatacataagaaatttaggaagattaggtgccaaaatacccagcacaatacttgtatatttttagtaccatacagaagtaaaatcccaggaactatgaacactagaccttatgtggtttattccttcaatcatttcaaacattgaaagtagggcctacatggttatttgcctgctcactttatgtttacatctcccacattcataccaatatacgtcaggtttgcttaaccattgatttttttttttttttaccaagtcttacagtgattattttacgtgtttccatgtatctcactttgtgctgtattaaaaaaacctccattttgaaaatctacgttgtacagaagcacatgtctttaatgtcttcagacaaaaaagccttacattaatttaatgtttgcactctgaggtgcaacttaacagggagggcctgagaaaagaatgggagggggctattaattattttttagcaaaatgttgcctttgtcttgtgcaaacatgtagaatatgctctttaatttagtaaaatatttttttaaaaggtagagatgctttgttattgtaatcataaacttcctgaaattcttgtaatttttttcccatacttatcagaagtgtgtttaccaacttatttttgtttgaaagtgtgattttttttttccttcccaacctctcttgcaaaaaaagaaatgggtttctgctaatgaattgagcacatctaatattttatatgccttttggagctgtgtaagttaatatttgatacttgacaatttgttttattatgtaattgataaaatggtgatgtgtattaatgttagttcaaccatatatttatactgtctggggatgtgtggttatagttctgtgggagaaataattttgtcagtgttcaccagcttgtaaaaacttagtgcgagagctgaaacatctaaataaataatgacatgcatttatcatcattgagattggtttgctttaaattaacttattttgtagaagacaaaatgaattgcacttcacttaatgtgtgtcctcatctttttacaaataaatgaaggattataaatgatgtcagcattttagtaaacttttagacaaaatttgttagggtcattcatgaaaactttaatactaaaagcactttccattatatactttttaaaggtctagataattttgaaccaatttattattgtgtactgaggagaaataatgtatagtagaggacagccttggtttgtaaagctcagttccactagttcatggttttgtgcaacttctgagcctcagttttctcctttgcaaattaataattacatacctttatagattttgaaattaatttaaatattagtatttggtacatgaaggcttaatgttaagtttcctttaatgatccacaataatccctttgatcacgttaatctaaatctagatgtctttgtctaattttttttgaatagcagttataaatgtaaaggactcaaagtttaagtaaaaagtgatactccaccttgtgtttcaaagaatttagttccacctcttcataccagtttaacacttaatatatttcattggattttagacagggcaaaaggaagaacaggggcctctggaggcccttggttatttaaatcttggattatttgtgatagtaatcacaaatttttggctaatttttaacctgaggttttgttttttttttaaaggaaatgcagcctagtcttgagaacataattttatataatcaattactaaatgttaaactattaccacacagcccataaaacagcatttgcgtttattgagagagaggatgtgccatcatgattaatgaaaactatcttttgagtttgaaaagaaattaatttgcagtgtttggattgtatatatggtgctaaaaataaattaatttactttataaaccttatctgtacattatacgatgtgatgaaatttgctttttatccaaatattttgtatcttgtaaatatggctaattataggaatgcctataatacatcttagattccttatatctaataagagttcaaagagttatgagttgaagtcttgaatgcaggaaactatctgatagtgttctaaaatttggttacttgggtttggatacccttagtgggatgatgtaaatagaggctagctacctaggcttgtctatagcaaccataatgttgatgtaagtaatgcggttactgaatcataagaaaatgccatctctttttagttgaaggaaaactctggaagtaggtgccattggtcattctgcagtgcactgcaaccattgtttcccctagtgccctcttttccctagggcattgctctcctattcccacgccttaacacagctctatacctagaagcagccagcccaggcatgcagtcacatttaatcacatcccccttctagagtgcttcaaaatgatgtagtccctcaacttggctaaagaatctcaatctcttgaaatttatttttttaatgtcatattcatctggtaaatatctactgtttgccaggcatttaagaatatggcaaagaacataaaagatggtgtcaccagattttggtcaccaatgagtacccgacccgttgccatgattaagagagaatgctttctattggagtttcaggaaatataatttgagaatactttaaagggaagtggaagtataagtgaatgatatttttcttttacatgtaaacaatgaagttatttcaaagttaagttttaaacaaaatacatgaagtagtgtctgccatacatgttaatattctacattcttgcttccttaaattaatatgtttgtgtgtatatatgtgcctcacacctgaattgaaaattaaagactggtttaaaagtggttaaaaaaaaaaaaaaaaaa

SEQ ID NO: 170 - protein, 173 aa, Mus musculus
MARMNRPAPVEVTYKNMRFLITHNPTNATLNKFIEELKKYGVTTIVRVCEATYDTTLVEKEGIHVLDWPFDDGAPPSNQIVDDWLSLVKIKFREEPGCCIAVHCVAGLGRAPVLVALALIEGGMKYEDAVQFIRQKRRGAFNSKQLLYLEKYRPKMRLRFKDSNGHRNNCCIQ

SEQ ID NO: 171 - DNA, 4394 bp, Mus musculus; identical to SEQ ID NO: 169

SEQ ID NO: 172 - protein, 173 aa, Mus musculus; identical to SEQ ID NO: 170

SEQ ID NO: 173 - DNA, 2777 bp, Homo sapien
caggatcttgagagtttagctgctagcaggaagcagtgaaggggtcactgaagattgaggagagaacagtttagctggatggcataaatgttaaagaggggaaggagtttcctgagaaaagaatgggagggggctattaattatttttagcaaaatgttgcctttgtcttgtgcaaacatgtagaatatgctctttaatttagtaaaatatttttttaaaaggtagagatgctttgttattgtaatcataaacttcctgaaattcttgtaatttttttcccatacttatcagaagtgtgtttaccaacttatttttgtttgaaagtgtgattttttttttccttcccaacctctcttgcaaaaaaagaaatgggtttctgctaatgaattgagcagacatctaatattttatatgccttttgagctgtgtaacttaatatttggatacttgacaatttgttttattatgtaattgataaaatggtgatgtgtattaatgttagttcaaccatatatttatactgtctggggatgtgtggttatagttctgtgggagaaataattttgtcagtgttcaccagcttgtaaaaacttagtgcgagagctgaaacatctaaataaataatgacatgcatttatcatcattgagattggtttgcttaaaattaacttattttgtagaagacaaaatgaattgcacttcacttaatgtgtgtcctcatctttttacaaataaatgaaggattataaatgatgtcagcattttagtaaacttttagacaaaatttgttagggtcattcatgaaaactttaatactaaaagcactttccattatatactttttaaaggtctagataattttgaaccaatttattattgtgtactgaggagaaataatgtatagtagaggacagccttggtttgtaaagctcagttccactagttcatggttttgtgcaacttctgagcctcagttttctcctttgcaaattaataattacatacctttatagattttgaaattaatttaaatattagtatttggtacatgaaggcttaatgttaagtttcctttaatgatccacaataatccctttgatcacgttaatctaaatctagatgtctttgtctaattttttttgaatagcagttataaatgtaaaggactcaaagtttaagtaaaaagtgatactccaccttgtgtttcaaagaatttagttccacctcttcataccagtttaacacttaatatatttcattggattttagacagggcaaaaggaagaacaggggcctctggaggcccttggttatttaaatcttggattatttgtgatagtaatcacaaatttttggctaatttttaacctgaggttttgttttttttttaaaggaaatgcagcctagtcttgagaacataattttatataatcaattactaaatgttaaactattaccacacagcccataaaacagcatttgcgtttattgagagagaggatgtgccatcatgattaatgaaaactatcttttgagtttgaaaagaaattaatttgcagtgtttggattgtatatatggtgctaaaaataaattaatttactttataaaccttatctgtacattatacgatgtgatgaaatttgctttttatccaaatattttgtatcttgtaaatatggctaattataggaatgcctataatacatcttagattccttatatctaataagagttcaaagagttatgagttgaagtcttgaatgcaggaaactatctgatagtgttctaaaatttggttacttgggtttggatacccttagtgggatgatgtaaatagaggctagctacctaggcttgtctatagcaaccataatgttgatgtaagtaatgcggttactgaatcataagaaaatgccatctctttttagttgaaggaaaactctggaagtaggtgccattggtcattctgcagtgcactgcaaccattgtttcccctagtgccctcttttccctagggcattgctctcctattcccacgccttaacacagctctatacctagaagcagccagcccaggcatgcagtcacatttaatcacatcccccttctagagtgcttcaaaatgatgtagtccctcaacttggctaaagaatctcaatctcttgaaatttatttttttaatgtcatattcatctggtaaatatctactgtttgccaggcatttaagaatatggcaaagaacataaaagatggtgtcaccagattttggtcaccaatgagtacccgacccgttgccatgattaagagagaatgctttctattggagtttcaggaaatataatttgagaatactttaaagggaagtggaagtataagtgaatgatatttttcttttacatgtaaacaatgaagttatttcaaagttaagttttaaacaaaatacatgaagtagtgtctgccatacatgttaatattctacattcttgcttccttaaattaatatgtttgtgtgtatatatgtgcctcacacctgaattgaaaattaaagactggtttaaaagtggtttaaaagtgacatttaatgtttctccattacgtttggggtaaccagcctaagtggaatcttggaaggaaagtaagggaaaaacttgtatttgccttcaatgaattaaaccagtgatatgtgttaacgtatgaatgaaaggattgatggtgattttataattatatatattgccgcagtaaccagttaataaattgatagctaccatttaa

SEQ ID NO: 174 - protein, 12 aa, Homo sapien
QDLESLAASRKQ

SEQ ID NO: 175 - DNA, 2338 bp, Homo sapien
agcgcacgtcggcagtcggctccctcgttgaccgaatcaccgacctctctccccagctgtatttccaaaatgtcgctttctaacaagctgacgctggacaagctggacgttaaagggaagcgggtcgttatgagagtcgacttcaatgttcctatgaagaacaaccagataacaaacaaccagaggattaaggctgctgtcccaagcatcaaattctgcttggacaatggagccaagtcggtagtccttatgagccacctaggccggcctgatggtgtgcccatgcctgacaagtactccttagagccagttgctgtagaactcaaatctctgctgggcaaggatgttctgttcttgaaggactgtgtaggcccagaagtggagaaagcctgtgccaacccagctgctgggtctgtcatcctgctggagaacctccgctttcatgtggaggaagaagggaagggaaaagatgcttctgggaacaaggttaaagccgagccagccaaaatagaagctttccgagcttcactttccaagctaggggatgtctatgtcaatgatgcttttggcactgctcacagagcccacagctccatggtaggagtcaatctgccacagaaggctggtgggtttttgatgaagaaggagctgaactactttgcaaaggccttggagagcccagagcgacccttcctggccatcctgggcggagctaaagttgcagacaagatccagctcatcaataatatgctggacaaagtcaatgagatgattattggtggtggaatggcttttaccttccttaaggtgctcaacaacatggagattggcacttctctgtttgatgaagagggagccaagattgtcaaagacctaatgtccaaagctgagaagaatggtgtgaagattaccttgcctgttgactttgtcactgctgacaagtttgatgagaatgccaagactggccaagccactgtggcttctggcatacctgctggctggatgggcttggactgtggtcctgaaagcagcaagaagtatgctgaggctgtcactcgggctaagcagattgtgtggaatggtcctgtgggggtatttgaatgggaagcttttgcccggggaaccaaagctctcatggatgaggtggtgaaagccacttctaggggctgcatcaccatcataggtggtggagacactgccacttgctgtgccaaatggaacacggaggataaagtcagccatgtgagcactgggggtggtgccagtttggagctcctggaaggtaaagtccttcctggggtggatgctctcagcaatatttagtactttcctgccttttagttcctgtgcacagcccctaagtcaacttagcattttctgcatctccacttggcattagctaaaaccttccatgtcaagattcagctagtggccaagagatgcagtgccaggaacccttaaacagttgcacagcatctcagctcatcttcactgcaccctggatttgcatacattcttcaagatcccatttgaattttttagtgactaaaccattgtgcattctagagtgcatatatttatattttgcctgttaaaaagaaagtgagcagtgttagcttagttctcttttgatgtaggttattatgattagctttgtcactgtttcactactcagcatggaaacaagatgaaattccatttgtaggtagtgagacaaaattgatgatccattaagtaaacaataaaagtgtccattgaaaccgtgatttttttttttttcctgtcatactttgttaggaagggtgagaatagaatcttgaggaacggatcagatgtctatattgctgaatgcaagaagtggggcagcagcagtggagagatgggacaattagataaatgtccattctttatcaagggcctactttatggcagacattgtgctagtgcttttattctaacttttatttttatcagttacacatgatcataatttaaaaagtcaaggcttataacaaaaaagccccagcccattcctcccattcaagattcccactccccagaggtgaccactttcaactcttgagtttttcaggtatatacctccatgtttctaagtaatatgcttatattgttcacttcctttttttttattttttaaagaaatctatttcataccatggaggaaggctctgttccacatatatttccacttcttcattctctcggtatagttttgtcacaattatagattagatcaaaagtctacataactaatacagctgagctatgtagtatgctatgattaaatttacttatgtaaaaaaaaaaaaaaaaaaaa

SEQ ID NO: 176 - protein, 417 aa, Homo sapien
MSLSNKLTLDKLDVKGKRVVMRVDFNVPMKNNQITNNQRIKAAVPSIKFCLDNGAKSVVLMSHLGRPDGVPMPDKYSLEPVAVELKSLLGKDVLFLKDCVGPEVEKACANPAAGSVILLENLRFHVEEEGKGKDASGNKVKAEPAKIEAFRASLSKLGDVYVNDAFGTAHRAHSSMVGVNLPQKAGGFLMKKELNYFAKALESPERPFLAILGGAKVADKIQLINNMLDKVNEMIIGGGMAFTFLKVLNNMEIGTSLFDEEGAKIVKDLMSKAEKNGVKITLPVDFVTADKFDENAKTGQATVASGIPAGWMGLDCGPESSKKYAEAVTRAKQIVWNGPVGVFEWEAFARGTKALMDEVVKATSRGCITIIGGGDTATCCAKWNTEDKVSHVSTGGGASLELLEGKVLPGVDALSNI

SEQ ID NO: 177 - DNA, 2338 bp, Homo sapien; identical to SEQ ID NO: 175

SEQ ID NO: 178 - protein, 417 aa, Homo sapien; identical to SEQ ID NO: 176

SEQ ID NO: 179 - DNA, 1656 bp, Mus musculus
cgcccctgctctcgcgccggcgtcggctgcgtctccggcgtttgaattgcgcttccgccatctttccagcctcagtcggacgggcgcggaggcgcttctggaaggaacgccgcgatggctgcgcagggagagccccaggtccagttcaaacttgtattggttggtgatggtggtactggaaaaacgaccttcgtgaaacgtcatttgactggtgaatttgagaagaagtatgtagccaccttgggtgttgaggttcatcccctagtgttccacaccaacagaggacctattaagttcaatgtatgggacacagccggccaggagaaattcggtggactgagagatggctattatatccaagcccagtgtgccatcataatgtttgatgtaacatcgagagttacttacaagaatgtgcctaactggcatagagatctggtacgagtgtgtgaaaacatccccattgtgttgtgtggcaacaaagtggatattaaggacaggaaagtgaaggcgaaatccattgtcttccaccgaaagaagaatcttcagtactacgacatttctgccaaaagtaactacaactttgaaaagcccttcctctggcttgctaggaagctcattggagaccctaacttggaatttgttgccatgcctgctctcgccccaccagaagttgtcatggacccagctttggcagcacagtatgagcacgacttagaggttgctcagacaactgctctcccggatgaggatgatgacctgtgagaatgaagctggagcccagcgtcagaagtctagttttataggcagctgtcctgtgatgtcagcggtgcagcgtgtgtgccacctcattattatctagctaagcggaacatgtgctttatctgtgggatgctgaaggagatgagtgggcttcggagtgaatgtggcagtttaaaaaataacttcattgtttggacctgcatatttagctgtttggacgcagttgattccttgagtttcatatataagactgctgcagtcacatcacaatattcagtggtgaaatcttgtttgttactgtcattcccattccttttctttagaatcagaataaagttgtatttcaaatatctaagcaagtgaactcatcccttgtttataaatagcatttggaaaccactaaagtagggaagttttatgccatgttaatatttgaattgccttgcttttatcacttaatttgaaatctattgggttaatttctccctatgtttatttttgtacatttgagccatgtcacacaaactgatgatgacaggtcagcagtattctatttggttagaagggttacatggtgtaaatattagtgcagttaagctaaagcagtgtttgctccaccttcatattggctaggtagggtcacctagggaagcacttgctcaaaatctgtgacctgtcagaataaaaatgtggtttgtacatatcaaatagatattttaagggtaatattttcttttatggcaaaagtaatcatgttttaatgtagaacctcaaacaggatggaacatcagtggatggcaggaggttgggaattcttgctgttaaaaataattacaaattttgcactttttgtttgaatgttagatgcttagtgtgaagttgatacgcaagccg

SEQ ID NO: 180 - protein, 216 aa, Mus musculus
MAAQGEPQVQFKLVLVGDGGTGKTTFVKRHLTGEFEKKYVATLGVEVHPLVFHTNRGPIKFNVWDTAGQEKFGGLRDGYYIQAQCAIIMFDVTSRVTYKNVPNWHRDLVRVCENIPIVLCGNKVDIKDRKVKAKSIVFHRKKNLQYYDISAKSNYNFEKPFLWLARKLIGDPNLEFVAMPALAPPEVVMDPALAAQYEHDLEVAQTTALPDEDDDL

SEQ ID NO: 181 - DNA, 5421 bp, Homo sapien
ccgggatccggttttttttgtttttaaaagtgtaatttcctttttatttgcatctgtttatgactgaaaaaaatgactagttattatgaagacactactgttgaagatggatattttaacatggagtttcaacaaaattacttcttgagacagagctgatgtgttttttaaataacgtgattttaagcatatatttgaacaaaactaaaacatttagtattatgaatatgaaaaaagatcagtaaatcaatgtactcttctaggctgaattaaggtagactatttaaggtttcaaaaaagtttggctggggcagaataagttttacaaaacccatgccatccaaaattaagatgacatgtagcagcaagaagtattccaatgtctcataaccagttctcgcaagcaatgtgtattccttactttaaggaagtgtcaaacaaatagaaaaatctggaagaatttactaagtgtaataaattagaggtaaatcgtaataaaagaatttatgtctcacaaaaatattcacaagtgggagttttcttttaccaacttctcagagtccttctagccccctcttcacttctgaaagatgggatttaccaaaatctggtttacatttaacttttcagggacacatgacctgaaaagaaagatgtcagataatactgacattgcctcatgcactttctttgtatcagtccttcttctgtaagtaatcagaattgggtccaaatggcatagaatcaaacattatgtatcatgccaaataccacttcctgcccaacaaaatttcatctttctccagtaatgaagaggtggacattcttgttggactgtagcatctgtgccgcccgctccacaccaaccacggcagctaacctctgggcatcatatttggagtagagaacagtgcaggtccacgtggcctcttctcctctgttggtggctctcagcatattacagatttcactgtaaaagtgtggatatgtcggcagttcatagaaaatcaggttcctgatgccttttattgctgtagtttatttccacccccttccctcctgttttctctctctccttctctctctctctctctctctcttttttttccgccctagctggggctgtgttggaggagaggaagaaagagagacagaggattgcattcatccgttacgttcttgaaatttcctaatagcaagaccagcgaagcggttgcacccttttcaatcttgcaaaggaaaaaaacaaaacaaaacaaaaaaaacccaagtccccttcccggcagtttttgccttaaagctgccctcttgaaattaattttttcccaggagagagatgtcttatcaggggaagaaaaatattccacgcatcacgagcgatcgtcttctgatcaaaggaggtaaaattgttaatgatgaccagtcgttctatgcagacatatacatggaagatgggttgatcaagcaaataggagaaaatctgattgtgccaggaggagtgaagaccatcgaggcccactcccggatggtgatccccggaggaattgacgtccacactcgtttccagatgcctgatcagggaatgacgtctgctgatgatttcttccaaggaaccaaggcggccctggctgggggaaccactatgatcattgaccacgttgttcctgagcctgggacaagcctgctcgctgcctttgaccagtggagggaatgggccgacagcaagtcctgctgtgactactctctgcatgtggacatcagcgagtggcataagggcatccaggaggagatggaagcgcttgtgaaggatcacggggtaaattccttcctcgtgtacatggctttcaaagatcgcttccagctaacggattgccagatttatgaagtactgagtgtgatccgggatattggcgccatagcccaagtccacgcagaaaatggcgacatcattgcagaggagcagcagaggatcctggatctgggcatcacgggccccgagggacatgtgctgagccgacctgaggaggtcgaggccgaagccgtgaatcgtgccatcaccatcgccaaccagaccaactgcccgctgtatatcaccaaggtgatgagcaaaagctctgctgaggtcatcgcccaggcacggaagaagggaactgtggtgtatggcgagcccatcactgccagcttgggaacggacggctcccattactggagcaagaactgggccaaggctgctgcctttgtcacctccccacccttgagccctgatccaaccactccagactttctcaactccttgctgtcctgtggagacctccaggtcacgggcagtgcccattgcacgtttaacactgcccagaaggctgtaggaaaggacaacttcaccctgattccggagggcaccaatggcactgaggagcggatgtccgtcatctgggacaaggctgtggtcactgggaagatggatgagaaccagtttgtggctgtgaccagcaccaatgcagccaaagtcttcaacctttacccccggaaaggccgcattgctgtgggatccgatgccgacctggtcatctgggaccccgacagcgttaaaaccatctctgccaagacacacaacagctctctcgagtacaacatctttgaaggcatggagtgccgcggctccccactggtggtcatcagccaggggaagattgtcctggaggacggcaccctgcatgtcaccgaaggctctggacgctacattccccggaagcccttccctgattttgtttacaagcgtatcaaggcaaggagcaggctggctgagctgagaggggttcctcgtggcctgtatgacggacctgtgtgtgaagtgtctgtgacgcccaagacagtcactccagcctcctcggccaagacgtctcctgccaagcagcaggccccacctgtccggaacctgcaccagtctggattcagtttgtctggtgctcagattgatgacaacattccccgccgcaccacccagcgtatcgtggcgccccccggtggccgtgccaacatcaccagcctgggctagagctcctgggctgtgcgtccactggggactggggatgggacacctgaggacattctgagacttctttcttccttccttttttttttttgtttttttttttaagagcctgtgatagttactgtggagcagccagttcatggggtcccccttgggcccacaccccgtctctcaccaagagttactgattttgctcatccacttccctacacatctatgggtatcacacccaagactacccaccaagctcatacagggaaccacacccaacacttagacatgcgaacaagcagcccccagcgagggtctccttcgccttcaacctcctagtgtctgttagcattccttttcatggggggagggaagataaagtgaattgcccagagctgcctttttcttttctttttaaaaattttaagaagttttccttgtggggctggggaggggccggggtcagggagagtctttttttttttttttttaaatactaaattggaacatttaattccatattaatacaaggggtttgaactggacatcctaatgatgcaattacgtcatcacccagctgattccgggtggttggcaaactcatcgtgtctgtcctgagaggctccacaatgcccacccgcatcgccattctgtagtcttcagggtcagctgttgataaaggggcaggcttgcgttattggcctagattttgctgcagattaaatcctttgaggattctcttctcttttaccatttttctgcgtgctctcactctctctttctctctctagctttttaattcatgaatattttcgtgtctgtctctctctctctctgtgtttcctccagcccttgtctcggagacggtgttttcctcccttgccccattatcttttcacctcccaggtctacatttcatggtggtcgttgggtccgcctaaaggatttgagcgtttgccattgcaagcatagtgctgtgtcatcctggtccatgtaggactggtgctaaccacctgccatcatgaggatgtgtgctagagtgtgggaccctggccaagtgcaggaatgggccatgccgtctcacccacagtatcacacgtggaaccgcagacagggcccagaagctttagaggtatgaggctgcagaaccggagagattttcctctgtgcagtgctctctggctaaagtcacggtcaaacctaaacaccgagcctcattaacccaagtgaaccaaccaaagtcaccagttcagaagtgctaagctaataggagtctgacccgagggcctgctgcttcctggttaagtatcttttgagattctagaacacatgggagctttttattttcggggaaaaaccgtatttttttcttgtccaattatttctaaagacacactacatagaaagaggccctataaactcaaaaagtcattgggaaacttaaagtctattctactttgccaagaggagaaatgtgttttatgaacgatagatcacatcagaactcctgtggggaggaaaccttataaattaaacacatggcccccttagagaccacaggcgatgtctgtctccatccttccctctccttttctgtcacctttccccctagctggctcctttggacctacccctgtccttgctgacttgtgttgcattgtattccaaacgtgtttacaggttctcttaagcaatgttgtatttgcaggcttttctgaataccaaatctgctttttgtaaagcgtaaaaacatcacaaagtaggtcattccatcaccacccttgtctctctacacattttgcctttggggatctggttggggttttgggttttttgttgttgttgtttatttgttattttaaaggtaaattgcacttttaaaaaaataattggttgacttaatatatttgctttttttctcacctgcacttagaggaaatttgaacaagttggaaaaaaacaatttttgtttcaattctaagaaacacttgcagctctagtattcacttgagtcttcctgtttttcctgtaccgggtcatggtaatttttggttgttttggttgttttcttaaaaaacaagttaaaacctgacgatttctgcagtgacttgatgctctaaaacagtgtaggatttaagaatagatggtttttaatcctggaaattgtgattgtgacccatgagtggaggaactttcagttctaaagctgataaagtgtgtagccagaagagtactttttttttgtaaccactgtcttgatggcaaaataattatggtaaaaaacaagtctcgtgtttattattccttaagaactctgtgttatattaccatggaacgcctaataaagcaaaatgtggttgtttcaaaaaaaaaaaaaa

SEQ ID NO: 182 - protein, 572 aa, Homo sapien
MSYQGKKNIPRITSDRLLIKGGKIVNDDQSFYADIYMEDGLIKQIGENLIVPGGVKTIEAHSRMVIPGGIDVHTRFQMPDQGMTSADDFFQGTKAALAGGTTMIIDHVVPEPGTSLLAAFDQWREWADSKSCCDYSLHVDISEWHKGIQEEMEALVKDHGVNSFLVYMAFKDRFQLTDCQIYEVLSVIRDIGAIAQVHAENGDIIAEEQQRILDLGITGPEGHVLSRPEEVEAEAVNRAITIANQTNCPLYITKVMSKSSAEVIAQARKKGTVVYGEPITASLGTDGSHYWSKNWAKAAAFVTSPPLSPDPTTPDFLNSLLSCGDLQVTGSAHCTFNTAQKAVGKDNFTLIPEGTNGTEERMSVIWDKAVVTGKMDENQFVAVTSTNAAKVFNLYPRKGRIAVGSDADLVIWDPDSVKTISAKTHNSSLEYNIFEGMECRGSPLVVISQGKIVLEDGTLHVTEGSGRYIPRKPFPDFVYKRIKARSRLAELRGVPRGLYDGPVCEVSVTPKTVTPASSAKTSPAKQQAPPVRNLHQSGFSLSGAQIDDNIPRRTTQRIVAPPGGRANITSLG

SEQ ID NO: 183 - DNA, 2828 bp, Homo sapien
ggcacgaggcgcccgcctgctacgagtagaacgctgtccgcagcttgcgcatttcgcagccgctgccgcctcgccgctgctccttcgtaaggccacttccgcacaccgacaccaacatgaacggacagctcaacggcttccacgaggcgttcatcgaggagggcacattccttttcacctcagagtcggtcggggaaggccacccagataagatttgtgaccaaatcagtgatgctgtccttgatgcccaccttcagcaggatcctgatgccaaagtagcttgtgaaactgttgctaaaactggaatgatccttcttgctggggaaattacatccagagctgctgttgactaccagaaagtggttcgtgaagctgttaaacacattggatatgatgattcttccaaaggttttgactacaagacttgtaacgtgctggtagccttggagcaacagtcaccagatattgctcaaggtgttcatcttgacagaaatgaagaagacattggtgctggagaccagggcttaatgtttggctatgccactgatgaaactgaggagtgtatgcctttaaccattgtcttggcacacaagctaaatgccaaactggcagaactacgccgtaatggcactttgccttggttacgccctgattctaaaactcaagttactgtgcagtatatgcaggatcgaggtgctgtgcttcccatcagagtccacacaattgttatatctgttcagcatgatgaagaggtttgtcttgatgaaatgagggatgccctaaaggagaaagtcatcaaagcagttgtgcctgcgaaataccttgatgaggatacaatctaccacctacagccaagtggcagatttgttattggtgggcctcagggtgatgctggtttgactggacgcaaaatcattgtggacacttatggcggttggggtgctcatggaggaggtgccttttcaggaaaggattataccaaggtcgaccgttcagctgcttatgctgctcgttgggtggcaaaatcccttgttaaaggaggtctgtgccggagggttcttgttcaggtctcttatgctattggagtttctcatccattatctatctccattttccattatggtacctctcagaagagtgagagagagctattagagattgtgaagaagaatttcgatctccgccctggggtcattgtcagggatctggatctgaagaagccaatttatcagaggactgcagcctatggccactttggtagggacagcttcccatgggaagtgcccaaaaagcttaaatattgaaagtgttagccttttttccccagacttgttggcgtaggctacagagaagccttcaagctctgagggaaagggccctccttcctaaattttcctgtcctctttcagctcctgaccagttgcagtcactctagtcaatgacatgaattttagcttttgtgggggactgtaagttgggcttgctattctgtccctaggtgttttgttcaccattataatgaatttagtgagcataggtgatccatgtaactgcctagaaacaacactgtagtaaataatgctttgaaattgaacctttgtgccctatcacccaacgctccaaagtcataattgcattgactttccccaccagatgctgaaaatgtccttgtgatgtgcacgtaaagtacttgtagttccacttatagcctctgtctggcaatgccacagccctgtcagcatgaatttgtaatgtcttgagctctattatgaatgtgaagccttccccttatcctccctgtaacttgatccatttctaattatgtagctctttgtcagggagtgttccctatccaatcaatcttgcatgtaacgcaagttcccagttggagctccagcctgacatcaaaaaaggcagttaccattaaaccatctccctggtgcttatgctcttaattgccacctctaacagcaccaaatcaaaatctctccactttcagctgtcttttggaggacgtacgtaataaggttttaatttagtaaaccaatcctatgcatggtttcagcactagccaaacctcaccaactcctagttctagaaaaacaggcacttggcagccttgtgatgtcatacagagaagtcacagggcagtacctgagggtctgtaggttgcacactttggtaccagataacttttttttttctttataagaaagcctgagtactccacactgcacaataactcctcccagggttttaactttgttttattttcaaaaccaggtccaatgagctttctgaacagctggtgtagctacagagaaaccagcttccttcagagagcagtgcttttggcggggaggaggaaatcccttcatacttgaacgttttctaattgcttatttattgtattctggggtatggcgtaagtacagagaagccatcacctcagatggcagcttttaaaagattttttttttttctctcaacaccatgattcctttaacaacatgtttccagcattcccaggtaggccaaggtgtcctacagaaaaaccttgggttagacctacagggggtctggctggtgttaacagaagggagggcagagctggtgcggctggccatggagaaagctgacttggctggtgtggtacagagaagccagcttgtttacatgcttattccatgactgcttgccctaagcagaaagtgcctttcaggatctatttttggaggtttattacgtatgtctggttctcaattccaacagtttaatgaagatctaaataaaatgctaggttctaccttaaaaaaaaaaaaaaaaaa

SEQ ID NO: 184 - protein, 395 aa, Homo sapien
MNGQLNGFHEAFIEEGTFLFTSESVGEGHPDKICDQISDAVLDAHLQQDPDAKVACETVAKTGMILLAGEITSRAAVDYQKVVREAVKHIGYDDSSKGFDYKTCNVLVALEQQSPDIAQGVHLDRNEEDIGAGDQGLMFGYATDETEECMPLTIVLAHKLNAKLAELRRNGTLPWLRPDSKTQVTVQYMQDRGAVLPIRVHTIVISVQHDEEVCLDEMRDALKEKVIKAVVPAKYLDEDTIYHLQPSGRFVIGGPQGDAGLTGRKIIVDTYGGWGAHGGGAFSGKDYTKVDRSAAYAARWVAKSLVKGGLCRRVLVQVSYAIGVSHPLSISIFHYGTSQKSERELLEIVKKNFDLRPGVIVRDLDLKKPIYQRTAAYGHFGRDSFPWEVPKKLKY

SEQ ID NO: 185 - DNA, 2828 bp, Homo sapien; identical to SEQ ID NO: 183

SEQ ID NO: 186 - protein, 395 aa, Homo sapien; identical to SEQ ID NO: 184

SEQ ID NO: 187 - DNA, 2998 bp, Homo sapien
gagaggagacaccgccgcagttgccggtacatcggggatttctggctctttcctcttcgccttaaattcgggtgtcttttatgaataatcaaaagcagcaaaagccaacgctatcaggccagcgttttaaaactagaaaaagagatgaaaaagagaggtttgaccctactcagtttcaagactgtattattcaaggcttaactgaaaccggtactgatttggaagcagtagctaagtttcttgatgcttctggagcaaaacttgattaccgtcgatatgcagaaacactctttgacattctggtggctggtggaatgctggccccaggtggtacactggcagatgacatgatgcgtacagatgtctgcgtgtttgcagcccaagaagatctagagaccatgcaagcatttgctcaggtttttaacaagttaatcaggcgctacaaatacctggagaaaggttttgaagatgaagtaaaaaagctgctgctgttcttgaagggtttttcagagtcggagaggaacaagctagctatgttgactggtgttcttctggctaatggaacacttaatgcatccattcttaatagcctttataatgaaaatttggttaaagaaggagtttcagcagcttttgctgtgaagctctttaaatcatggataaatgaaaaagatatcaatgcagtagctgcaagtcttcggaaagtcagcatggataacagactgatggaactctttcctgccaataagcaaagtgttgaacacttcacaaaatattttactgaggcaggcttgaaagagctttcagaatatgttcggaatcagcaaaccatcggagctcgtaaggagctccagaaagaacttcaagaacagatgtcccgtggtgatccatttaaggatataattttatatgtcaaggaggagatgaaaaaaaacaacatcccagagccagttgtcatcggaatagtctggtcaagtgtaatgagcactgtggaatggaacaaaaaagaggagcttgtagcagagcaagccatcaagcacttgaagcaatacagccctctacttgctgcctttactactcaaggtcagtctgagctgactctgttactgaagattcaggagtattgctatgacaacattcatttcatgaaagccttccagaaaatagtggtgcttttttataaagctgaagtcctgagcgaggagcccattttgaagtggtataaagatgcacatgttgcaaaggggaagagtgttttccttgagcaaatgaaaaagtttgtagaatggctcaaaaatgctgaagaagaatctgaatctgaagctgaagaaggtgactgaattttgaaactacaccctcagtaaagcaaacaggagttgtagataaaatgtcatgtctcatgtgtcctggttcttacatcttcctacctccctgtatcaagcatgatataagggctttcatggcaaattttattttaactgtttctatggttgctggaaatgttgggtttagtttctaaaaccatgttttaagtagctacaggagctatagatttgaatctaatgttgcattagtcttttcagttatcttctacctcctgtattttctactgtaataatgtaatttaaggccttccacaatgaacagttcactttattccctgggttttctataaacagttttaaggatatgatttggttaaaaaataatttgttataaaaattctgtttgcaaattaaactggaaaagtatccagagtctcaaaaggcaatgatttgtgagataatatggcatgcccggagccctgctcatcaatgaaaaacccatatgtaataatcgaattcatttaacatgaatcttgagtacgtggaccattgcttgcatgttaactttttgttttgttttgttttgttttgttttgcatttttaactccagatatcctaaagctcaattgtttggtctctggttttcatccttagagaagccatggagaacagacttgaaaagtttaggaaatcataatgtggcagaggtggtgggaagaagaaagttgagctttttccccttgagaaacttctgcatttagtttctatctttccaggcaaaacaaatgggtattcttttcatacaaccattttcaaatgaaccttagaaaagtcttaacatttaaggtattttatgcacagaatacacttagattgataggaaagaactcgtaatggagtttgagtaaagaaaatgactgatgtactaaacccagtaaaaattgttgaaaatgttaaaggtcagcatgttctaattgggaatctagatatagcttagatttcctattggcttagagtatttgctataacaaatgaagtgcaatgacaattatatattcctactcggtcatactggactggcttcgttctcttaatatactcagtaatgactcaagcctctggctattaacataccctagttgccgttttttaattgccatgagccaaatacttcttggtatacaattgatccatttattttaatggctgccttttcattttcatcttttcttgctgctacccatctatgtatgtagtcattggggggaaaatgtagccacattttttatgggaagactttgtgttaaaagtgaacattttgaaggtttttaactggtgaaactagcctggaataatgccaccagagactgagtggaaatcgccccttttgaaggtgccattcttatgagccaaaagtttgtcatttaaaagttcattttgagggaataacatgtaatataatttgaaataaaggtatagtaaccttaaaaagaacattataactgattgttgtgaatggggtgaatttgttaaaatgagtaactttgataaagtttttcatgcacaggcaaaatgtattcactagatttctacgtagtgatctgcttttactttgtaatttgtagttctcaaaagacttttttttaaaaaaataaagtccatacttacactt

SEQ ID NO: 188 - protein, 419 aa, Homo sapien
MNNQKQQKPTLSGQRFKTRKRDEKERFDPTQFQDCIIQGLTETGTDLEAVAKFLDASGAKLDYRRYAETLFDILVAGGMLAPGGTLADDMMRTDVCVFAAQEDLETMQAFAQVFNKLIRRYKYLEKGFEDEVKKLLLFLKGFSESERNKLAMLTGVLLANGTLNASILNSLYNENLVKEGVSAAFAVKLFKSWINEKDINAVAASLRKVSMDNRLMELFPANKQSVEHFTKYFTEAGLKELSEYVRNQQTIGARKELQKELQEQMSRGDPFKDIILYVKEEMKKNNIPEPVVIGIVWSSVMSTVEWNKKEELVAEQAIKHLKQYSPLLAAFTTQGQSELTLLLKIQEYCYDNIHFMKAFQKIVVLFYKAEVLSEEPILKWYKDAHVAKGKSVFLEQMKKFVEWLKNAEEESESEAEEGD

SEQ ID NO: 189 - DNA, 1436 bp, Homo sapien
agtgtggtcaggcggctcggactgagcaggactttccttatcccagttgattgtgcagaatacactgcctatcgcttgtcttctattcaccatggcttcttctgatatccaggtgaaagaactggagaagcgtgcctcaggccaggcttttgagctgattctcagccctcggtcaaaagaatctgttccagaattccccctttcccctccaaagaagaaggatctttccctggaggaaattcagaagaaattagaagctgcagaagaaagacgcaagtcccatgaagctgaggtcttgaagcagctggctgagaaacgagagcacgagaaagaagtgcttcagaaggcaatagaagagaacaacaacttcagtaaaatggcagaagagaaactgacccacaaaatggaagctaataaagagaaccgagaggcacaaatggctgccaaactggaacgtttgcgagagaaggataagcacattgaagaagtgcggaagaacaaagaatccaaagaccctgctgacgagactgaagctgactaatttgttctgagaactgactttctccccatccccttcctaaatatccaaagactgtactggccagtgtcattttattttttccctcctgacaaatattttagaagctaatgtaggactgtataggtagatccagatccagactgtaagatgttgttttaggggctaaaggggagaaactgaaagtgttttactctttttctaaagtgttggtctttctaatgtagctatttttcttgttgcatcttttctacttcagtacacttggtgtactgggttaatggctagtactgtattggctctgtgaaaacatatttgtgaaaagagtatgtagtggcttcttttgaactgttagatgctgaatatctgttcacttttcaatcccaattctgtcccaatcttaccagatgctactggacttgaatggttaataaaactgcacagtgctgttggtggcagtgacttcttttgagttaggttaataaatcaagccatagagcccctcctggttgatacttgttccagatggggcctttggggctggtagaaatacccaacgcacaaatgaccgcacgttctctgccccgtttcttgccccagtgtggtttgcattgtctccttccacaatgactgctttgtttggatgcctcagcccaggtcagctgttactttctttcagatgtttatttgcaaacaaccattttttgttctgtgtcccttttaaaaggcagattaaaagcacaagcgtgtttctagagaacagttgagagagaatctcaagattctacttggtggtttgcttgctctacgttacaggtggggcatgtcctcatcctttcctgccataaaagctatgacacgagaatcagaatattaataaaactttatgtactgctgt

SEQ ID NO: 190 - protein, 149 aa, Homo sapien
MASSDIQVKELEKRASGQAFELILSPRSKESVPEFPLSPPKKKDLSLEEIQKKLEAAEERRKSHEAEVLKQLAEKREHEKEVLQKAIEENNNFSKMAEEKLTHKMEANKENREAQMAAKLERLREKDKHIEEVRKNKESKDPADETEAD

SEQ ID NO: 191 - DNA, 2062 bp, Homo sapien
gtcagtccctcctgtagccgccgccgccgccgcccgccgcccctctgccagcagctccggcgccacctcgggccggcgtctccggcgggcgggagccaggcgctgacgggcgcggcgggggcggccgagcgctcctgcggctgcgactcaggctccggcgtctgcgcttccccatggggctggcctgcggcgcctgggcgctctgagattgtcactgctgttccaagggcacacgcagagggatttggaattcctggagagttgcctttgtgagaagctggaaatatttctttcaattccatctcttagttttccataggaacatcaagaaatcatgaacaactttggtaatgaagagtttgactgccacttcctcgatgaaggttttactgccaaggacattctggaccagaaaattaatgaagtttcttcttctgatgataaggatgccttctatgtggcagacctgggagacattctaaagaaacatctgaggtggttaaaagctctccctcgtgtcacccccttttatgcagtcaaatgtaatgatagcaaagccatcgtgaagacccttgctgctaccgggacaggatttgactgtgctagcaagactgaaatacagttggtgcagagtctgggggtgcctccagagaggattatctatgcaaatccttgtaaacaagtatctcaaattaagtatgctgctaataatggagtccagatgatgacttttgatagtgaagttgagttgatgaaagttgccagagcacatcccaaagcaaagttggttttgcggattgccactgatgattccaaagcagtctgtcgtctcagtgtgaaattcggtgccacgctcagaaccagcaggctccttttggaacgggcgaaagagctaaatatcgatgttgttggtgtcagcttccatgtaggaagcggctgtaccgatcctgagaccttcgtgcaggcaatctctgatgcccgctgtgtttttgacatgggggctgaggttggtttcagcatgtatctgcttgatattggcggtggctttcctggatctgaggatgtgaaacttaaatttgaagagatcaccggcgtaatcaacccagcgttggacaaatactttccgtcagactctggagtgagaatcatagctgagcccggcagatactatgttgcatcagctttcacgcttgcagttaatatcattgccaagaaaattgtattaaaggaacagacgggctctgatgacgaagatgagtcgagtgagcagacctttatgtattatgtgaatgatggcgtctatggatcatttaattgcatactctatgaccacgcacatgtaaagccccttctgcaaaagagacctaaaccagatgagaagtattattcatccagcatatggggaccaacatgtgatggcctcgatcggattgttgagcgctgtgacctgcctgaaatgcatgtgggtgattggatgctctttgaaaacatgggcgcttacactgttgctgctgcctctacgttcaatggcttccagaggccgacgatctactatgtgatgtcagggcctgcgtggcaactcatgcagcaattccagaaccccgacttcccacccgaagtagaggaacaggatgccagcaccctgcctgtgtcttgtgcctgggagagtgggatgaaacgccacagagcagcctgtgcttcggctagtattaatgtgtagatagcactctggtagctgttaactgcaagtttagcttgaattaagggatttggggggaccatgtaacttaattactgctagttttgaaatgtctttgtaagagtagggtcgccatgatgcagccatatggaagactaggatatgggtcacacttatctgtgttcctatggaaactatttgaatatttgttttatatggatttttattcactcttcagacacgctactcaagagtgcccctcagctgctgaacaagcatttgtagcttgtacaatggcagaatgggccaaaagcttagtgttgtgacctgtttttaaaataaagtatcttgaaataattaggc

SEQ ID NO: 192 - protein, 461 aa, Homo sapien
MNNFGNEEFDCHFLDEGFTAKDILDQKINEVSSSDDKDAFYVADLGDILKKHLRWLKALPRVTPFYAVKCNDSKAIVKTLAATGTGFDCASKTEIQLVQSLGVPPERIIYANPCKQVSQIKYAANNGVQMMTFDSEVELMKVARAHPKAKLVLRIATDDSKAVCRLSVKFGATLRTSRLLLERAKELNIDVVGVSFHVGSGCTDPETFVQAISDARCVFDMGAEVGFSMYLLDIGGGFPGSEDVKLKFEEITGVINPALDKYFPSDSGVRIIAEPGRYYVASAFTLAVNIIAKKIVLKEQTGSDDEDESSEQTFMYYVNDGVYGSFNCILYDHAHVKPLLQKRPKPDEKYYSSSIWGPTCDGLDRIVERCDLPEMHVGDWMLFENMGAYTVAAASTFNGFQRPTIYYVMSGPAWQLMQQFQNPDFPPEVEEQDASTLPVSCAWESGMKRHRAACASASINV

SEQ ID NO: 193 - DNA, 1897 bp, Homo sapien
ctccgaacaggaagaggacgaaaaaaataaccgtccgcgacgccgagacaaaccggacccgcaaccaccatgaacagcaaaggtcaatatccaacacagccaacctaccctgtgcagcctcctgggaatccagtataccctcagaccttgcatcttcctcaggctccaccctataccgatgctccacctgcctactcagagctctatcgtccgagctttgtgcacccaggggctgccacagtccccaccatgtcagccgcatttcctggagcctctctgtatcttcccatggcccagtctgtggctgttgggcctttaggttccacaatccccatggcttattatccagtcggtcccatctatccacctggctccacagtgctggtggaaggagggtatgatgcaggtgccagatttggagctggggctactgctggcaacattcctcctccacctcctggatgccctcccaatgctgctcagcttgcagtcatgcagggagccaacgtcctcgtaactcagcggaaggggaacttcttcatgggtggttcagatggtggctacaccatctggtgaggaaccaaggccacctctgtgccgggaaagacatcacataccttcagcacttctcacaatgtaactgctttagtcatattaacctgaagttgcagtttagacacatgttgttggggtgtctttctggtgcccaaactttcaggcacttttcaaatttaataaggaaccatgtaatggtagcagtacctccctaaagcattttgaggtaggggaggtatccattcataaaatgaatgtgggtgaagccgccctaaggattttcctttaatttctctggagtaatactgtaccatactggtctttgcttttagtaataaaacatcaaattaggtttggagggaactttgatcttcctaagaattaaagttgccaaattattctgattggtctttaatctcctttaagtctttgatatatattacttgttataaatggaacgcattagttgtctgccttttcctttccatcccttgccccacccatcccatctccaaccctagtcttccatttcctcccgccagtctccattgaatcaatggtgcaggacagaaagccagtcagactaatttccttctttcctcgcacttctccccactcgtcatcttttaactagtgtttcacaaggatcctctgaaaccctctctgtgccccaagtacagatgccattacttctgctttcgtatctcctcaggcaaaagtggagggtgccttatgggccctcctcataggttgtctctgcatacacgaacctaacccaaatttgctttggtgccagaaaaactgagctatgtttgaacaaagatgtcgtgcaaactgtactgtgaacaacagttggtttaaaatatgaggggcaaggaggaggatgcatttcaaaagcttgattgatgtgttcagagctaaattaagaggagttttcagatcaaaaactggttaccattttttgtcagagtgtctgatgcggccactcattcggctccccagaattcctagactgggttaatagggtcatattgtgaatgtctcactacaaaatgacttgagtccagtgaaatctcattagggtttaagaatatttcagggatccttaatgttttgatttttgttttctgaaattggattttattttattttatcttataatttcagttcatctaaattgtgtgttctgtacatgtgatgtttgactgtaccattgactgttatggaagttcagcgttgtatgtctctctctacactgtggtgcacttaacttgtggaatttttatactaaaaatgtagaataaagactattttgaagatttgaataaagtgatgaagttgc

SEQ ID NO: 194 - protein, 168 aa, Homo sapien
MNSKGQYPTQPTYPVQPPGNPVYPQTLHLPQAPPYTDAPPAYSELYRPSFVHPGAATVPTMSAAFPGASLYLPMAQSVAVGPLGSTIPMAYYPVGPIYPPGSTVLVEGGYDAGARFGAGATAGNIPPPPPGCPPNAAQLAVMQGANVLVTQRKGNFFMGGSDGGYTIW

SEQ ID NO: 195 - DNA, 2387 bp, Homo sapien
gctgctgcgacagtccactacctttttcgagagtgactcccgttgtcccaaggcttcccagagcgaacctgtgcggctgcaggcaccggcgcgtcgagtttccggcgtccggaaggaccgagctcttctcgcggatccagtgttccgtttccagcccccaatctcagagccgagccgacagagagcagggaaccggcatggccaaagccgcggcgatcggcatcgacctgggcaccacctactcctgcgtgggggtgttccaacacggcaaggtggagatcatcgccaacgaccagggcaaccgcaccacccccagctacgtggccttcacggacaccgagcggctcatcggggatgcggccaagaaccaggtggcgctgaacccgcagaacaccgtgtttgacgcgaagcggctgatcggccgcaagttcggcgacccggtggtgcagtcggacatgaagcactggcctttccaggtgatcaacgacggagacaagcccaaggtgcaggtgagctacaagggggacaccaaggcattctaccccgaggagatctcgtccatggtgctgaccaagatgaaggagatcgccgaggcgtacctgggctacccggtgaccaacgcggtgatcaccgtgccggcctacttcaacgactcgcagcgccaggccaccaaggatgcgggtgtgatcgcggggctcaacgtgctgcggatcatcaacgagcccacggccgccgccatcgcctacggcctggacagaacgggcaagggggagcgcaacgtgctcatctttgacctgggcgggggcaccttcgacgtgtccatcctgacgatcgacgacggcatcttcgaggtgaaggccacggccggggacacccacctgggtggggaggactttgacaacaggctggtgaaccacttcgtggaggagttcaagagaaaacacaagaaggacatcagccagaacaagcgagccgtgaggcggctgcgcaccgcctgcgagagggccaagaggaccctgtcgtccagcacccaggccagcctggagatcgactccctgtttgagggcatcgacttctacacgtccatcaccagggcgaggttcgaggagctgtgctccgacctgttccgaagcaccctggagcccgtggagaaggctctgcgcgacgccaagctggacaaggcccagattcacgacctggtcctggtcgggggctccacccgcatccccaaggtgcagaagctgctgcaggacttcttcaacgggcgcgacctgaacaagagcatcaaccccgacgaggctgtggcctacggggcggcggtgcaggcggccatcctgatgggggacaagtccgagaacgtgcaggacctgctgctgctggacgtggctcccctgtcgctggggctggagacggccggaggcgtgatgactgccctgatcaagcgcaactccaccatccccaccaagcagacgcagatcttcaccacctactccgacaaccaacccggggtgctgatccaggtgtacgagggcgagagggccatgacgaaagacaacaatctgttggggcgcttcgagctgagcggcatccctccggcccccaggggcgtgccccagatcgaggtgaccttcgacatcgatgccaacggcatcctgaacgtcacggccacggacaagagcaccggcaaggccaacaagatcaccatcaccaacgacaagggccgcctgagcaaggaggagatcgagcgcatggtgcaggaggcggagaagtacaaagcggaggacgaggtgcagcgcgagagggtgtcagccaagaacgccctggagtcctacgccttcaacatgaagagcgccgtggaggatgaggggctcaagggcaagatcagcgaggccgacaagaagaaggtgctggacaagtgtcaagaggtcatctcgtggctggacgccaacaccttggccgagaaggacgagtttgagcacaagaggaaggagctggagcaggtgtgtaaccccatcatcagcggactgtaccagggtgccggtggtcccgggcctgggggcttcggggctcagggtcccaagggagggtctgggtcaggccccaccattgaggaggtagattaggggcctttccaagattgctgtttttgttttggagcttcaagactttgcatttcctagtatttctgtttgtcagttctcaatttcctgtgtttgcaatgttgaaattttttggtgaagtactgaacttgctttttttccggtttctacatgcagagatgaatttatactgccatcttacgactatttcttctttttaatacacttaactcaggccattttttaagttggttacttcaaagtaaataaactttaaaattcaagtga

SEQ ID NO: 196 - protein, 641 aa, Homo sapien
MAKAAAIGIDLGTTYSCVGVFQHGKVEIIANDQGNRTTPSYVAFTDTERLIGDAAKNQVALNPQNTVFDAKRLIGRKFGDPVVQSDMKHWPFQVINDGDKPKVQVSYKGDTKAFYPEEISSMVLTKMKEIAEAYLGYPVTNAVITVPAYFNDSQRQATKDAGVIAGLNVLRIINEPTAAAIAYGLDRTGKGERNVLIFDLGGGTFDVSILTIDDGIFEVKATAGDTHLGGEDFDNRLVNHFVEEFKRKHKKDISQNKRAVRRLRTACERAKRTLSSSTQASLEIDSLFEGIDFYTSITRARFEELCSDLFRSTLEPVEKALRDAKLDKAQIHDLVLVGGSTRIPKVQKLLQDFFNGRDLNKSINPDEAVAYGAAVQAAILMGDKSENVQDLLLLDVAPLSLGLETAGGVMTALIKRNSTIPTKQTQIFTTYSDNQPGVLIQVYEGERAMTKDNNLLGRFELSGIPPAPRGVPQIEVTFDIDANGILNVTATDKSTGKANKITITNDKGRLSKEEIERMVQEAEKYKAEDEVQRERVSAKNALESYAFNMKSAVEDEGLKGKISEADKKKVLDKCQEVISWLDANTLAEKDEFEHKRKELEQVCNPIISGLYQGAGGPGPGGFGAQGPKGGSGSGPTIEEVD

SEQ ID NO: 197 - DNA, 2460 bp, Homo sapien
ggtcccaaggctttccagagcgaacctgtgcggctgcaggcaccggcgtgttgagtttccggcgttccgaaggactgagctcttgtcgcggatcccgtccgccgtttccagcccccagtctcagagcggagcccacagagcagggcaccggcatggccaaagccgcggcgatcggcatcgacctgggcaccacctactcctgcgtgggggtgttccaacacggcaaggtggagatcatcgccaacgaccagggcaaccgcaccacccccagctacgtggccttcacggacaccgagcggctcatcggggatgcggccaagaaccaggtggcgctgaacccgcagaacaccgtgtttgacgcgaagcggctgatcggccgcaagttcggcgacccggtggtgcagtcggacatgaagcactggcctttccaggtgatcaacgacggagacaagcccaaggtgcaggtgagctacaagggggagaccaaggcattctaccccgaggagatctcgtccatggtgctgaccaagatgaaggagatcgccgaggcgtacctgggctacccggtgaccaacgcggtgatcaccgtgccggcctacttcaacgactcgcagcgccaggccaccaaggatgcgggtgtgatcgcggggctcaacgtgctgcggatcatcaacgagcccacggccgccgccatcgcctacggcctggacagaacgggcaagggggagcgcaacgtgctcatctttgacctgggcgggggcaccttcgacgtgtccatcctgacgatcgacgacggcatcttcgaggtgaaggccacggccggggacacccacctgggtggggaggactttgacaacaggctggtgaaccacttcgtggaggagttcaagagaaaacacaagaaggacatcagccagaacaagcgagccgtgaggcggctgcgcaccgcctgcgagagggccaagaggaccctgtcgtccagcacccaggccagcctggagatcgactccctgtttgagggcatcgacttctacacgtccatcaccagggcgaggttcgaggagctgtgctccgacctgttccgaagcaccctggagcccgtggagaaggctctgcgcgacgccaagctggacaaggcccagattcacgacctggtcctggtcgggggctccacccgcatccccaaggtgcagaagctgctgcaggacttcttcaacgggcgcgacctgaacaagagcatcaaccccgacgaggctgtggcctacggggcggcggtgcaggcggccatcctgatgggggacaagtccgagaacgtgcaggacctgctgctgctggacgtggctcccctgtcgctggggctggagacggccggaggcgtgatgactgccctgatcaagcgcaactccaccatccccaccaagcagacgcagatcttcaccacctactccgacaaccaacccggggtgctgatccaggtgtacgagggcgagagggccatgacgaaagacaacaatctgttggggcgcttcgagctgagcggcatccctccggcccccaggggcgtgccccagatcgaggtgaccttcgacatcgatgccaacggcatcctgaacgtcacggccacggacaagagcaccggcaaggccagcaagatcaccatcaccaacgacaagggccgcctgagcaaggaggagatcgagcgcatggtgcaggaggcggagaagtacaaagcggaggacgaggtgcagcgcgagagggtgtcagccaagaacgccctggagtcctacgccttcaacatgaagagcgccgtggaggatgaggggctcaagggcaagatcagcgaggcggacaagaagaaggttctggacaagtgtcaagaggtcatctcgtggctggacgccaacaccttggccgagaaggacgagtttgagcacaagaggaaggagctggagcaggtgtgtaaccccatcatcagcggactgtaccagggtgccggtggtcccgggcctgggggcttcggggctcagggtcccaagggagggtctgggtcaggccctaccattgaggaggtggattaggggcctttgttctttagtatgtttgtctttgaggtggactgttgggactcaaggactttgctgctgttttcctatgtcatttctgcttcagctctttgctgcttcacttctttgtaaagttaagttgtaacctgatggtaattagctggcttcattatttttgtagtacaaccgatatgttcattagaattctttgcatttaatgttgatactgtaagggtgtttcgttccctttaaatgaatcaacactgccaccttctgtacgagtttgtttttttttttttttttttttttttttgcttggcgaaaacactacaaaggctgggaatgtatgtttttataatttgtttatttaaatatgaaaaataaaatgttaaacttt

SEQ ID NO: 198 - protein, 641 aa, Homo sapien
MAKAAAIGIDLGTTYSCVGVFQHGKVEIIANDQGNRTTPSYVAFTDTERLIGDAAKNQVALNPQNTVFDAKRLIGRKFGDPVVQSDMKHWPFQVINDGDKPKVQVSYKGETKAFYPEEISSMVLTKMKEIAEAYLGYPVTNAVITVPAYFNDSQRQATKDAGVIAGLNVLRIINEPTAAAIAYGLDRTGKGERNVLIFDLGGGTFDVSILTIDDGIFEVKATAGDTHLGGEDFDNRLVNHFVEEFKRKHKKDISQNKRAVRRLRTACERAKRTLSSSTQASLEIDSLFEGIDFYTSITRARFEELCSDLFRSTLEPVEKALRDAKLDKAQIHDLVLVGGSTRIPKVQKLLQDFFNGRDLNKSINPDEAVAYGAAVQAAILMGDKSENVQDLLLLDVAPLSLGLETAGGVMTALIKRNSTIPTKQTQIFTTYSDNQPGVLIQVYEGERAMTKDNNLLGRFELSGIPPAPRGVPQIEVTFDIDANGILNVTATDKSTGKASKITITNDKGRLSKEEIERMVQEAEKYKAEDEVQRERVSAKNALESYAFNMKSAVEDEGLKGKISEADKKKVLDKCQEVISWLDANTLAEKDEFEHKRKELEQVCNPIISGLYQGAGGPGPGGFGAQGPKGGSGSGPTIEEVD

SEQ ID NO: 199 - DNA, 2202 bp, Homo sapien
cacgcttgccgccgccccgcagaaatgcttcggttacccacagtctttcgccagatgagaccggtgtccagggtactggctcctcatctcactcgggcttatgccaaagatgtaaaatttggtgcagatgcccgagccttaatgcttcaaggtgtagaccttttagccgatgctgtggccgttacaatggggccaaagggaagaacagtgattattgagcagggttggggaagtcccaaagtaacaaaagatggtgtgactgttgcaaagtcaattgacttaaaagataaatacaagaacattggagctaaacttgttcaagatgttgccaataacacaaatgaagaagctggggatggcactaccactgctactgtactggcacgctctatagccaaggaaggcttcgagaagattagcaaaggtgctaatccagtggaaatcaggagaggtgtgatgttagctgttgatgctgtaattgctgaacttaaaaagcagtctaaacctgtgaccacccctgaagaaattgcacaggttgctacgatttctgcaaacggagacaaagaaattggcaatatcatctctgatgcaatgaaaaaagttggaagaaagggtgtcatcacagtaaaggatggaaaaacactgaatgatgaattagaaattattgaaggcatgaagtttgatcgaggctatatttctccatactttattaatacatcaaaaggtcagaaatgtgaattccaggatgcctatgttctgttgagtgaaaagaaaatttctagtatccagtccattgtacctgctcttgaaattgccaatgctcaccgtaagcctttggtcataatcgctgaagatgttgatggagaagctctaagtacactcgtcttgaataggctaaaggttggtcttcaggttgtggcagtcaaggctccagggtttggtgacaatagaaagaaccagcttaaagatatggctattgctactggtggtgcagtgtttggagaagagggattgaccctgaatcttgaagacgttcagcctcatgacttaggaaaagttggagaggtcattgtgaccaaagacgatgccatgctcttaaaaggaaaaggtgacaaggctcaaattgaaaaacgtattcaagaaatcattgagcagttagatgtcacaactagtgaatatgaaaaggaaaaactgaatgaacggcttgcaaaactttcagatggagtggctgtgctgaaggttggtgggacaagtgatgttgaagtgaatgaaaagaaagacagagttacagatgcccttaatgctacaagagctgctgttgaagaaggcattgttttgggagggggttgtgccctccttcgatgcattccagccttggactcattgactccagctaatgaagatcaaaaaattggtatagaaattattaaaagaacactcaaaattccagcaatgaccattgctaagaatgcaggtgttgaaggatctttgatagttgagaaaattatgcaaagttcctcagaagttggttatgatgctatggctggagattttgtgaatatggtggaaaaaggaatcattgacccaacaaaggttgtgagaactgctttattggatgctgctggtgtggcctctctgttaactacagcagaagttgtagtcacagaaattcctaaagaagagaaggaccctggaatgggtgcaatgggtggaatgggaggtggtatgggaggtggcatgttctaactcctagactagtgctttacctttattaatgaactgtgacaggaagcccaaggcagtgttcctcaccaataacttcagagaagtcagttggagaaaatgaagaaaaaggctggctgaaaatcactataaccatcagttactggtttcagttgacaaaatatataatggtttactgctgtcattgtccatgcctacagataatttattttgtatttttgaataaaaaacatttgtacattcctgatactgggtacaagagccatgtaccagtgtactgctttcaacttaaatcactgaggcatttttactactattctgttaaaatcaggattttagtgcttgccaccaccagatgagaagttaagcagcctttctgtggagagtgagaataattgtgtacaaagtagagaagtatccaattatgtgacaacctttgtgtaataaaaatttgtttaa

SEQ ID NO: 200 - protein, 573 aa, Homo sapien
MLRLPTVFRQMRPVSRVLAPHLTRAYAKDVKFGADARALMLQGVDLLADAVAVTMGPKGRTVIIEQGWGSPKVTKDGVTVAKSIDLKDKYKNIGAKLVQDVANNTNEEAGDGTTTATVLARSIAKEGFEKISKGANPVEIRRGVMLAVDAVIAELKKQSKPVTTPEEIAQVATISANGDKEIGNIISDAMKKVGRKGVITVKDGKTLNDELEIIEGMKFDRGYISPYFINTSKGQKCEFQDAYVLLSEKKISSIQSIVPALEIANAHRKPLVIIAEDVDGEALSTLVLNRLKVGLQVVAVKAPGFGDNRKNQLKDMAIATGGAVFGEEGLTLNLEDVQPHDLGKVGEVIVTKDDAMLLKGKGDKAQIEKRIQEIIEQLDVTTSEYEKEKLNERLAKLSDGVAVLKVGGTSDVEVNEKKDRVTDALNATRAAVEEGIVLGGGCALLRCIPALDSLTPANEDQKIGIEIIKRTLKIPAMTIAKNAGVEGSLIVEKIMQSSSEVGYDAMAGDFVNMVEKGIIDPTKVVRTALLDAAGVASLLTTAEVVVTEIPKEEKDPGMGAMGGMGGGMGGGMF

SEQ ID NO: 201 - DNA, 2202 bp, Homo sapien; identical to SEQ ID NO: 199

SEQ ID NO: 202 - protein, 573 aa, Homo sapien; identical to SEQ ID NO: 200

SEQ ID NO: 203 - DNA, 1322 bp, Homo sapien
tagcttggcacgaggctcgggtcgttgtggtgcgctgtcttcccgcttgcgtcagggacctgcccgactcagtggccgccatggcatcagatgaaggcaaactttttgttggagggctgagttttgacaccaatgagcagtcgctggagcaggtcttctcaaagtacggacagatctctgaagtggtggttgtgaaagacagggagacccagagatctcggggatttgggtttgtcacctttgagaacattgacgacgctaaggatgccatgatggccatgaatgggaagtctgtagatggacggcagatccgagtagaccaggcaggcaagtcgtcagacaaccgatcccgtgggtaccgtggtggctctgccgggggccggggcttcttccgtgggggccgaggacggggccgtgggttctctagaggaggaggggaccgaggctatggggggaaccggttcgagtccaggagtgggggctacggaggctccagagactactatagcagccggagtcagagtggtggctacagtgaccggagctcgggcgggtcctacagagacagttacgacagttacgctacacacaacgagtaaaaacccttcctgctcaagatcgtccttccaatggctgtgtgtttaaagattgtgggagcttcgctgaacgttaatgtgtagtaaatgcacctccttgtattcccactttcgtagtcatttcggttctgatcttgtcaaacccagcctgaccgcttctgacgccgggatggcctcgttactagacttttctttttaaggaagtgctgtttttttttgagggttttcaaaacattttgaaaagcatttacttttttgaccacgagccatgagttttcaaaaaaatcgggggttgtgtgggtttttggtttttgttttagtttttggttgcgttgccttttttttttagtggggttggccccatgaagtgggtgccccactcacttctctgagatcgaacggactgtgaatccgctctttgtcggaagctgagcaagctgtggcttttttccaactccgtgtgacgtttctgagtgtagtgtggtaggacccggcgggtgtgcagcaactgccctggagccccagcccctgcgtccatctgtgctgtgcgccccacagtagacgtgcagacgtccctgagaggttcttgaagatgtttatttatattgtccttttttactggaagacgtacgcatactccatcgatgttgtatttgcagtggctgaggaattcttgtacgcagttttctttggctttacgagccgattaaaagaccgtgtgaaatg

SEQ ID NO: 204 - protein, 172 aa, Homo sapien
MASDEGKLFVGGLSFDTNEQSLEQVFSKYGQISEVVVVKDRETQRSRGFGFVTFENIDDAKDAMMAMNGKSVDGRQIRVDQAGKSSDNRSRGYRGGSAGGRGFFRGGRGRGRGFSRGGGDRGYGGNRFESRSGGYGGSRDYYSSRSQSGGYSDRSSGGSYRDSYDSYATHNE

SEQ ID NO: 205 - DNA, 1322 bp, Homo sapien; identical to SEQ ID NO: 203

SEQ ID NO: 206 - protein, 172 aa, Homo sapien; identical to SEQ ID NO: 204

SEQ ID NO: 207 - DNA, 1863 bp, Homo sapien
gttccaaggtttgcggcccggtctcggagaagaggggagagtggagggccgctgaataagcttccaaaatgatgcccacaccagttatcctattgaaagaggggactgatagctcccaaggcatcccccagcttgtgagtaacatcagtgcctgccaggtgattgctgaggctgtaagaactaccctgggtccccgtggcatggacaagcttattgtagatggcagaggcaaagcaacaatttctaatgatggggccacaattctgaaacttcttgatgttgtccatcctgcagcaaagactttggtagacattgccaaatcccaagatgctgaggtgggtgatggcaccacctcagtgaccttgctggctgcagagtttctgaagcaggtgaaaccctatgtggaggaaggtttacacccccagatcatcattcgagctttccgcacagccacccagctggcagttaacaagatcaaagagattgctgtgaccgtgaagaaggcagataaagtggagcagaggaagctgctggaaaagtgtgccatgaccgctctgagctccaagctgatctcccagcagaaagctttctttgctaagatggtggtggatgcagtgatgatgctcgatgatttgctgcagcttaaaatgattggaatcaagaaggtacagggtggagccctcgaggattctcagctggtagctggtgttgcattcaagaagactttctcttacgctgggtttgaaatgcaacccaaaaagtaccacaatcccaagattgcccttttgaatgtcgagctcgagttgaaagctgagaaagacaatgctgagataagagtccacacagttgaggattatcaggcaattgttgatgctgagtggaacattctctatgacaagttagagaagatccatcattctggagccaaagttgtcttgtccaaactccccattggggatgtggccacccagtactttgctgacagggacatgttctgtgctggccgagtacctgaggaggatctgaagaggacaatgatggcctgtggaggctcaatccagaccagtgtgaatgctctgtcagcagatgtgctgggtcgatgccaggtgtttgaagagacccagattggaggcgagaggtacaatttttttactggctgccccaaggccaagacatgcaccttcattctccgtggcggcgccgagcagtttatggaggagacagagcggtccctgcatgatgccatcatgatcgtcaggagggccatcaagaatgattcagtggtggctggtggcggggccattgagatggaactctccaagtacctgcgggattactcaaggactattccaggaaaacagcagctgttgattggggcttatgccaaggccttggagattatcccacgccagctgtgtgacaatgctggctttgatgccacaaacattctcaacaagctgcgggctcggcatgcccaggggggtacatggtatggagtagacatcaacaacgaggacattgctgacaactttgaagctttcgtgtgggagccagctatggtgcggatcaatgcgctgacagcagcctctgaggctgcgtgcctgatcgtgtctgtagatgaaaccatcaagaacccccgctcgactgtggatgctcccacagcagcaggccggggccgtggtcgtggccgcccccactgagaggcaccccacccatcacatggctggctggctgctgggtgcacttaccctccttggcttggttacttcattttacaaggaaggggtagtaattggcccactctcttcttactggaggctatttaaataaaatgtaagacttcaaaaaaaaaaaaaaaaaaaa

SEQ ID NO: 208 - protein, 543 aa, Homo sapien
MMPTPVILLKEGTDSSQGIPQLVSNISACQVIAEAVRTTLGPRGMDKLIVDGRGKATISNDGATILKLLDVVHPAAKTLVDIAKSQDAEVGDGTTSVTLLAAEFLKQVKPYVEEGLHPQIIIRAFRTATQLAVNKIKEIAVTVKKADKVEQRKLLEKCAMTALSSKLISQQKAFFAKMVVDAVMMLDDLLQLKMIGIKKVQGGALEDSQLVAGVAFKKTFSYAGFEMQPKKYHNPKIALLNVELELKAEKDNAEIRVHTVEDYQAIVDAEWNILYDKLEKIHHSGAKVVLSKLPIGDVATQYFADRDMFCAGRVPEEDLKRTMMACGGSIQTSVNALSADVLGRCQVFEETQIGGERYNFFTGCPKAKTCTFILRGGAEQFMEETERSLHDAIMIVRRAIKNDSVVAGGGAIEMELSKYLRDYSRTIPGKQQLLIGAYAKALEIIPRQLCDNAGFDATNILNKLRARHAQGGTWYGVDINNEDIADNFEAFVWEPAMVRINALTAASEAACLIVSVDETIKNPRSTVDAPTAAGRGRGRGRPH

SEQ ID NO: 209 - DNA, 1774 bp, Homo sapien
ggcacgagggagaactagtctcagtttttttttttttttttttaggtgagaaagccagctgactttattgctctgggggcagggggctcaggagctcttggtggggcgggtccgcttcctcttcaccatcacaggcttctggctgcgcaggatggcgctggccctgcggatggctgccatgcgcaggtcggggcggtacttgttcttgcggatcatgtgtctgatgctgctgagcgtggcgcgagcattcttgttgatggtggtccgcacataggaggtggcaggcttccgctggccggatctccgcttaatgaccaccacgacacctttgccgtcggctgccggctccacgcccacagtcttgcggtgaatcagtccgttgtagcggaaggaattgcgggccttcaagttattgggctcagtgctgtaggtctgcttattcctcttgatcaggaaactggagcagttccgcacgaccatccattgcagatgcgcagacatggcggcggctcccttcgcagcggcgacctgaccttcagcgcctcggctccagcgccatggcgccctccaggaagttcttcgttgggggaaactggaagatgaacgggcggaagcagagtctgggggagctcatcggcactctgaacgcggccaaggtgccggccgacaccgaggtggtttgtgctccccctactgcctatatcgacttcgcccggcagaagctagatcccaagattgctgtggctgcgcagaactgctacaaagtgactaatggggcttttactggggagatcagccctggcatgatcaaagactgcggagccacgtgggtggtcctggggcactcagagagaaggcatgtctttggggagtcagatgagctgattgggcagaaagtggcccatgctctggcagagggactcggagtaatcgcctgcattggggagaagctagatgaaagggaagctggcatcactgagaaggttgttttcgagcagacaaaggtcatcgcagataacgtgaaggactggagcaaggtcgtcctggcctatgagcctgtgtgggccattggtactggcaagactgcaacaccccaacaggcccaggaagtacacgagaagctccgaggatggctgaagtccaacgtctctgatgcggtggctcagagcacccgtatcatttatggaggctctgtgactggggcaacctgcaaggagctggccagccagcctgatgtggatggcttccttgtgggtggtgcttccctcaagcccgaattcgtggacatcatcaatgccaaacaatgagccccatccatcttccctacccttcctgccaagccagggactaagcagcccagaagcccagtaactgccctttccctgcatatgcttctgatggtgtcatctgctccttcctgtggcctcatccaaactgtatcttcctttactgtttatatcttcaccctgtaatggttgggaccaggccaatcccttctccacttactataatggttggaactaaacgtcaccaaggtggcttctccttggctgagagatggaaggcgtggtgggatttgctcctgggttccctaggccctagtgagggcagaagagaaaccatcctctcccttcttacaccgtgaggccaagatcccctcagaaggcaggagtgctgccctctcccatggtgcccgtgcctctgtgctgtgtatgtgaaccacccatgtgagggaataaacctggcactaggtaaaaaaaaaaaaaaaaaaaaa

SEQ ID NO: 210 - protein, 249 aa, Homo sapien
MAPSRKFFVGGNWKMNGRKQSLGELIGTLNAAKVPADTEVVCAPPTAYIDFARQKLDPKIAVAAQNCYKVTNGAFTGEISPGMIKDCGATWVVLGHSERRHVFGESDELIGQKVAHALAEGLGVIACIGEKLDEREAGITEKVVFEQTKVIADNVKDWSKVVLAYEPVWAIGTGKTATPQQAQEVHEKLRGWLKSNVSDAVAQSTRIIYGGSVTGATCKELASQPDVDGFLVGGASLKPEFVDIINAKQ

SEQ ID NO: 211 - DNA, 5221 bp, Homo sapien
ataaaagggggctgaggaaataccggacacggtcacccgttgccagctctagcctttaaattcccggctcggggacctccacgcaccgcggctagcgccgacaaccagctagcgtgcaaggcgccgcggctcagcgcgtaccggcgggcttcgaaaccgcagtcctccggcgaccccgaactccgctccggagcctcagccccctggaaagtgatcccggcatccgagagccaagatgccggcccacttgctgcaggacgatatctctagctcctataccaccaccaccaccattacagcgcctccctccagggtcctgcagaatggaggagataagttggagacgatgcccctctacttggaagacgacattcgccctgatataaaagatgatatatatgaccccacctacaaggataaggaaggcccaagccccaaggttgaatatgtctggagaaacatcatccttatgtctctgctacacttgggagccctgtatgggatcactttgattcctacctgcaagttctacacctggctttggggggtattctactattttgtcagtgccctgggcataacagcaggagctcatcgtctgtggagccaccgctcttacaaagctcggctgcccctacggctctttctgatcattgccaacacaatggcattccagaatgatgtctatgaatgggctcgtgaccaccgtgcccaccacaagttttcagaaacacatgctgatcctcataattcccgacgtggctttttcttctctcacgtgggttggctgcttgtgcgcaaacacccagctgtcaaagagaaggggagtacgctagacttgtctgacctagaagctgagaaactggtgatgttccagaggaggtactacaaacctggcttgctgctgatgtgcttcatcctgcccacgcttgtgccctggtatttctggggtgaaacttttcaaaacagtgtgttcgttgccactttcttgcgatatgctgtggtgcttaatgccacctggctggtgaacagtgctgcccacctcttcggatatcgtccttatgacaagaacattagcccccgggagaatatcctggtttcacttggagctgtgggtgagggcttccacaactaccaccactcctttccctatgactactctgccagtgagtaccgctggcacatcaacttcaccacattcttcattgattgcatggccgccctcggtctggcctatgaccggaagaaagtctccaaggccgccatcttggccaggattaaaagaaccggagatggaaactacaagagtggctgagtttggggtccctcaggtttcctttttcaaaaaccagccaggcagaggttttaatgtctgtttattaactactgaataatgctaccaggatgctaaagatgatgatgttaacccattccagtacagtattcttttaaaattcaaaagtattgaaagccaacaactctgcctttatgatgctaagctgatattatttcttctcttatcctctctctcttctaggcccattgtcctccttttcactttattgctatcgccctcctttcccttattgcctcccaggcaagcagctggtcagtctttgctcagtgtccagcttccaaagcctagacaacctttctgtagcctaaaacgaatggtctttgctccagataactctctttccttgagctgttgtgagctttgaagtaggtggcttgagctagagataaaacagaatcttctgggtagtcccctgttgattatcttcagcccaggcttttgctagatggaatggaaaagcaacttcatttgacacaaagcttctaaagcaggtaaattgtcgggggagagagttagcatgtatgaatgtaaggatgagggaagcgaagcaagaggaacctctcgccatgatcagacatacagctgcctacctaatgaggacttcaagccccaccacatagcatgcttcctttctctcctggctcggggtaaaaagtggctgcggtgtttggcaatgctaattcaatgccgcaacatatagttgaggccgaggataaagaaaagacattttaagtttgtagtaaaagtggtctctgctggggaagggttttcttttctttttttctttaataacaaggagatttcttagttcatatatcaagaagtcttgaagttgggtgtttccagaattggtaaaaacagcagctcatggaattttgagtattccatgagctgctcattacagttctttcctctttctgctctgccatcttcaggatattggttcttcccctcatagtaataagatggctgtggcatttccaaacatccaaaaaaagggaaggatttaaggaggtgaagtcgggtcaaaaataaaatatatatacatatatacattgcttagaacgttaaactattagagtatttcccttccaaagagggatgtttggaaaaaactctgaaggagaggaggaattagttgggatgccaatttcctctccactgctggacatgagatggagaggctgagggacaggatctataggcagcttctaagagcgaacttcacataggaagggatctgagaacacgttgccaggggcttgagaaggttactgagtgagttattgggagtcttaataaaataaactagatattaggtccattcattaattagttccagtttctccttgaaatgagtaaaaactagaaggcttctctccacagtgttgtgccccttcactcatttttttttgaggagaagggggtctctgttaacatctagcctaaagtatacaactgcctggggggcagggttaggaatctcttcactaccctgattcttgattcctggctctaccctgtctgtcccttttctttgaccagatctttctcttccctgaacgttttcttctttccctggacaggcagcctcctttgtgtgtattcagaggcagtgatgacttgctgtccaggcagctccctcctgcacacagaatgctcagggtcactgaaccactgcttctcttttgaaagtagagctagctgccactttcacgtggcctccgcagtgtctccacctacacccctgtgctcccctgccacactgatggctcaagacaaggctggcaaaccctcccagaaacatctctggcccagaaagcctctctctccctccctctctcatgaggcacagccaagccaagcgctcatgttgagccagtgggccagccacagagcaaaagagggtttattttcagtcccctctctctgggtcagaaccagagggcatgctgaatgccccctgcttacttggtgagggtgccccgcctgagtcagtgctctcagctggcagtgcaatgcttgtagaagtaggaggaaacagttctcactgggaagaagcaagggcaagaacccaagtgcctcacctcgaaaggaggccctgttccctggagtcagggtgaactgcaaagctttggctgagacctgggatttgagataccacaaaccctgctgaacacagtgtctgttcagcaaactaaccagcattccctacagcctagggcagacaatagtatagaagtctggaaaaaaacaaaaacagaatttgagaaccttggaccactcctgtccctgtagctcagtcatcaaagcagaagtctggctttgctctattaagattggaaatgtacactaccaaacactcagtccactgttgagccccagtgctggaagggaggaaggcctttcttctgtgttaattgcgtagaggctacaggggttagcctggactaaaggcatccttgtcttttgagctattcacctcagtagaaaaggatctaagggaagatcactgtagtttagttctgttgacctgtgcacctaccccttggaaatgtctgctggtatttctaattccacaggtcatcagatgcctgcttgataatatataaacaataaaaacaactttcacttcttcctattgtaatcgtgtgccatggatctgatctgtaccatgaccctacataaggctggatggcacctcaggctgagggccccaatgtatgtgtggctgtgggtgtgggtgggagtgtgtctgctgagtaaggaacacgattttcaagattctaaagctcaattcaagtgacacattaatgataaactcagatctgatcaagagtccggatttctaacagtccctgctttggggggtgtgctgacaacttagctcaggtgccttacatcttttctaatcacagtgttgcatatgagcctgccctcactccctctgcagaatccctttgcacctgagaccctactgaagtggctggtagaaaaaggggcctgagtggaggattatcagtatcacgatttgcaggattcccttctgggcttcattctggaaacttttgttagggctgcttttcttaagtgcccacatttgatggagggtggaaataatttgaatgtatttgatttataagtttttttttttttttgggttaaaagatggttgtagcatttaaaatggaaaattttctccttggtttgctagtatcttgggtgtattctctgtaagtgtagctcaaataggtcatcatgaaaggttaaaaaagcgaggtggccatgttatgctggtggttaaggccagggcctctccaaccactgtgccactgacttgctgtgtgaccctgggcaagtcacttaactataaggtgcctcagttttccttctgttaaaatggggataataatactgacctacctcaaagggcagttttgaggcatgactaatgctttttagaaagcattttgggatccttcagcacaggaattctcaagacctgagtattttttataataggaatgtccaccatgaacttgatacgtccgtgtgtcccagatgctgtcattagtctatatggttctccaagaaactgaatgaatccattggagaagcggtggataactagccagacaaaatttgagaatacataaacaacgcattgccacggaaacatacagaggatgccttttctgtgattgggtgggattttttccctttttatgtgggatatagtagttacttgtgacaaaaataattttggaataatttctattaatatcaactctgaagctaattgtactaatctgagattgtgtttgttcataataaaagtgaagtgaatctaaaaaaaaaaaaaaa

SEQ ID NO: 212 - protein, 359 aa, Homo sapien
MPAHLLQDDISSSYTTTTTITAPPSRVLQNGGDKLETMPLYLEDDIRPDIKDDIYDPTYKDKEGPSPKVEYVWRNIILMSLLHLGALYGITLIPTCKFYTWLWGVFYYFVSALGITAGAHRLWSHRSYKARLPLRLFLIIANTMAFQNDVYEWARDHRAHHKFSETHADPHNSRRGFFFSHVGWLLVRKHPAVKEKGSTLDLSDLEAEKLVMFQRRYYKPGLLLMCFILPTLVPWYFWGETFQNSVFVATFLRYAVVLNATWLVNSAAHLFGYRPYDKNISPRENILVSLGAVGEGFHNYHHSFPYDYSASEYRWHINFTTFFIDCMAALGLAYDRKKVSKAAILARIKRTGDGNYKSG

SEQ ID NO: 213 - DNA, 5329 bp, Homo sapien
  Unsure 1986: Unknown base
gtggtgtcggtgtcggcagcatccccggcgccctgctgcggtcgccggagccctcggcctctgttctcctccccctcccgcccttacctccacgcgggaccgcccgcgccagtcaactcctcgcactttgcccctgcttggcagcggataaaagggggctgaggaaataccggacacgtccacccgttgccagctctagcctttaaattcccggctcgggacctccacgcaccgggctagcgccgacaaccagctagcgtgcaaggcgccgcggctcagcgcgtaccggcgggcttcgaaaccgcagtcctccggcgaccccgaactccgctccggagcctcagccccctggaaagtgatcccggcatcggagagccaagatgccggcccacttgctgcaggacgatatctctagctcctataccaccaccaccaccattacagcgcctccctccagggtcctgcagaatggaggagataagttggagacgatgcccctctacttggaagacgacattcgccctgatataaaagatgatatatatgaccccacctacaaggataaggaaggcccaagccccaaggttgaatatgtctggagaaacatcatccttatgtctctgctacacttgggagccctgtatgggatcactttgattcctacctgcaagttctacacctggctttggggggtattctactattttgtcagtgccctgggcataacagcaggagctcatcgtctgtggagccaccgctcttacaaagctcggctgcccctacggctctttctgatcattgccaacacaatggcattccagaatgatgtctatgaatgggctcgtgaccaccgtgcccaccacaagttttcagaaacacatgctgatcctcataattcccgacgtggctttttcttctctcacgtgggttggctgcttgtgcgcaaacacccagctgtcaaagagaaggggagtacgctagacttgtctgacctagaagctgagaaactggtgatgttccagaggaggtactacaaacctggcttgctgctgatgtgcttcatcctgcccacgcttgtgccctggtatttctggggtgaaacttttcaaaacagtgtgttcgttgccactttcttgcgatatgctgtggtgcttaatgccacctggctggtgaacagtgctgcccacctcttcggatatcgtccttatgacaagaacattagcccccgggagaatatcctggtttcacttggagctgtgggtgagggcttccacaactaccaccactcctttccctatgactactctgccagtgagtaccgctggcacatcaacttcaccacattcttcattgattgcatggccgccctcggtctggcctatgaccggaagaaagtctccaaggccgccatcttggccaggattaaaagaaccggagatggaaactacaagagtggctgagtttggggtccctcaggttcctttttcaaaaaccagccaggcagaggttttaatgtctgtttattaactactgaataatgctaccaggatgctaaagatgatgatgttaacccattccagtacagtattcttttaaaattcaaaagtattgaaagccaacaactctgcctttatgatgctaagctgatattatttcttctcttatcctctctctcttctaggcccattgtcctccttttcactttaatcgccctcctttcccttattgcctcccaggcaagcagctggtcagtctttgctcagtgtccagcttccaaagcctagacaacctttctgtagcctaaaacgaatggtctttgctccagataactctctttccttgagctgttgtgagctttgaagtaggtggcttgagctagagataaaacagaatcttctgggtagtcccctgttgattatcttcagcccaggcttttgctagatggaatggaaaagcaacttcatttgacacaaagcttctaaagcnaggtaaattgtcgggggagagagttagcatgtatgaatgtaaggatgagggaagcgaaggaacctctcgccatgatcagacatacagctgcctacctaatgaggacttcaagccccaccacatagcatgcttcctttctctcctggctcggggtaaaaagtggctgcggtgtttggcaatgctaattcaatgccgcaacatatagttgaggccgaggataaagaaaagacattttaagtttgtagtaaaagtggtctctgctggggaagggttttcttttctttttttctttaataacaaggagatttcttagttcatatatcaagaagtcttgaagttgggtgtttccagaattggtaaaaacagcagctcatagaattttgagtattccatgagctgctcattacagttctttcctctttctgctctgccatcttcaggatattggttcttcccctcatagtaataagatggctgtggcatttccaaacatccaaaaaaagggaaggatttaaggaggtgaagtcgggtcaaaaataaaatatatatacatatatacattgcttagaacgttaaactattagagtatttcccttccaaagagggatgtttggaaaaaactctgaaggagaggaggaattagttgggatgccaatttcctctccactgctggacatgagatggagaggctgagggacaggatctataggcagcttctaagagcgaacttcacataggaagggatctgagaacacgttcaggggttgagaaggttactgagtgagttattgggagtcttaataaactagatattaggtccattcattaattagttccagtttctccttgaaatgagtaaaaactagaaggcttctctccacagtgttgtgccccttcactcatttttttttgaggagaagggggtctctgttaacatctagcctaaagtatacaaactgcctggggggcagggttaggaatctcttcactaccctgattcttgattcctggctctaccctgtctgtcccttttctttgaccagatctttctcttccctgaacgttttcttctttccctggacaggcagcctcctttgtgtgtattcagaggcagtgatgacttgctgtccaggcagctccctcctgcacacagaatgctcagggtcactgaaccactgcttctcttttgaaagtagagctagctgccactttcacgtggcctccgcagtgtctccacctacacccctgtgctcccctgccacactgatggctcaagacaaggctggcaaaccctcccagaaacatctctggcccagaaagcctctctctccctccctctctcatgagaagccaagcgctcatgttgagccagtgggccagccacagagcaaaagagggtttattttcagtcccctctctctgggtcagaaccagagggcatgctgaatgccccctgcttacttggtgagggtgccccgcctgagtcagtgctctcagctggcagtgcaatgcttgtagaagtaggaggaaacagttctcactgggaagaagcaagggcaagaacccaagtgcctcacctcgaaaggaggccctgttccctggagtcagggtgaactgcaaagctttggctgagacctgggatttgagataccacaaaccctgctgaacacagtgtctgttcagcaaactaaccagcattccctacagcctagggcagacaatagtatagaagtctggaaaaaaacaaaaacagaatttgagaaccttggaccactcctgtccctgtagctcagtcatcaaagcagaagtctggctttgctctattaagattggaaatgtacactaccaaacactcagtccactgttgagccccagtgctggaagggaggaaggcctttcttctgtgttaattgcgtagaggctacaggggttagcctggactaaaggcatccttgtctttgagctattcacctcagtagaaaaggatctaagggaagatcactgtagtttagttctgttgacctgtgcacctaccccttggaaatgtctgctggtatttctaattccacaggtcatcagatgcctgcttgataatatataaacaataaaaacaactttcacttcttcctattgtaatcgtgtgccatggatctgatctgtaccatgaccctacataaggctggatggcacctcaggctgagggccccaatgtatgtgtggctgtgggtgtgggtgggagtgtgtctgctgagtaaggaacacgattttcaagattctaaagctcaattcaagtgacacattaatgataaactcagatctgatcaagagtccggatttctaacagtccttgctttggggggtgtgctggcaacttagctcaggtgccttacatcttttctaatcacagtgttgcatatgagcctgccctcactccctctgcagaatccctttgcacctgagaccctactgaagtggctggtagaaaaaggggcctgagtggaggattatcagtatcacgatttgcaggattcccttctgggcttcattctggaaacttttgttagggctgcttttcttaagtgcccacatttgatggagggtggaaataatttgaatgtatttgatttataagtttttttttttttttgggttaaaagatggttgtagcatttaaaatggaaaattttctccttggtttgctagtatcttgggtgtattctctgtaagtgtagctcaaataggtcatcatgaaaggttaaaaaagcgaggtggccatgttatgctggtggttgccagggcctccaaccactgtgccactgacttgctgtgtgaccctgggcaagtcacttaactataaggtgcctcagttttccttctgttaaaatggggataataatactgacctacctcaaagggcagttttgaggcatgactaatgctttttagaaagcattttgggatccttcagcacaggaattctcaagacctgagtattttttataataggaatgtccaccatgaacttgatacgtccgtgtgtcccagatgctgtcattagtctatatggttctccaagaaactgaatgaatccattggagaagcggtggataactagccagacaaaatttgagaatacataaacaacgcattgccacggaaacatacagaggatgccttttctgtgattgggtgggattttttccctttttatgtgggatatagtagttacttgtgacaagaataattttggaataatttctattaatatcaactctgaagctaattgtactaatctgagattgtgtttgttcataataaaagtgaagtgaatctgattgcactg

SEQ ID NO: 214 - protein, 359 aa, Homo sapien; identical to SEQ ID NO: 212

SEQ ID NO: 215 - DNA, 1978 bp, Homo sapien
gggagggtacttagggccggggctggcccaggctacggcggctgcagggctccggcaaccgctccggcaacgccaaccgctccgctgcgcgcaggctgggctgcaggctctcggctgcagcgctgggtggatctaggatccggcttccaacatgtggcagctctgggcctccctctgctgcctgctggtgttggccaatgcccggagcaggccctctttccatcccctgtcggatgagctggtcaactatgtcaacaaacggaataccacgtggcaggccgggcacaacttctacaacgtggacatgagctacttgaagaggctatgtggtaccttcctgggtgggcccaagccaccccagagagttatgtttaccgaggacctgaagctgcctgcaagcttcgatgcacgggaacaatggccacagtgtcccaccatcaaagagatcagagaccagggctcctgtggctcctgctgggccttcggggctgtggaagccatctctgaccggatctgcatccacaccaatgcgcacgtcagcgtggaggtgtcggcggaggacctgctcacatgctgtggcagcatgtgtggggacggctgtaatggtggctatcctgctgaagcttggaacttctggacaagaaaaggcctggtttctggtggcctctatgaatcccatgtagggtgcagaccgtactccatccctccctgtgagcaccacgtcaacggctcccggcccccatgcacgggggagggagatacccccaagtgtagcaagatctgtgagcctggctacagcccgacctacaaacaggacaagcactacggatacaattcctacagcgtctccaatagcgagaaggacatcatggccgagatctacaaaaacggccccgtggagggagctttctctgtgtattcggacttcctgctctacaagtcaggagtgtaccaacacgtcaccggagagatgatgggtggccatgccatccgcatcctgggctggggagtggagaatggcacaccctactggctggttgccaactcctggaacactgactggggtgacaatggcttctttaaaatactcagaggacaggatcactgtggaatcgaatcagaagtggtggctggaattccacgcaccgatcagtactgggaaaagatctaatctgccgtgggcctgtcgtgccagtcctgggggcgagatcggggtagaaatgcattttattctttaagttcacgtaagatacaagtttcagacagggtctgaaggactggattggccaaacatcagacctgtcttccaaggagaccaagtcctggctacatcccagcctgtggttacagtgcagacaggccatgtgagccaccgctgccagcacagagcgtccttccccctgtagactagtgccgtagggagtacctgctgccccagctgactgtggccccctccgtgatccatccatctccagggagcaagacagagacgcaggaatggaaagcggagttcctaacaggatgaaagttcccccatcagttcccccagtacctccaagcaagtagctttccacatttgtcacagaaatcagaggagagatggtgttgggagccctttggagaacgccagtctcccaggccccctgcatctatcgagtttgcaatgtcacaacctctctgatcttgtgctcagcatgattctttaatagaagttttattttttcgtgcactctgctaatcatgtgggtgagccagtggaacagcgggagacctgtgctagttttacagattgcctcctaatgacgcggctcaaaaggaaaccaagtggtcaggagttgtttctgacccactgatctctactaccacaaggaaaatagtttaggagaaaccagcttttactgtttttgaaaaattacagcttcaccctgtcaagttaacaaggaatgcctgtgccaataaaagttttctccaacttgaa

SEQ ID NO: 216 - protein, 339 aa, Homo sapien
MWQLWASLCCLLVLANARSRPSFHPLSDELVNYVNKRNTTWQAGHNFYNVDMSYLKRLCGTFLGGPKPPQRVMFTEDLKLPASFDAREQWPQCPTIKEIRDQGSCGSCWAFGAVEAISDRICIHTNAHVSVEVSAEDLLTCCGSMCGDGCNGGYPAEAWNFWTRKGLVSGGLYESHVGCRPYSIPPCEHHVNGSRPPCTGEGDTPKCSKICEPGYSPTYKQDKHYGYNSYSVSNSEKDIMAEIYKNGPVEGAFSVYSDFLLYKSGVYQHVTGEMMGGHAIRILGWGVENGTPYWLVANSWNTDWGDNGFFKILRGQDHCGIESEVVAGIPRTDQYWEKI

SEQ ID NO: 217 - DNA, 2002 bp, Homo sapien
aattccgcggcaaccgctccggcaacgccaaccgctccgctgcgcgcaggctgggctgcaggctctcggctgcagcgctgggctggtgtgcagtggtgcgaccacggctcacggcagcctcagccacccagatgtaagcgatctggttcccacctcagccttccgagtagtggatctaggatctggcttccaacatgtggcagctctgggcctccctctgctgcctgctggtgttggccaatgcccggagcaggccctctttccatcccgtgtcggatgagctggtcaactatgtcaacaaacggaataccacgtggcaggccgggcacaacttctacaacgtggacatgagctacttgaagaggctatgtggtaccttcctgggtgggcccaagccaccccagagagttatgtttaccgaggacctgaagctgcctgcaagcttcgatgcacgggaacaatggccacagtgtcccaccatcaaagagatcagagaccagggctcctgtggctcctgctgggccttcggggctgtggaagccatctctgaccgcatctgcatccacaccaatgcgcacgtcagcgtggaggtgtcggcggaggacctgctcacctgctgtggcagcatgtgtggggacggctgtaatggtggctatcctgctgaagcttggaacttctggacaagaaaaggcctggtttctggtggcctctatgaatcccatgtagggtgcagaccgtactccatccctccctgtgagcaccacgtcaacggctcccggcccccatgcacgggggagggagatacccccaagtgtagcaagatctgtgagcctggctacagcccgacctacaaacaggacaagcactacggatacaattcctacagcgtctccaatagcgagaaggacatcatggccgagatctacaaaaacggccccgtggagggagctttctctgtgtattcggacttcctgctctacaagtcaggagtgtaccaacacgtcaccggagagatgatgggtggccatgccatccgcatcctgggctggggagtggagaatggcacaccctactggctggttgccaactcctggaacactgactggggtgacaatggcttctttaaaatactcagaggacaggatcactgcggaatcgaatcagaagtggtggctggaattccacgcaccgatcagtactgggaaaagatctaatctgccgtgggcctgtcgtgccagtcctgggggcgagatcggggtagaaagtcattttattctttaagttcacgtaagatacaagtttcaggcagggtctgaaggactggattggccaaagtcctccaaggagaccaagtcctggctacatcccagcctgtggttacagtgcagacaggccatgtgagccaccgctgccagcacagagcgtccttccccctgtagactagtgccgtgggagtacctgctgcccagctgctgtggccccctccgtgatccatccatctccagggagcaagacagagacgcaggatggaaagcggagttcctaacaggatgaaagttcccccatcagttcccccagtacctccaagcaagtagctttccacatttgtcacagaaatcagaggagagatggtgttgggagccctttggagaacgccagtctccaggtccccctgcatctatcgagtttgcaatgtcacaacctctctgatcttgtgctcagcatgattctttaatagaagttttatttttcgtgcactctgctaatcatgtgggtgagccagtggaacagcgggagcctgtgctggtttgcagattgcctcctaatgacgcggctcaaaaggaaaccaagtggtcaggagttgtttctgacccactgatctctactaccacaaggaaaatagtttaggagaaaccagcttttactgtttttgaaaaattacagcttcaccctgtcaagttaacaaggaatgcctgtgccaataaaaggtttctccaacttg

SEQ ID NO: 218 - protein, 339 aa, Homo sapien [sequence omitted]

SEQ ID NO: 219 - DNA, 1840 bp, Homo sapien
atcttcatcgagcgccatggccgcagcctgcgggccgggagcggccgggtactgcttgctcctcggcttgcatttgtttctgctgaccgcgggccctgccctgggctggaacgaccctgacagaatgttgctgcgggatgtaaaagctcttaccctccactatgaccgctataccacctcccgcagctgggatcccatcccacagttgaaatgtgttggaggcacagctggttgtgattcttataccccaaaagtcatacagtgtcagaacaaaggctgggatgggtatgatgtacagtgggaatgtaagacggacttagatattgcatacaaatttggaaaaactgtggtgagctgtgaaggctatgagtcctctgaagaccagtatgtactaagaggttcttgtggcttggagtataatttagattatacagaacttggcctgcagaaactgaaggagtctggaaagcagcacggctttgcctctttctctgattattattataagtggtcctcggcggattcctgtaacatgagtggattgattaccatcgtggtactccttgggatcgcctttgtagtctataagctgttcctgagtgacgggcagtattctcctccaccgtactctgagtatcctccattttcccaccgttaccagagattcaccaactcagcaggacctcctcccccaggctttaagtctgagttcacaggaccacagaatactggccatggtgcaacttctggttttggcagtgcttttacaggacaacaaggatatgaaaattcaggaccagggttctggacaggcttgggaactggtggaatactaggatatttgtttggcagcaatagagcggcaacacccttctcagactcgtggtactacccgtcctatcctccctcctaccctggcacgtggaatagggcttactcaccccttcatggaggctcgggcagctattcggtatgttcaaactcagacacgaaaaccagaactgcatcaggatatggtggtaccaggagacgataaagtagaaagttggagtcaaacactggatgcagaaattttggatttttcatcactttctctttagaaaaaaagtactacctgttaacaattgggaaaaggggatattcaaaagttctgtggtgttatgtccagtgtagctttttgtattctattatttgaggctaaaagttgatgtgtgacaaaatacttatgtgttgtatgtcagtgtaacatgcagatgtatattgcagtttttgaaagtgatcattactgtggaatgctaaaaatacattaatttctaaaacctgtgatgccctaagaagcattaagaatgaaggtgttgtactaatagaaactaagtacagaaatttcagttttaggtggttgtagctgatgagttattacctcatagagactataatattctatttggtattatattatttgatgtttgctgttcttcaaacatttaaatcaagctttggactaattatgctaatttgtgagttctgatcacttttgagctctgaagctttgaatcattcagtggtggagatggccttctggtaactgaatattaccttctgtaggaaaaggtggaaaataagcatctagaaggttgttgtgaatgactctgtgctggcaaaaatgcttgaaacctctatatttctttcgttcataagaggtaaaggtcaaatttttcaacaaaagtcttttaataacaaaagcatgcagttctctgtgaaatctcaaatattgttgtaatagtctgtttcaatcttaaaaagaatcaataaaaacaaacaaggggaaaaaaaaaaaaaa

SEQ ID NO: 220 - protein, 339 aa, Homo sapien
MAAACGPGAAGYCLLLGLHLFLLTAGPALGWNDPDRMLLRDVKALTLHYDRYTTSRSWDPIPQLKCVGGTAGCDSYTPKVIQCQNKGWDGYDVQWECKTDLDIAYKFGKTVVSCEGYESSEDQYVLRGSCGLEYNLDYTELGLQKLKESGKQHGFASFSDYYYKWSSADSCNMSGLITIVVLLGIAFVVYKLFLSDGQYSPPPYSEYPPFSHRYQRFTNSAGPPPPGFKSEFTGPQNTGHGATSGFGSAFTGQQGYENSGPGFWTGLGTGGILGYLFGSNRAATPFSDSWYYPSYPPSYPGTWNRAYSPLHGGSGSYSVCSNSDTKTRTASGYGGTRRR

SEQ ID NO: 221 - DNA, 873 bp, Rattus norvegicus
cgcagtttgaatcgcggtgcgacgaaggagtaggtggtgggatctcaccgtgggtccgattagccttttctctgccttgcttgcttgagcttcagcggaattcgaaatggctggcggtaaggctggaaaggactccggaaaggccaagacaaaggcggtttcccgctcgcagagagccggcttgcagttcccagtgggccgtattcatcgacacctaaaatctaggacgaccagtcatggacgtgtgggcgcgactgccgctgtgtacagcgcagccatcctggagtacctcaccgcagaggtacttgaactggcaggaaatgcatcaaaagacttaaaggtaaagcgtattacccctcgtcacttgcaacttgctattcgtggagatgaagaattggattctctcatcaaggctacaattgctggtggtggtgtcattccacacatccacaaatctctgattgggaagaaaggacaacagaagactgtctaaaggatgcctggattccttgttatctcaggactctaaatactctaacagctgtccagtgttggtgattccagtggactgtatctctgtgaaaaacacaattttgcctttttgtaattctatttgagcaagttggaagtttaattagctttccaaccaaccaaatttctgcattcgagtcttaaccatatttaagtgttactgtggcttcaaagaagctattgattctgaagtagtgggttttgattgagttgactgtttttaaaaaactgtttggattttaattgtgatgcagaagttatagtaacaaacatttggttttgtacagacattatttccactctggtggataagttcaataaaggtcatatcccaaactaaaa

SEQ ID NO: 222 - protein, 128 aa, Rattus norvegicus
MAGGKAGKDSGKAKTKAVSRSQRAGLQFPVGRIHRHLKSRTTSHGRVGATAAVYSAAILEYLTAEVLELAGNASKDLKVKRITPRHLQLAIRGDEELDSLIKATIAGGGVIPHIHKSLIGKKGQQKTV

SEQ ID NO: 223 - DNA, 8368 bp, Homo sapien
gcgatccgggcgccaccccgcggtcatcggtcaccggtcgctctcaggaacagcagcgcaacctctgctccctgcctcgcctcccgcgcgcctaggtgcctgcgactttaattaaagggccgtcccctcgccgaggctgcagcaccgcccccccggcttctcgcgcctcaaaatgagtagctcccactctcgggcgggccagagcgcagcaggcgcggctccgggcggcggcgtcgacacgcgggacgccgagatgccggccaccgagaaggacctggcggaggacgcgccgtggaagaagatccagcagaacactttcacgcgctggtgcaacgagcacctgaagtgcgtgagcaagcgcatcgccaacctgcagacggacctgagcgacgggctgcggcttatcgcgctgttggaggtgctcagccagaagaagatgcaccgcaagcacaaccagcggcccactttccgccaaatgcagcttgagaacgtgtcggtggcgctcgagttcctggaccgcgagagcatcaaactggtgtccatcgacagcaaggccatcgtggacgggaacctgaagctgatcctgggcctcatctggaccctgatcctgcactactccatctccatgcccatgtgggacgaggaggaggatgaggaggccaagaagcagacccccaagcagaggctcctgggctggatccagaacaagctgccgcagctgcccatcaccaacttcagccgggactggcagagcggccgggccctgggcgccctggtggacagctgtgccccgggcctgtgtcctgactgggactcttgggacgccagcaagcccgttaccaatgcgcgagaggccatgcagcaggcggatgactggctgggcatcccccaggtgatcacccccgaggagattgtggaccccaacgtggacgagcactctgtcatgacctacctgtcccagttccccaaggccaagctgaagccaggggctcccttgcgccccaaactgaacccgaagaaagcccgtgcctacgggccaggcatcgagcccacaggcaacatggtgaagaagcgggcagagttcactgtggagaccagaagtgctggccagggagaggtgctggtgtacgtggaggacccggccggacaccaggaggaggcaaaagtgaccgccaataacgacaagaaccgcaccttctccgtctggtacgtccccgaggtgacggggactcataaggttactgtgctctttgctggccagcacatcgccaagagccccttcgaggtgtacgtggataagtcacagggtgacgccagcaaagtgacagcccaaggtcccggcctggagcccagtggcaacatcgccaacaagaccacctactttgagatctttacggcaggagctggcacgggcgaggtcgaggttgtgatccaggaccccatgggacagaagggcacggtagagcctcagctggaggcccggggcgacagcacataccgctgcagctaccagcccaccatggagggcgtccacaccgtgcacgtcacgtttgccggcgtgcccatccctcgcagcccctacactgtcactgttggccaagcctgtaacccgagtgcctgccgggcggttggccggggcctccagcccaagggtgtgcgggtgaaggagacagctgacttcaaggtgtacacaaagggcgctggcagtggggagctgaaggtcaccgtgaagggccccaagggagaggagcgcgtgaagcagaaggacctgggggatggcgtgtatggcttcgagtattaccccatggtccctggaacctatatcgtcaccatcacgtggggtggtcagaacatcgggcgcagtcccttcgaagtgaaggtgggcaccgagtgtggcaatcagaaggtacgggcctggggccctgggctggagggcggcgtcgttggcaagtcagcagactttgtggtggaggctatcggggacgacgtgggcacgctgggcttctcggtggaagggccatcgcaggctaagatcgaatgtgacgacaagggcgacggctcctgtgatgtgcgctactggccgcaggaggctggcgagtatgccgttcacgtgctgtgcaacagcgaagacatccgcctcagccccttcatggctgacatccgtgacgcgccccaggacttccacccagacagggtgaaggcacgtgggcctggattggagaagacaggtgtggccgtcaacaagccagcagagttcacagtggatgccaagcacggtggcaaggccccacttcgggtccaagtccaggacaatgaaggctgccctgtggaggcgttggtcaaggacaacggcaatggcacttacagctgctcctacgtgcccaggaagccggtgaagcacacagccatggtgtcctggggaggcgtcagcatccccaacagccccttcagggtgaatgtgggagctggcagccaccccaacaaggtcaaagtatacggccccggagtagccaagacagggctcaaggcccacgagcccacctacttcactgtggactgcgccgaggctggccagggggacgtcagcatcggcatcaagtgtgcccctggagtggtaggccccgccgaagctgacatcgacttcgacatcatccgcaatgacaatgacaccttcacggtcaagtacacgccccggggggctggcagctacaccattatggtcctctttgctgaccaggccacgcccaccagccccatccgagtcaaggtggagccctctcatgacgccagtaaggtgaaggccgagggccctggcctcagtcgcactggtgtcgagcttggcaagcccacccacttcacagtaaatgccaaagctgctggcaaaggcaagctggacgtccagttctcaggactcaccaagggggatgcagtgcgagatgtggacatcatcgaccaccatgacaacacctacacagtcaagtacacgcctgtccagcagggtccagtaggcgtcaatgtcacttatggaggggatcccatccctaagagccctttctcagtggcagtatctccaagcctggacctcagcaagatcaaggtgtctggcctgggagagaaggtggacgttggcaaagaccaggagttcacagtcaaatcaaagggtgctggtggtcaaggcaaagtggcatccaagattgtgggcccctcgggtgcagcggtgccctgcaaggtggagccaggcctgggggctgacaacagtgtggtgcgcttcctgccccgtgaggaagggccctatgaggtggaggtgacctatgacggcgtgcccgtgcctggcagcccctttcctctggaagctgtggcccccaccaagcctagcaaggtgaaggcgtttgggccggggctgcagggaggcagtgcgggctcccccgcccgcttcaccatcgacaccaagggcgccggcacaggtggcctgggcctgacggtggagggcccctgtgaggcgcagctcgagtgcttggacaatggggatggcacatgttccgtgtcctacgtgcccaccgagcccggggactacaacatcaacatcctcttcgctgacacccacatccctggctccccattcaaggcccacgtggttccctgctttgacgcatccaaagtcaagtgctcaggccccgggctggagcgggccaccgctggggaggtgggccaattccaagtggactgctcgagcgcgggcagcgcggagctgaccattgagatctgctcggaggcggggcttccggccgaggtgtacatccaggaccacggtgatggcacgcacaccattacctacattcccctctgccccggggcctacaccgtcaccatcaagtacggcggccagcccgtgcccaacttccccagcaagctgcaggtggaacctgcggtggacacttccggtgtccagtgctatgggcctggtattgagggccagggtgtcttccgtgaggccaccactgagttcagtgtggacgcccgggctctgacacagaccggagggccgcacgtcaaggcccgtgtggccaacccctcaggcaacctgacggagacctacgttcaggaccgtggcgatggcatgtacaaagtggagtacacgccttacgaggagggactgcactccgtggacgtgacctatgacggcagtcccgtgcccagcagccccttccaggtgcccgtgaccgagggctgcgacccctcccgggtgcgtgtccacgggccaggcatccaaagtggcaccaccaacaagcccaacaagttcactgtggagaccaggggagctggcacgggcggcctgggcctggctgtagagggcccctccgaggccaagatgtcctgcatggataacaaggacggcagctgctcggtcgagtacatcccttatgaggctggcacctacagcctcaacgtcacctatggtggccatcaagtgccaggcagtcctttcaaggtccctgtgcatgatgtgacagatgcgtccaaggtcaagtgctctgggcccggcctgagcccaggcatggttcgtgccaacctccctcagtccttccaggtggacacaagcaaggctggtgtggccccattgcaggtcaaagtgcaagggcccaaaggcctggtggagccagtggacgtggtagacaacgctgatggcacccagaccgtcaattatgtgcccagccgagaagggccctacagcatctcagtactgtatggagatgaagaggtaccccggagccccttcaaggtcaaggtgctgcctactcatgatgccagcaaggtgaaggccagtggccccgggctcaacaccactggcgtgcctgccagcctgcccgtggagttcaccatcgatgcaaaggacgccggggagggcctgctggctgtccagatcacggatcccgaaggcaagccgaagaagacacacatccaagacaaccatgacggcacgtatacagtggcctacgtgccagacgtgacaggtcgctacaccatcctcatcaagtacggtggtgacgagatccccttctccccgtaccgcgtgcgtgccgtgcccaccggggacgccagcaagtgcactgtcacagtgtcaatcggaggtcacgggctaggtgctggcatcggccccaccattcagattggggaggagacggtgatcactgtggacactaaggcggcaggcaaaggcaaagtgacgtgcaccgtgtgcacgcctgatggctcagaggtggatgtggacgtggtggagaatgaggacggcactttcgacatcttctacacggccccccagccgggcaaatacgtcatctgtgtgcgctttggtggcgagcacgtgcccaacagccccttccaagtgacggctctggctggggaccagccctcggtgcagccccctctacggtctcagcagctggccccacagtacacctacgcccagggcggccagcagacttgggccccggagaggcccctggtgggtgtcaatgggctggatgtgaccagcctgaggccctttgaccttgtcatccccttcaccatcaagaagggcgagatcacaggggaggttcggatgccctcaggcaaggtggcgcagcccaccatcactgacaacaaagacggcaccgtgaccgtgcggtatgcacccagcgaggctggcctgcacgagatggacatccgctatgacaacatgcacatcccaggaagccccttgcagttctatgtggattacgtcaactgtggccatgtcactgcctatgggcctggcctcacccatggagtagtgaacaagcctgccaccttcaccgtcaacaccaaggatgcaggagaggggggcctgtctctggccattgagggcccgtccaaagcagaaatcagctgcactgacaaccaggatgggacatgcagcgtgtcctacctgcctgtgctgccgggggactacagcattctagtcaagtacaatgaacagcacgtcccaggcagccccttcactgctcgggtcacaggtgacgactccatgcgtatgtcccacctaaaggtcggctctgctgccgacatccccatcaacatctcagagacggatctcagcctgctgacggccactgtggtcccgccctcgggccgggaggagccctgtttgctgaagcggctgcgtaatggccacgtggggatttcattcgtgcccaaggagacgggggagcacctggtgcatgtgaagaaaaatggccagcacgtggccagcagccccatcccggtggtgatcagccagtcggaaattggggatgccagtcgtgttcgggtctctggtcagggccttcacgaaggccacacctttgagcctgcagagtttatcattgatacccgcgatgcaggctatggtgggctcagcctgtccattgagggccccagcaaggtggacatcaacacagaggacctggaggacgggacgtgcagggtcacctactgccccacagagccaggcaactacatcatcaacatcaagtttgccgaccagcacgtgcctggcagccccttctctgtgaaggtgacaggcgagggccgggtgaaagagagcatcacccgcaggcgtcgggctccttcagtggccaacgttggtagtcattgtgacctcagcctgaaaatccctgaaattagcatccaggatatgacagcccaggtgaccagcccatcgggcaagacccatgaggccgagatcgtggaaggggagaaccacacctactgcatccgctttgttcccgctgagatgggcacacacacagtcagcgtcaagtacaagggccagcacgtgcctgggagccccttccagttcaccgtggggcccctaggggaagggggagcccacaaggtccgagctgggggccctggcctggagagagctgaagctggagtgccagccgaattcagtatctggacccgggaagctggtgctggaggcctggccattgctgtcgagggccccagcaaggctgagatctcttttgaggaccgcaaggacggctcctgtggtgtggcttatgtggtccaggagccaggtgactacgaagtctcagtcaagttcaacgaggaacacattcccgacagccccttcgtggtgcctgtggcttctccgtctggcgacgcccgccgcctcactgtttctagccttcaggagtcagggctaaaggtcaaccagccagcctcttttgcagtcagcctgaacggggccaagggggcgatcgatgccaaggtgcacagcccctcaggagccctggaggagtgctatgtcacagaaattgaccaagataagtatgctgtgcgcttcatccctcgggagaatggcgtttacctgattgacgtcaagttcaacggtacccacatccctggaagccccttcaagatccgagttggggagcctgggcatggaggggacccaggcttggtgtctgcttacggagcaggtctggaaggcggtgtcacagggaacccagctgagttcgtcgtgaacacgagcaatgcgggagctggtgccctgtcggtgaccattgacggcccctccaaggtgaagatggattgccaggagtgccctgagggctaccgcgtcacctatacccccatggcacctggcagctacctcatctccatcaagtacggcggcccctaccacattgggggcagccccttcaaggccaaagtcacaggcccccgtctcgtcagcaaccacagcctccacgagacatcatcagtgtttgtagactctctgaccaaggccacctgtgccccccagcatggggccccgggtcctgggcctgctgacgccagcaaggtggtggccaagggcctggggctgagcaaggcctacgtaggccagaagagcagcttcacagtagactgcagcaaagcaggcaacaacatgctgctggtgggggttcatggcccaaggaccccctgcgaggagatcctggtgaagcacgtgggcagccggctctacagcgtgtcctacctgctcaaggacaagggggagtacacactggtggtcaaatgggggcacgagcacatcccaggcagcccctaccgcgttgtggtgccctgagtctggggcccgtgccagccggcagcccccaagcctgccccgctacccaagcagccccgccctcttcccctcaaccccggcccaggccgccctggccgcccgcctgtcactgcagctgcccctgccctgtgccgtgctgcgctcacctgcctccccagccagccgctgacctctcggctttcacttgggcagagggagccatttggtggcgctgcttgtcttctttggttctgggaggggtgagggatgggg

SEQ ID NO: 224 - protein, 2000 aa, Homo sapien
MSSSHSRAGQSAAGAAPGGGVDTRDAEMPATEKDLAEDAPWKKIQQNTFTRWCNEHLKCVSKRIANLQTDLSDGLRLIALLEVLSQKKMHRKHNQRPTFRQMQLENVSVALEFLDRESIKLVSIDSKAIVDGNLKLILGLIWTLILHYSISMPMWDEEEDEEAKKQTPKQRLLGWIQNKLPQLPITNFSRDWQSGRALGALVDSCAPGLCPDWDSWDASKPVTNAREAMQQADDWLGIPQVITPEEIVDPNVDEHSVMTYLSQFPKAKLKPGAPLRPKLNPKKARAYGPGIEPTGNMVKKRAEFTVETRSAGQGEVLVYVEDPAGHQEEAKVTANNDKNRTFSVWYVPEVTGTHKVTVLFAGQHIAKSPFEVYVDKSQGDASKVTAQGPGLEPSGNIANKTTYFEIFTAGAGTGEVEVVIQDPMGQKGTVEPQLEARGDSTYRCSYQPTMEGVHTVHVTFAGVPIPRSPYTVTVGQACNPSACRAVGRGLQPKGVRVKETADFKVYTKGAGSGELKVTVKGPKGEERVKQKDLGDGVYGFEYYPMVPGTYIVTITWGGQNIGRSPFEVKVGTECGNQKVRAWGPGLEGGVVGKSADFVVEAIGDDVGTLGFSVEGPSQAKIECDDKGDGSCDVRYWPQEAGEYAVHVLCNSEDIRLSPFMADIRDAPQDFHPDRVKARGPGLEKTGVAVNKPAEFTVDAKHGGKAPLRVQVQDNEGCPVEALVKDNGNGTYSCSYVPRKPVKHTAMVSWGGVSIPNSPFRVNVGAGSHPNKVKVYGPGVAKTGLKAHEPTYFTVDCAEAGQGDVSIGIKCAPGVVGPAEADIDFDIIRNDNDTFTVKYTPRGAGSYTIMVLFADQATPTSPIRVKVEPSHDASKVKAEGPGLSRTGVELGKPTHFTVNAKAAGKGKLDVQFSGLTKGDAVRDVDIIDHHDNTYTVKYTPVQQGPVGVNVTYGGDPIPKSPFSVAVSPSLDLSKIKVSGLGEKVDVGKDQEFTVKSKGAGGQGKVASKIVGPSGAAVPCKVEPGLGADNSVVRFLPREEGPYEVEVTYDGVPVPGSPFPLEAVAPTKPSKVKAFGPGLQGGSAGSPARFTIDTKGAGTGGLGLTVEGPCEAQLECLDNGDGTCSVSYVPTEPGDYNINILFADTHIPGSPFKAHVVPCFDASKVKCSGPGLERATAGEVGQFQVDCSSAGSAELTIEICSEAGLPAEVYIQDHGDGTHTITYIPLCPGAYTVTIKYGGQPVPNFPSKLQVEPAVDTSGVQCYGPGIEGQGVFREATTEFSVDARALTQTGGPHVKARVANPSGNLTETYVQDRGDGMYKVEYTPYEEGLHSVDVTYDGSPVPSSPFQVPVTEGCDPSRVRVHGPGIQSGTTNKPNKFTVETRGAGTGGLGLAVEGPSEAKMSCMDNKDGSCSVEYIPYEAGTYSLNVTYGGHQVPGSPFKVPVHDVTDASKVKCSGPGLSPGMVRANLPQSFQVDTSKAGVAPLQVKVQGPKGLVEPVDVVDNADGTQTVNYVPSREGPYSISVLYGDEEVPRSPFKVKVLPTHDASKVKASGPGLNTTGVPASLPVEFTIDAKDAGEGLLAVQITDPEGKPKKTHIQDNHDGTYTVAYVPDVTGRYTILIKYGGDEIPFSPYRVRAVPTGDASKCTVTVSIGGHGLGAGIGPTIQIGEETVITVDTKAAGKGKVTCTVCTPDGSEVDVDVVENEDGTFDIFYTAPQPGKYVICVRFGGEHVPNSPFQVTALAGDQPSVQPPLRSQQLAPQYTYAQGGQQTWAPERPLVGVNGLDVTSLRPFDLVIPFTIKKGEITGEVRMPSGKVAQPTITDNKDGTVTVRYAPSEAGLHEMDIRYDNMHIPGSPLQFYVDYVNCGHVTAYGPGLTHGVVNKPATFTVNTKDAGEGGLSLAIEGPSKAEISCTDNQDGTCSVSYLPVLPGDYSILVKYNEQHVPGSPFTARVTGDDSMRMSHLKVGSAADIPINISETDLSLLTATVVPPSGREEPCLLK

SEQ ID NO: 225 - DNA, 4248 bp, Homo sapien
cccgggctgtgggctacaggcgcagagcgggccaggcgcggagctggcggcagtgacaggaggcgcgaacccgcagcgcttaccgcgcggcgccgcaccatggagcccgccgtgtcgctggccgtgtgcgcgctgctcttcctgctgtgggtgcgcctgaaggggctggagttcgtgctcatccaccagcgctgggtgttcgtgtgcctcttcctcctgccgctctcgcttatcttcgatatctactactacgtgcgcgcctgggtggtgttcaagctcagcagcgctccgcgcctgcacgagcagcgcgtgcgggacatccagaagcaggtgcgggaatggaaggagcagggtagcaagaccttcatgtgcacggggcgccctggctggctcactgtctcactacgtgtcgggaagtacaagaagacacacaaaaacatcatgatcaacctgatggacattctggaagtggacaccaagaaacagattgtccgtgtggagcccttggtgaccatgggccaggtgactgccctgctgacctccattggctggactctccccgtgttgcctgagcttgatgacctcacagtggggggcttgatcatgggcacaggcatcgagtcatcatcccacaagtacggcctgttccaacacatctgcactgcttacgagctggtcctggctgatggcagctttgtgcgatgcactccgtccgaaaactcagacctgttctatgccgtaccctggtcctgtgggacgctgggtttcctggtggccgctgagatccgcatcatccctgccaagaagtacgtcaagctgcgtttcgagccagtgcggggcctggaggctatctgtgccaagttcacccacgagtcccagcggcaggagaaccacttcgtggaagggctgctctactccctggatgaggctgtcattatgacaggggtcatgacagatgaggcagagcccagcaagctgaatagcattggcaattactacaagccgtggttctttaagcatgtggagaactatctgaagacaaaccgagagggcctggagtacattcccttgagacactactaccaccgccacacgcgcagcatcttctgggagctccaggacatcatcccctttggcaacaaccccatcttccgctacctctttggctggatggtgcctcccaagatctccctcctgaagctgacccagggtgagaccctgcgcaagctgtacgagcagcaccacgtggtgcaggacatgctggtgcccatgaagtgcctgcagcaggccctgcacaccttccaaaacgacatccacgtctaccccatctggctgtgtccgttcatcctgcccagccagccaggcctagtgcaccccaaaggaaatgaggcagagctctacatcgacattggagcatatggggagccgcgtgtgaaacactttgaagccaggtcctgcatgaggcagctggagaagtttgtccgcagcgtgcatggcttccagatgctgtatgccgactgctacatgaaccgggaggagttctgggagatgtttgatggctccttgtaccacaagctgcgagagaagctgggttgccaggacgccttccccgaggtgtacgacaagatctgcaaggccgccaggcactgagctggagcccgcctggagagacagacacgtgtgagtggtcaggcatcttcccttcactcaagcttggctgctttcctagatccacactttcaaagagaaacccctccagaactcccaccctgacagcccaacaccaccttcctcctggcttccagggggcagcccagtggaatggaaagaatgtgggatttggagtcagacaagcctgagtccagttccccgtttagaactcattagctgtgtgactctgggtgagtcccttaacccctctgagcccgggtctcttcattagttgaaagggatagtaatacctacttgcaggttgttgtcatctgagttgagcactggtcacattgaaggtgctgggtaagtggtagctcttgttgcttcccgttcagcgtcacatctgcagtggagcctgaaaaggctccacattaggtcacctgtgcacagccatggctggaatgatgaaggggatacgctggagttgccctgccatcgcctccatcagccagacgaggtcctcacaggagaaggacagctcttccccaccctgggatctcaggagggcagccacggagtggggaggccccagatgcgctgtgccaaagccaggtccgaggccaaagttctccctgccatccttggtgccgtcctgccccttcctccttcatgcctgggcctgcaggcccaccccagccaccactgagtccactcggagtgccctgtgttcctggagaaggcattccagggttgaatcttgtcccagcctcagcctgggacacctaggtggagagagtggtctccgctctgaattggatccaggggacctgggctcattcttcttggctcaccaaccctgcaggcctcatctttcccaaaacccactttgtcttggtgggagtgggtccgcgctgctctgcagcaggggctggggagtggacagcatcaggtgggaaagtggagtccaccctcatgtttctgtaggattctcaccgtggggctggaagaaaagagcatcgacttgatttctccaaccactcatccctctttttctttcttccaccactccccaccccagctgtagttaatttcagtgccttacaaatcctaagctcagagaaagttccatttccgttccagagggaagggaacctccctaggtccttccctggcttgttataacgcaaagcttggttgtttatgcaactctatcttaagaactgcccagcctcagctgaaaacccgaatctgagaaggaattgcgtcatgtaagggaagctggaattaagggagctgagccagtcatggttgtggcgtgtgagtcaggagacctaggtttcagcccctctctactgtcagcgagctgtgcaacgtgggcaagtcattgtcctctgagctgcagtttcctcatctgtcacatcgctacagacaagacctccctggaacccttctgattgtcttagacactgtggttgcaaaacccacggaaagcctcatttgtgtggaaagtcagaggaaaaatgatccagtggacacttggggattatctgtcattcaagatccttccttcaaccccaaggccagctcccatctcatttccagaaaggctcatacctggcttgcagggaagcatctgtcttgtcattccaggtgccagaatcctctcagagtcattgaagggtgttcacccatcccacccaaggcttggcacactgccagtgtcttagcagggtcttgtgagggctgggggcatccaggcactcagaaggcaaaggaaccaccctacccatttggcctctggagggggcagaagaaagaaagaaacctcatcctatattttacaaagcatgtgaattctggcattagctctcataggagacccatgtgcttccttgctcagtgcaaaactgatgattctacttgctgtagatgaatggttaacacgagctagttaaacagtgccattgttttgccagtgaagcctccaaccctaagccactgggacggtggccagagatgccagcagcctctgtcgcccttagtcatataaccaaaatccagaccttatccacaacccggggcttggaaaggaaggtattttggaatcacaccctccggttatgttgctccagtaaaatcttgcctggaaagaggcagtcttcttagcatggtgagctgagttcatggcttttttttgtagccagtcctgtccctggccatccatgtgatggttttggatggagttaaacttgatgccagtgggcagtgcatgtggaaagtatcagagtaagcctctcccctccagagccctgagtttcttggctgcatgaaggttttctttagaatcagaattgtagccagtttctttggccagaaggatgaatacttggatattactgaaagggaggggtggagatgggtgtggcagtgtatggtgtgtgatttttattttcttctttggtcatgggggccaaggagaaaggcatgaatcttccctgtcaggctcttacagccacaggcactgtgtctactgtctggaagacatgtccccgtggctgtggggccgctgcttctgtttaaataaaagtggcctgg

SEQ ID NO: 226 - protein, 516 aa, Homo sapien
MEPAVSLAVCALLFLLWVRLKGLEFVLIHQRWVFVCLFLLPLSLIFDIYYYVRAWVVFKLSSAPRLHEQRVRDIQKQVREWKEQGSKTFMCTGRPGWLTVSLRVGKYKKTHKNIMINLMDILEVDTKKQIVRVEPLVTMGQVTALLTSIGWTLPVLPELDDLTVGGLIMGTGIESSSHKYGLFQHICTAYELVLADGSFVRCTPSENSDLFYAVPWSCGTLGFLVAAEIRIIPAKKYVKLRFEPVRGLEAICAKFTHESQRQENHFVEGLLYSLDEAVIMTGVMTDEAEPSKLNSIGNYYKPWFFKHVENYLKTNREGLEYIPLRHYYHRHTRSIFWELQDIIPFGNNPIFRYLFGWMVPPKISLLKLTQGETLRKLYEQHHVVQDMLVPMKCLQQALHTFQNDIHVYPIWLCPFILPSQPGLVHPKGNEAELYIDIGAYGEPRVKHFEARSCMRQLEKFVRSVHGFQMLYADCYMNREEFWEMFDGSLYHKLREKLGCQDAFPEVYDKICKAARH

SEQ ID NO: 227 - DNA, 2767 bp, Homo sapien
gggcgggcgcattgcagactgcggagtcagacggtgctatgtacgccctcttcctcctggccagcctcctgggcgcggctctagccggcccggtccttggactgaaagaatgcaccaggggctcggcagtgtggtgccagaatgtgaagacggcgtccgactgcggggcagtgaagcactgcctgcagaccgtttggaacaagccaacagtgaaatcccttccctgcgacatatgcaaagacgttgtcaccgcagctggtgatatgctgaaggacaatgccactgaggaggagatccttgtttacttggagaagacctgtgactggcttccgaaaccgaacatgtctgcttcatgcaaggagatagtggactcctacctccctgtcatcctggacatcattaaaggagaaatgagccgtcctggggaggtgtgctctgctctcaacctctgcgagtctctccagaagcacctagcagagctgaatcaccagaagcagctggagtccaataagatcccagagctggacatgactgaggtggtggcccccttcatggccaacatccctctcctcctctaccctcaggacggcccccgcagcaagccccagccaaaggataatggggacgtttgccaggactgcattcagatggtgactgacatccagactgctgtacggaccaactccacctttgtccaggccttggtggaacatgtcaaggaggagtgtgaccgcctgggccctggcatggccgacatatgcaagaactatatcagccagtattctgaaattgctatccagatgatgatgcacatgcaacccaaggagatctgtgcgctggttgggttctgtgatgaggtgaaagagatgcccatgcagactctggtccccgccaaagtggcctccaagaatgtcatccctgccctggaactggtggagcccattaagaagcacgaggtcccagcaaagtctgatgtttactgtgaggtgtgtgaattcctggtgaaggaggtgaccaagctgattgacaacaacaagactgagaaagaaatactcgacgcttttgacaaaatgtgctcgaagctgccgaagtccctgtcggaagagtgccaggaggtggtggacacgtacggcagctccatcctgtccatcctgctggaggaggtcagccctgagctggtgtgcagcatgctgcacctctgctctggcacgcggctgcctgcactgaccgttcacgtgactcagccaaaggacggtggcttctgcgaagtgtgcaagaagctggtgggttatttggatcgcaacctggagaaaaacagcaccaagcaggagatcctggctgctcttgagaaaggctgcagcttcctgccagacccttaccagaagcagtgtgatcagtttgtggcagagtacgagcccgtgctgatcgagatcctggtggaggtgatggatccttccttcgtgtgcttgaaaattggagcctgcccctcggcccataagcccttgttgggaactgagaagtgtatatggggcccaagctactggtgccagaacacagagacagcagcccagtgcaatgctgtcgagcattgcaaacgccatgtgtggaactaggaggaggaatattccatcttggcagaaaccacagcattggtttttttctacttgtgtgtctgggggaatgaacgcacagatctgtttgactttgttataaaaatagggctcccccacctcccccatttctgtgtcctttattgtagcattgctgtctgcaagggagcccctagcccctagcccctggcagacatagctgcttcagtgccccttttctctctgctagatggatgttgatgcactggaggtcttttagcctgcccttgcatggcgcctgctggaggaggagagagctctgctggcatgagccacagtttcttgactggaggccatcaaccctcttggttgaggccttgttctgagccctgacatgtgcttgggcactggtgggcctgggcttctgaggtggcctcctgccctgatcagggaccctccccgctttcctgggcctctcagttgaacaaagcagcaaaacaaaggcagttttatatgaaagattagaagcctggaataatcaggctttttaaatgatgtaattcccactgtaatagcatagggattttggaagcagctgctggtggcttgggacatcagtggggccaagggttctctgtccctggttcaactgtgatttggctttcccgtgtctttcctggtgatgccttgtttggggttctgtgggtttgggtgggaagagggccatctgcctgaatgtaacctgctagctctccgaagccctgcgggcctggcttgtgtgagcgtgtggacagtggtggccgcgctgtgcctgctcgtgttgcctacatgtccctggctgttgaggcgctgcttcagcctgcacccctcccttgtctcatagatgctccttttgaccttttcaaataaatatggatggcgagctcctaggcctctggcttcctggtagagggcggcatgccgaagggtctgtctgggtgtggattggatgctgggggtgtgggggttggaagctgtctgtggcccacttgggcacccacgcttctgtccacttctggttgccaggagacagcaagcaaagccagcaggacatgaagttgctattaaatggacttcgtgatttttgttttgcactaaagtttctgtgatttaacaataaaattctgttagcccccccg

SEQ ID NO: 228 - protein, 524 aa, Homo sapien
MYALFLLASLLGAALAGPVLGLKECTRGSAVWCQNVKTASDCGAVKHCLQTVWNKPTVKSLPCDICKDVVTAAGDMLKDNATEEEILVYLEKTCDWLPKPNMSASCKEIVDSYLPVILDIIKGEMSRPGEVCSALNLCESLQKHLAELNHQKQLESNKIPELDMTEVVAPFMANIPLLLYPQDGPRSKPQPKDNGDVCQDCIQMVTDIQTAVRTNSTFVQALVEHVKEECDRLGPGMADICKNYISQYSEIAIQMMMHMQPKEICALVGFCDEVKEMPMQTLVPAKVASKNVIPALELVEPIKKHEVPAKSDVYCEVCEFLVKEVTKLIDNNKTEKEILDAFDKMCSKLPKSLSEECQEVVDTYGSSILSILLEEVSPELVCSMLHLCSGTRLPALTVHVTQPKDGGFCEVCKKLVGYLDRNLEKNSTKQEILAALEKGCSFLPDPYQKQCDQFVAEYEPVLIEILVEVMDPSFVCLKIGACPSAHKPLLGTEKCIWGPSYWCQNTETAAQCNAVEHCKRHVWN

SEQ ID NO: 229 - DNA, 2767 bp, Homo sapien; identical to SEQ ID NO: 227

SEQ ID NO: 230 - protein, 524 aa, Homo sapien; identical to SEQ ID NO: 228

SEQ ID NO: 231 - DNA, 649 bp, Homo sapien
agaatacactcacaagccactccgctgctcgcctctccgccccgcgtccagctcgcccagctcgcccagcgtccgccgcgcctcgccaaggcttcaacggaccacaccaaaatgccatctcaaatggaacacgccatggaaaccatgatgtttacatttcacaaattcgctggggataaaggctacttaacaaaggaggacctgagagtactcatggaaaaggagttccctggatttttggaaaatcaaaaagaccctctggctgtggacaaaataatgaaggacctggaccagtgtagagatggcaaagtgggcttccagagcttcttttccctaattgcgggcctcaccattgcatgcaatgactattttgtagtacacatgaagcagaagggaaagaagtaggcagaaatgagcagttcgctcctccctgataagagttgtccaaagggtcgcttaaggaatctgccccacagcttcccccatagaaggatttcatgagcagatcaggacacttagcaaatgtaaaaataaaatctaactctcatttgacaagcagagaaagaaaagttaaataccagataagcttttgatttttgtattgtttgcatccccttgccctcaataaataaagttcttttttagttcc

SEQ ID NO: 232 - protein, 97 aa, Homo sapien
MPSQMEHAMETMMFTFHKFAGDKGYLTKEDLRVLMEKEFPGFLENQKDPLAVDKIMKDLDQCRDGKVGFQSFFSLIAGLTIACNDYFVVHMKQKGKK

SEQ ID NO: 233 - DNA, 1973 bp, Homo sapien
ggatccggcaacgaaggtaccatggcgggacgtggcgccatggtgctgttgcacgtgctgtttgagcacgcggtcggctacgcgctcgtggcgctgaaggaagtggaggagatcagtctgctgcagccgcaggtggaggagtccgtgctcaacctgggcaaattccacagcatcgttcgtctggtggccttttgtccctttgcctcatcccaggttgccttggaaaatgccaacgccgtgtctgaaggggttgttcatgaggacctccgcctgctcttggagacccacctgccgtccaaaaagaagaaagtactcttgggagttggggatcccaagattggtgccgcaatacaggaggagttagggtacaactgccagactggaggagtcatagctgagatcctgcgaggagttcgtctgcacttccacaatctggtgaagggtctgaccgatctgtcagcttgtaaagcacagctggggctgggacacagctattcccgtgccaaagttaagtttaatgtgaaccgggtggacaatatgatcatccagtccattagcctcctggaccagctggataaggacatcaataccttctctatgcgtgtcagggagtggtacgggtatcactttccggagctggtgaagatcatcaacgacaatgccacatactgccgtcttgcccagtttattggaaaccgaagggaactgaatgaggacaagctggagaagctggaggagctgacaatggatggggccaaggctaaggctattctggatgcctcacggtcctccatgggcatggacatatctgccattgacttgataaacatcgagagcttctccagtcgtgtggtgtctttatctgaataccgccagagcctacacacttacctgcgctccaagatgagccaagtagcccccagcctgtcagccctaattggggaagcggtaggtgcacgtctcatcgcacatgctggcagcctcaccaacctggccaagtatccagcatccacagtgcagatccttggggctgaaaaggccctgttcagagccctgaagacaaggggtaacactccaaaatatggactcattttccactccaccttcattggccgagcagctgccaagaacaaaggccgcatctcccgatacctggcaaacaaatgcagtattgcctcacgaatcgattgcttctctgaggtgcccacgagtgtattcggggagaagcttcgagaacaagttgaagagcgactgtccttctatgagactggagagataccacgaaagaatctggatgtcatgaaggaagcaatggttcaggcagaggcagaggaagcggctgctgagattactaggaagctggagaaacaggagaagaaacgcttaaagaaggaaaagaaacggctggctgcacttgccctcgcgtcttcagaaaacagcagtagtactccagaggagtgtgaggagacgagtgaaaaacccaaaaagaagaaaaagcaaaagccccaggaggttcctcaggagaatggaatggaagacccatctatctctttctccaaacccaagaaaaagaaatctttttccaaggaggagttgatgagtagcgatcttgaagagaccgctggcagcaccagtattcccaagaggaagaagtctacacccaaggaggaaacagttaatgaccctgaggaggcaggccacagaagtcggtccaagaaaaagaggaaattctccaaagaggagccggtcagcagtgggcctgaagaggcggttggcaagagcagctccaagaagaagaaaaagttccataaagcatcccaggaagattagaatgcaaatggacattctctgggaggtggggcataccatagcccaaggtgacatttcccaccctgtgcccgtgttcccaataaaaacaaattcacaagaaaaaaaaaaaaaaaaaaaaaattcctgaggccgcaagggaattc

SEQ ID NO: 234 - protein, 602 aa, Homo sapien
MAGRGAMVLLHVLFEHAVGYALVALKEVEEISLLQPQVEESVLNLGKFHSIVRLVAFCPFASSQVALENANAVSEGVVHEDLRLLLETHLPSKKKKVLLGVGDPKIGAAIQEELGYNCQTGGVIAEILRGVRLHFHNLVKGLTDLSACKAQLGLGHSYSRAKVKFNVNRVDNMIIQSISLLDQLDKDINTFSMRVREWYGYHFPELVKIINDNATYCRLAQFIGNRRELNEDKLEKLEELTMDGAKAKAILDASRSSMGMDISAIDLINIESFSSRVVSLSEYRQSLHTYLRSKMSQVAPSLSALIGEAVGARLIAHAGSLTNLAKYPASTVQILGAEKALFRALKTRGNTPKYGLIFHSTFIGRAAAKNKGRISRYLANKCSIASRIDCFSEVPTSVFGEKLREQVEERLSFYETGEIPRKNLDVMKEAMVQAEAEEAAAEITRKLEKQEKKRLKKEKKRLAALALASSENSSSTPEECEETSEKPKKKKKQKPQEVPQENGMEDPSISFSKPKKKKSFSKEELMSSDLEETAGSTSIPKRKKSTPKEETVNDPEEAGHRSRSKKKRKFSKEEPVSSGPEEAVGKSSSKKKKKFHKASQED

SEQ ID NO: 235 - DNA, 1883 bp, Homo sapien
atgcccgagaatgtggcaccccggagcggggcgactgccggggctgccggcggccgcgggaaaggcgcctatcaggaccgcgacaagccagcccagatccgcttcagcaacatttccgccgccaaagcggttgctgatgctattagaacaagccttggaccaaaaggaatggataaaatgattcaagatggaaaaggtgatgtaaccattacaaatgatggtgctaccattctgaaacaaatgcaagtattacatccagcagccagaatgctggtggagctgtctaaggctcaagatatagaagcaggagatggcaccacatcagtagtcatcattgctggctccctcttagattcttgtaccaagcttcttcagaaagggattcatccaaccatcatttctgagtcattccagaaggccctggaaaagggcattgaaatcttgactgacatgtctcgacctgtggaactgagtgacagagaaactttgttaaatagtgcaaccacttcactgaactcaaaggtggtttctcagtattcaagtctgctttctccaatgagtgtaaatgcagtgatgaaagtgattgacccagccacagccaccagtgtagatcttagagatattaaaatagttaagaagcttggtgggacaattgatgactgtgagttggtggaagggctggttctcacccaaaaagtgtcaaattctggcataaccagagttgaaaaggccaagattgggcttattcagttttgcttatctgctcccaaaacagacatggataatcaaatagtggtttctgactatgcccagatggaccgagtgctgcgagaagagagagcctatattttaaatttagtgaagcaaattaaaaaaacaggatgtaatgtccttctcatacagaaatctattctaagagatgctcttagtgatcttgcattacactttctgaataaaatgaagatcatggtgattaaggatattgaaagagaagacattgaattcatttgtaagacaattggaaccaagccagttgctcatattgaccaatttactgctgacatgctgggttctgctgagttagctgaggaggtcaatttaaatggttctggcaaactgctcaagattacaggctgtgccagccctggaaaaacagttacaattgttgttcgtggttctaacaaactggtgattgaagaagctgagcgctccattcatgatgccctatgtgttattcgttgtttagtgaagaagagggctcttattgcaggaggtggtgctccagaaatagagttggccctagcattaactgaatattcacgaacactgagtggtatggaatcctactgcgttcgtgcttttgcagatgctatggaggtcattccatctacactagctgaaaatgccggcctgaatcccatttctacagtaacagaactaagaaaccggcatgcccagggagaaaaaactgcaggcattaatgtccgaaagggtggtatttccaacattttggaggaactggttgtccagcctctgttggtatcagtcagtgctctgactcttgcaactgaaactgttcggagcattctgaaaatagatgatgtggtaaacactcgataatctggataactgactagcaccattatgatcaccagtattgtggctggaatggaagaagatcaccttggtgttccttgtttggaagattatttcctctgaatttctgggcttggtcttccagttggcatttgcctgaagttgtattgaaacaatttaatgaaaatattaaatatttggtttcaaaaggcagatttatcttctcccaacattctgttatttctgatacttttgaaaaactaataaaaactaataaaagaagcgta

SEQ ID NO: 236 - protein, 539 aa, Homo sapien
MPENVAPRSGATAGAAGGRGKGAYQDRDKPAQIRFSNISAAKAVADAIRTSLGPKGMDKMIQDGKGDVTITNDGATILKQMQVLHPAARMLVELSKAQDIEAGDGTTSVVIIAGSLLDSCTKLLQKGIHPTIISESFQKALEKGIEILTDMSRPVELSDRETLLNSATTSLNSKVVSQYSSLLSPMSVNAVMKVIDPATATSVDLRDIKIVKKLGGTIDDCELVEGLVLTQKVSNSGITRVEKAKIGLIQFCLSAPKTDMDNQIVVSDYAQMDRVLREERAYILNLVKQIKKTGCNVLLIQKSILRDALSDLALHFLNKMKIMVIKDIEREDIEFICKTIGTKPVAHIDQFTADMLGSAELAEEVNLNGSGKLLKITGCASPGKTVTIVVRGSNKLVIEEAERSIHDALCVIRCLVKKRALIAGGGAPEIELALALTEYSRTLSGMESYCVRAFADAMEVIPSTLAENAGLNPISTVTELRNRHAQGEKTAGINVRKGGISNILEELVVQPLLVSVSALTLATETVRSILKIDDVVNTR

SEQ ID NO: 237 - DNA, 975 bp, Homo sapien
gggggggaagtgctctaacttttcttaaggttttgttgctagcccttcaagtgcactgagctatgtgactcggatggtctttcacacggcacatttggacatttccagaactaccatgagatggtttagacgggaattcatgcaaatgaggggtcaaaaatggtatagtgaccccgtccacgtcctccaagctcacgaccttggagccccgtggagctggactgaggaggaggctgcacagcgggagagcagctggtccagaccagccctgcagcccccactcagccggcagccagatggccccgcaaggcctccagggatggcccctagccacaggccctggctgaggtctctgggtcggtcagtgacatgtaggtaggaagcactgaaaatagtgttcccagagcactttgcaactccctgggtaagagggacgacacctctggtttttcaataccaattacatggaacttttctgtaatgggtacaatgaagaagtttctaaaaacacacacaaagcacattgggccaactatttagtaagcccggatagacttattgccaaaaacaaaaaatagctttcaaaagaaatttaagttctatgagaaattccttagtcatggtgttgcgtaaatcatattttagctgcacggcattaccccacacagggtggcagaacttgaagggttactgacgtgtaaatgctggtatttgatttcctgtgtgtgttgccctggcattaagggcattttacccttgcagttttactaaaacactgaaaaatattccaagcttcatattaaccctacctgtcaacgtaacgatttcatgaacgttattatattgtcgaattcctactgacaacattataactgtatgggagcttaactttataaggaaatgtattttgacactggtatcttattaaagtattctgatcctaccaaaaaaaaaaaaaaaaaaaaaaaaaaaaaa

SEQ ID NO: 238 - protein, 101 aa, Homo sapien
MVFHTAHLDISRTTMRWFRREFMQMRGQKWYSDPVHVLQAHDLGAPWSWTEEEAAQRESSWSRPALQPPLSRQPDGPARPPGMAPSHRPWLRSLGRSVTCR

SEQ ID NO: 239 - DNA, 2518 bp, Homo sapien
ctgcggcgcgccgggcggaactttctagaacgctcggtgagaggcggaggagcggtaactaccccggctgcgcacagctcggcgctccttcccgctccctcacacaccggcctcagcccgcaccggcagtagaagatggtgaaagaaacaacttactacgatgttttgggggtcaaacccaatgctactcaggaagaattgaaaaaggcttataggaaactggctttgaagtaccatcctgataagaacccaaatgaaggagagaagtttaaacagatttctcaagcttacgaagttctctctgatgcaaagaaaagggaattatatgacaaaggaggagaacaggcaattaaagagggtggagcaggtggcggttttggctcccccatggacatctttgatatgttttttggaggaggaggaaggatgcagagagaaaggagaggtaaaaatgttgtacatcagctctcagtaaccctagaagacttatataatggtgcaacaagaaaactggctctgcaaaagaatgtgatttgtgacaaatgtgaaggtagaggaggtaagaaaggagcagtagagtgctgtcccaattgccgaggtactggaatgcaaataagaattcatcagataggacctggaatggttcagcaaattcagtctgtgtgcatggagtgccagggccatggggagcggatcagtcctaaagatagatgtaaaagctgcaacggaaggaagatagttcgagagaagaaaattttagaagttcatattgacaaaggcatgaaagatggccagaagataacattccatggtgaaggagaccaagaaccaggactggagccaggcgatattatcattgtgttagatcagaaggaccatgctgtttttactcgacgaggagaagaccttttcatgtgtatggacatacagctcgttgaagcactgtgtggcttccagaagccaatatctactcttgacaaccgaaccatcgtcatcacctctcatccaggtcagattgtcaagcatggagatatcaagtgtgtactaaatgaaggcatgccaatttatcgtagaccatatgaaaagggtcgcctaatcatcgaatttaaggtaaactttcctgagaatggctttctctctcctgataaactgtctttgctggaaaaactcctacccgagaggaaggaagtggaagagactgatgagatggaccaagtagaactggtggactttgatccaaatcaggaaagacggcgccactacaatggagaagcatatgaggatgatgaacatcatcccagaggtggtgttcagtgtcagacctcttaatgggccagtgaataacactcactgctggcatttaatgtgcagtagtgaatgagtgaaggactgtaatcataatatgctcactacttgctcttgtttttgttttaataaactatagtagtgttttaaaaagttaaatgaagaataaacgcaaatataaaagctctgattttgccctgtatgtatgatgacttcagtgtgcaagatgaagtttaatacctgtaaaaactacaaagaagttcccctagcatttctaggccaaaccttgtaattgacttcagctatgtacgtggacaagcttagactgaaatgctaggtatatgtattggcttcagtgtatgacccttcattgttaagctatgaaagtaaaactctgtatttaactggcaatgaggaaaaaaaaattttgtagagaagtgttggtctgtatagttctttatattaagtgggattcattgtaatgcctctgcatttattctgttgcctcagctgttacttgaagatggcgtaatatataatttatcctgtggtatcagtgataaaaatgatacctttctgtaggaggggtttatcataatatgctgcttcttgaaggcttgcacttccagaattgtgtttccttctgctgtgccattcatatatatatacatatatatatataatcttgaccagtcctggtcatttgctcccctccttgtctgtggaccatgataagcccaagtagtgacttcagagctgggtaacagaaattaaagtgaaaagacctttacgtggagaatttgcatgcgtaatataggaaggtgttctttaggtatgttacaggattactttaaaccatttgactttcgctccaaagttatgttggtagtatagcaaattatgatgaatagctttaattgtatgtttaaaagtctcatatgttcacatgcttaaatctgggtatcagaatttaagcaattcttgaaatgtattgtctccttaatatactaattacaaagcatctccaatgtgtgtcactacaggcttttttttcccagatcatcaaattttggcttttaactaagatacatagctttattttagctagtctgaatgagtgatacaaaaatactattgaactatagttaaataatattaaataggatggagagtaaaagtggaggactgggtaatgagccaagaagaaggggtg

SEQ ID NO: 240 - protein, 397 aa, Homo sapien
MVKETTYYDVLGVKPNATQEELKKAYRKLALKYHPDKNPNEGEKFKQISQAYEVLSDAKKRELYDKGGEQAIKEGGAGGGFGSPMDIFDMFFGGGGRMQRERRGKNVVHQLSVTLEDLYNGATRKLALQKNVICDKCEGRGGKKGAVECCPNCRGTGMQIRIHQIGPGMVQQIQSVCMECQGHGERISPKDRCKSCNGRKIVREKKILEVHIDKGMKDGQKITFHGEGDQEPGLEPGDIIIVLDQKDHAVFTRRGEDLFMCMDIQLVEALCGFQKPISTLDNRTIVITSHPGQIVKHGDIKCVLNEGMPIYRRPYEKGRLIIEFKVNFPENGFLSPDKLSLLEKLLPERKEVEETDEMDQVELVDFDPNQERRRHYNGEAYEDDEHHPRGGVQCQTS

SEQ ID NO: 241 - DNA, 1438 bp, Homo sapien
cggtaactaccccggctgcgcacagctcggcgctccttcccgctccctcacacaccgcctcagcccgcaccggcagtagaagatggtgaaagaaacaacttactacgatgttttgggggtcaaacccaatgctactcaggaagaattgaaaaaggcttataggaaactggccttgaagtaccatcctgataagaacccaaatgaaggagagaagtttaaacagatttctcaagcttacgaagttctctctgatgcaaagaaaagggaattatatgacaaaggaggagaacaggcaattaaagagggtggagcaggtggcggttttggctcccccatggacatctttgatatgttttttggaggaggaggaaggatgcagagagaaaggagaggtaaaaatgttgtacatcagctctcagtaaccctagaagacttatataatggtgcaacaagaaaactggctctgcaaaagaatgtgatttgtgacaaatgtgaaggtagaggaggtaagaaaggagcagtagagtgctgtcccaattgccgaggtactggaatgcaaataagaattcatcagataggacctggaatggttcagcaaattcagtctgtgtgcatggagtgccagggccatggggagcggatcagtcctaaagatagatgtaaaagctgcaacggaaggaagatagttcgagagaagaaaattttagaagttcatattgacaaaggcatgaaagatggccagaagataacattccatggtgaaggagaccaagaaccaggactggagccaggcgatattatcattgtgttagatcagaaggaccatgctgtttttactcgacgaggagaagaccttttcatgtgtatggacatacagctcgttgaagcactgtgtggcttccagaagccaatatctactcttgacaaccgaaccatcgtcatcacctctcatccaggtcagattgtcaagcatggagatatcaagtgtgtactaaatgaaggcatgccaatttatcgtagaccatatgaaaagggtcgcctaatcatcgaatttaaggtaaactttcctgagaatggctttctctctcctgataaactgtctttgctggaaaaactcctacccgagaggaaggaagtggaagagactgatgagatggaccaagtagaactggtggactttgatccaaatcaggaaagacggcgccactacaatggagaagcatatgaggatgatgaacatcatcccagaggtggtgttcagtgtcagacctcttaatggccagtgaataacactcactgctggcatttaatgtgcagtagtgaatgagtgaaggactgtaatcataatatgctcactacttgctcttgtttttgttttaataaactatagtagtgttataaaaagttaaatgaagaataaacgcaaatataaaagctc

SEQ ID NO: 242 - protein, 397 aa, Homo sapien; identical to SEQ ID NO: 240

SEQ ID NO: 243 - DNA, 1709 bp, Homo sapien
gggcggggtgccgcatccccagcccgccgccatggccgcctacaaactggtgctgatccggcacggcgagagcgcatggaacctggagaaccgcttcagcggctggtacgacgccgacctgagcccggcgggccacgaggaggcgaagcgcggcgggcaggcgctacgagatgctggctatgagtttgacatctgcttcacctcagtgcagaagagagcgatccggaccctctggacagtgctagatgccattgatcagatgtggctgccagtggtgaggacttggcgcctcaatgagcggcactatgggggtctaaccggtctcaataaagcagaaactgctgcaaagcatggtgaggcccaggtgaagatctggaggcgctcctatgatgtcccaccacctccgatggagcccgaccatcctttctacagcaacatcagtaaggatcgcaggtatgcagacctcacagaagatcagctaccctcctgtgagagtctgaaggatactattgccagagctctgcccttctggaatgaagaaatagttccccagatcaaggaggggaaacgtgtactgattgcagcccatggcaacagcctccggggcattgtcaagcatctggagggtctctctgaagaggctatcatggagctgaacctgccgactggtattcccattgtctatgaattggacaagaacttgaagcctatcaagcccatgcagtttctgggggatgaagagacggtgcgcaaagccatggaagctgtggctgcccagggcaaggccaagaagtgaaggccggcggggaggatactgtccccaggagcaccctccctgcccgtcttgtccctctgcccctcccacctgcacatgtcacactgaccacatctgtagacatcttgagttgtagctgcagacggggaccagtggctcccattttcattttagccattttgtcgcctgcacccactcccttcatacaatctagtcagaatagcagttctagagcacaggttctcagtctaagctatggaaaagctccccttatccaacagagtttaaaagtagtgacttgggtttttgcgagtgctttgtttactaaggactttggggaggaaccatgctaagccatgaccagtgaggagaagcaacagagcctgtctgtccccatgagcggagtctgtcctctgctcttctgcagtcaggtcactgcctactgcctgggggctctagtcattccagtggaagacgaatgtaacctgcgtggtgatgtgacaactgtttcctccctgaccccagaggatctggctctaggttgggatcaatcctgaatttcgttatgtgttaatttacttttattaaaaaagtatagtatatataatacaaaacaataacccttctggggtttcttgtggcggttgaaatagtcccacatgtggtcatcagaaatagcattcctcataccaatataggatcagctccttgacctctgaggggtcaggagtgcttcctggtgtgtgtattagaatcccttcctgccttgtttcatggcagtgaaatgcctcttggtcctgtccagtgtatctttcactgatttctgaatcatgttctagttgcttgaccctgccacatgggtccagtgttcatctgagcataactgtactaaatcctttttccatatcagtataataaaggagtgatgtgcaat

SEQ ID NO: 244 - protein, 254 aa, Homo sapien
MAAYKLVLIRHGESAWNLENRFSGWYDADLSPAGHEEAKRGGQALRDAGYEFDICFTSVQKRAIRTLWTVLDAIDQMWLPVVRTWRLNERHYGGLTGLNKAETAAKHGEAQVKIWRRSYDVPPPPMEPDHPFYSNISKDRRYADLTEDQLPSCESLKDTIARALPFWNEEIVPQIKEGKRVLIAAHGNSLRGIVKHLEGLSEEAIMELNLPTGIPIVYELDKNLKPIKPMQFLGDEETVRKAMEAVAAQGKAKK

SEQ ID NO: 245 - DNA, 4157 bp, Homo sapien
agcggggcggggcgccagcgctgccttttctcctgccgggtagtttcgctttcctgcgcagagtctgcggaggggctcggctgcaccggggggatcgcgcctggcagaccccagaccgagcagaggcgacccagcgcgctcgggagaggctgcaccgccgcgcccccgcctagcccttccggatcctgcgcgcagaaaagtttcatttgctgtatgccatcctcgagagctgtctaggttaacgttcgcactctgtgtatataacctcgacagtcttggcacctaacgtgctgtgcgtagctgctcctttggttgaatccccaggcccttgttggggcacaaggtggcaggatgtctcagtggtacgaacttcagcagcttgactcaaaattcctggagcaggttcaccagctttatgatgacagttttcccatggaaatcagacagtacctggcacagtggttagaaaagcaagactgggagcacgctgccaatgatgtttcatttgccaccatccgttttcatgacctcctgtcacagctggatgatcaatatagtcgcttttctttggagaataacttcttgctacagcataacataaggaaaagcaagcgtaatcttcaggataattttcaggaagacccaatccagatgtctatgatcatttacagctgtctgaaggaagaaaggaaaattctggaaaacgcccagagatttaatcaggctcagtcggggaatattcagagcacagtgatgttagacaaacagaaagagcttgacagtaaagtcagaaatgtgaaggacaaggttatgtgtatagagcatgaaatcaagagcctggaagatttacaagatgaatatgacttcaaatgcaaaaccttgcagaacagagaacacgagaccaatggtgtggcaaagagtgatcagaaacaagaacagctgttactcaagaagatgtatttaatgcttgacaataagagaaaggaagtagttcacaaaataatagagttgctgaatgtcactgaacttacccagaatgccctgattaatgatgaactagtggagtggaagcggagacagcagagcgcctgtattggggggccgcccaatgcttgcttggatcagctgcagaactggttcactatagttgcggagagtctgcagcaagttcggcagcagcttaaaaagttggaggaattggaacagaaatacacctacgaacatgaccctatcacaaaaaacaaacaagtgttatgggaccgcaccttcagtcttttccagcagctcattcagagctcgtttgtggtggaaagacagccctgcatgccaacgcaccctcagaggccgctggtcttgaagacaggggtccagttcactgtgaagttgagactgttggtgaaattgcaagagctgaattataatttgaaagtcaaagtcttatttgataaagatgtgaatgagagaaatacagtaaaaggatttaggaagttcaacattttgggcacgcacacaaaagtgatgaacatggaggagtccaccaatggcagtctggcggctgaatttcggcacctgcaattgaaagaacagaaaaatgctggcaccagaacgaatgagggtcctctcatcgttactgaagagcttcactcccttagttttgaaacccaattgtgccagcctggtttggtaattgacctcgagacgacctctctgcccgttgtggtgatctccaacgtcagccagctcccgagcggttgggcctccatcctttggtacaacatgctggtggcggaacccaggaatctgtccttcttcctgactccaccatgtgcacgatgggctcagctttcagaagtgctgagttggcagttttcttctgtcaccaaaagaggtctcaatgtggaccagctgaacatgttgggagagaagcttcttggtcctaacgccagccccgatggtctcattccgtggacgaggttttgtaaggaaaatataaatgataaaaattttcccttctggctttggattgaaagcatcctagaactcattaaaaaacacctgctccctctctggaatgatgggtgcatcatgggcttcatcagcaaggagcgagagcgtgccctgttgaaggaccagcagccggggaccttcctgctgcggttcagtgagagctcccgggaaggggccatcacattcacatgggtggagcggtcccagaacggaggcgaacctgacttccatgcggttgaaccctacacgaagaaagaactttctgctgttactttccctgacatcattcgcaattacaaagtcatggctgctgagaatattcctgagaatcccctgaagtatctgtatccaaatattgacaaagaccatgcctttggaaagtattactccaggccaaaggaagcaccagagccaatggaacttgatggccctaaaggaactggatatatcaagactgagttgatttctgtgtctgaagttcacccttctagacttcagaccacagacaacctgctccccatgtctcctgaggagtttgacgaggtgtctcggatagtgggctctgtagaattcgacagtatgatgaacacagtatagagcatgaatttttttcatcttctctggcgacagttttccttctcatctgtgattccctcctgctactctgttccttcacatcctgtgtttctagggaaatgaaagaaaggccagcaaattcgctgcaacctgttgatagcaagtgaatttttctctaactcagaaacatcagttactctgaagggcatcatgcatcttactgaaggtaaaattgaaaggcattctctgaagagtgggtttcacaagtgaaaaacatccagatacacccaaagtatcaggacgagaatgagggtcctttgggaaaggagaagttaagcaacatctagcaaatgttatgcataaagtcagtgcccaactgttataggttgttggataaatcagtggttatttagggaactgcttgacgtaggaacggtaaatttctgtgggagaattcttacatgttttctttgctttaagtgtaactggcagttttccattggtttacctgtgaaatagttcaaagccaagtttatatacaattatatcagtcctctttcaaaggtagccatcatggatctggtagggggaaaatgtgtattttattacatctttcacattggctatttaaagacaaagacaaattctgtttcttgagaagagaatattagctttactgtttgttatggcttaatgacactagctaatatcaatagaaggatgtacatttccaaattcacaagttgtgtttgatatccaaagctgaatacattctgctttcatcttggtcacatacaattatttttacagttctcccaagggagttaggctattcacaaccactcattcaaaagttgaaattaaccatagatgtagataaactcagaaatttaattcatgtttcttaaatgggctactttgtcctttttgttattagggtggtatttagtctattagccacaaaattgggaaaggagtagaaaaagcagtaactgacaacttgaataatacaccagagataatatgagaatcagatcatttcaaaactcatttcctatgtaactgcattgagaactgcatatgtttcgctgatatatgtgtttttcacatttgcgaatggttccattctctctcctgtactttttccagacacttttttgagtggatgatgtttcgtgaagtatactgtatttttacctttttccttccttatcactgacacaaaaagtagattaagagatgggtttgacaaggttcttcccttttacatactgctgtctatgtggctgtatcttgtttttccactactgctaccacaactatattatcatgcaaatgctgtattcttctttggtggagataaagatttcttgagttttgttttaaaattaaagctaaagtatctgtattgcattaaatataatatgcacacagtgctttccgtggcactgcatacaatctgaggcctcctctctcagtttttatatagatggcgagaacctaagtttcagttgattttacaattgaaatgactaaaaaacaaagaagacaacattaaaacaatattgtttcta

SEQ ID NO: 246 - protein, 750 aa, Homo sapien
MSQWYELQQLDSKFLEQVHQLYDDSFPMEIRQYLAQWLEKQDWEHAANDVSFATIRFHDLLSQLDDQYSRFSLENNFLLQHNIRKSKRNLQDNFQEDPIQMSMIIYSCLKEERKILENAQRFNQAQSGNIQSTVMLDKQKELDSKVRNVKDKVMCIEHEIKSLEDLQDEYDFKCKTLQNREHETNGVAKSDQKQEQLLLKKMYLMLDNKRKEVVHKIIELLNVTELTQNALINDELVEWKRRQQSACIGGPPNACLDQLQNWFTIVAESLQQVRQQLKKLEELEQKYTYEHDPITKNKQVLWDRTFSLFQQLIQSSFVVERQPCMPTHPQRPLVLKTGVQFTVKLRLLVKLQELNYNLKVKVLFDKDVNERNTVKGFRKFNILGTHTKVMNMEESTNGSLAAEFRHLQLKEQKNAGTRTNEGPLIVTEELHSLSFETQLCQPGLVIDLETTSLPVVVISNVSQLPSGWASILWYNMLVAEPRNLSFFLTPPCARWAQLSEVLSWQFSSVTKRGLNVDQLNMLGEKLLGPNASPDGLIPWTRFCKENINDKNFPFWLWIESILELIKKHLLPLWNDGCIMGFISKERERALLKDQQPGTFLLRFSESSREGAITFTWVERSQNGGEPDFHAVEPYTKKELSAVTFPDIIRNYKVMAAENIPENPLKYLYPNIDKDHAFGKYYSRPKEAPEPMELDGPKGTGYIKTELISVSEVHPSRLQTTDNLLPMSPEEFDEVSRIVGSVEFDSMMNTV

SEQ ID NO: 247 - DNA, 493 bp, Homo sapien
cttttttcttttttccggcgttcaagatgtcgaagcgaggacgtggtgggtcctctggtgcgaaattccggatttccttgggtcttccggtaggagctgtaatcaattgtgctgacaacacaggagccaaaaacctgtatatcatctccgtgaaggggatcaagggacggctgaacagacttcccgctgctggtgtgggtgacatggtgatggccacagtcaagaaaggcaaaccagagctcagaaaaaaggtacatccagcagtggtcattcgacaacgaaagtcataccgtagaaaagatggcgtgtttctttattttgaagataatgcaggagtcatagtgaacaataaaggcgagatgaaaggttctgccattacaggaccagtagcaaaggagtgtgcagacttgtggccccggattgcatccaatgctggcagcattgcatgattctccagtatatttgtaaaaaataaaaaaaaactaaacccatt

SEQ ID NO: 248 - protein, 140 aa, Homo sapien [sequence omitted]

SEQ ID NO: 249 - DNA, 2251 bp, Homo sapien
gccgcgtgcagaggtgctcaagcctcctcgcggtccgcagtcagtgccgccgcgcccggcctcccgcacgccccgcaggtagcgcccccgcccgcggcccagagtgcgctcgcgccggcaccagctcccggataaacggcgcgccgcgcggagatgacagccgaggagatgaaggcgaccgagagcggggcgcagtcggcgccgctgcccatggagggagtggacatcagccccaaacaggacgaaggcgtgctgaaggtcatcaagagagagggcacaggtacagagatgcccatgattggggaccgagtctttgtccactacactggctggctattagatggcacaaagtttgactccagtctggatcgcaaggacaaattctcctttgacctgggaaaaggggaggtcatcaaggcttgggacattgccatagccaccatgaaggtgggggaggtgtgccacatcacctgcaaaccagaatatgcctacggttcagcaggcagtcctccaaagattccccccaatgccacgcttgtatttgaggtggagttgtttgagtttaagggagaagatctgacggaagaggaagatggcggaatcattcgcagaatacagactcgcggtgaaggctatgctaagcccaatgagggtgctatcgtggaggttgcactggaagggtactacaaggacaagctctttgaccagcgggagctccgctttgagattggcgagggggagaacctggatctgccttatggtctggagagggccattcagcgcatggagaaaggagaacattccatcgtgtacctcaagcccagctatgcttttggcagtgttgggaaggaaaagttccaaatcccaccaaatgctgagctgaaatatgaattacacctcaagagttttgaaaaggccaaggagtcttgggagatgaattcagaagagaagctggaacagagcaccatagtgaaagagcggggcactgtgtacttcaaggaaggtaaatacaagcaagctttactacagtataagaagatcgtgtcttggctggaatatgagtctagtttttccaatgaggaagcacagaaagcacaggcccttcgactggcctctcacctcaacctggccatgtgtcatctgaaactacaggccttctctgctgccattgaaagctgtaacaaggccctagaactggacagcaacaacgagaagggcctcttccgccggggagaggcccacctggccgtgaatgactttgaactggcacgggctgatttccagaaggtcctgcagctctaccccaacaacaaagccgccaagacccagctggctgtgtgccagcagcggatccgaaggcagcttgcccgggagaagaagctctatgccaatatgtttgagaggctggctgaggaggagaacaaggccaaggcagaggcttcctcaggagaccatcccactgacacagagatgaaggaggagcagaagagcaacacggcagggagccagtctcaggtggagacagaagcatagcccctctccaccagccctactcctgcggctgcctgccccccagtctccccactccaccctgttagttttgtaaaaactgaagaattttgagtgaattagacctttatttttctatctggttggatggtggctttaggggaagggggaaaggtgtaggctgggggattgaggtggggaatcattttagctggtgtcagcccctcttcccttcctccattgcacatgaacatatgtccatccatatatattcatcagaatgttaatttattttgctccctctgttaggtccattttctaagggtagaagaggcaagtggtagggatgaggtctgataagaacccagggtggagagggagactcctgggcagccgttttcctcatcctttccctctcccagtccatttccaaatgtggcctccatgtgggtgctagggacatgggaaaaaccactgctatgccatttcttctctctgttcccttcctcacccccgacggtgtggctgatgatgtcttctggtgtcatggtgaccaccccctgttccctgttctggtatttcccctgtcagtttcccctctcggccaggttgtgtcccaaaatcccctcagcctcttctctgcacgttgctgaaggtccaggcttgcctcaagttccatgcttgagcaataaagtggaaacaataaaacctgggtgtcagacaaaaaaaaaaaaaaaaaaaa

SEQ ID NO: 250 - protein, 459 aa, Homo sapien
MTAEEMKATESGAQSAPLPMEGVDISPKQDEGVLKVIKREGTGTEMPMIGDRVFVHYTGWLLDGTKFDSSLDRKDKFSFDLGKGEVIKAWDIAIATMKVGEVCHITCKPEYAYGSAGSPPKIPPNATLVFEVELFEFKGEDLTEEEDGGIIRRIQTRGEGYAKPNEGAIVEVALEGYYKDKLFDQRELRFEIGEGENLDLPYGLERAIQRMEKGEHSIVYLKPSYAFGSVGKEKFQIPPNAELKYELHLKSFEKAKESWEMNSEEKLEQSTIVKERGTVYFKEGKYKQALLQYKKIVSWLEYESSFSNEEAQKAQALRLASHLNLAMCHLKLQAFSAAIESCNKALELDSNNEKGLFRRGEAHLAVNDFELARADFQKVLQLYPNNKAAKTQLAVCQQRIRRQLAREKKLYANMFERLAEEENKAKAEASSGDHPTDTEMKEEQKSNTAGSQSQVETEA

SEQ ID NO: 251 - DNA, 2251 bp, Homo sapien; identical to SEQ ID NO: 249

SEQ ID NO: 252 - protein, 459 aa, Homo sapien; identical to SEQ ID NO: 250

SEQ ID NO: 253 - DNA, 1692 bp, Homo sapien
atacacgtgccatgtgcagcatgaggggctacccgagcccgtcaccctgagatggaagccggcttcccagcccaccatccccatcgtgggcatcattgctggcctggttctccttggatctgtggtctctggagctgtggttgctgctgtgatatggaggaagaagagctcaggtggaaaaggagggagctactctaaggctgagtggagcgacagtgcccaggggtctgagtctcacagcttgtaaagcctgagacagctgccttgtgtgcgactgagatgcacagctgccttgtgtgcgactgagatgcaggatttcctcacgcctcccctatgtgtcttaggggactctggcttctctttttgcaagggcctctgaatctgtctgtgtccctgttagcacaatgtgaggaggtagagaaacagtccacctctgtgtctaccatgacccccttcctcacactgacctgtgttccttccctgttctcttttctattaaaaataagaacctgggcagagtgcggcagctcatgcctgtaatcccagcacttagggaggccgaggagggcagatcacgaggtcaggagatcgaaaccatcctggctaacacggtgaaaccccgtctctactaaaaaatacaaaaaattagctgggcgcagaggcacgggcctgtagtcccagctactcaggaggcggaggcaggagaatggcgtcaacccgggaggcggaggttgcagtgagccaggattgtgcgactgcactccagcctgggtgacagggtgaaacgccatctcaaaaaataaaaattaaaaaataaaaaaagaacctggatctcaatttaatttttcatattcttgcaatgaaatggacttgaggaagctaagatcatagctagaaatacagataattccacagcacatctctagcaaatttagcctattcctattctctagcctattccttaccacctgtaatcttgaccatataccttggagttgaatattgttttcatactgctgtggtttgaatgttccctccaacactcatgttgagacttaatccctaatgtggcaatactgaaaggtggggcctttgagatgtgattggatcgtaaggctgtgccttcattcatgggttaatggattaatgggttatcacaggaatgggactggtggctttataagaagaggaaaagagaactgagctagcatgcccaacccacagagagcctccactagagtgatgctaagtggaaatgtgaggtgcagctgccacagagggcccccaccagggaaatgtctagtgtctagtggatccaggccacaggagagagtgccttgtggagcgctgggagcaggacctgaccaccaccaggaccccagaactgtggagtcagtggcagcatgcagcgcccccttgggaaagctttaggcaccagcctgcaacccattcgagcagccacgtaggctcgacccagcaaagccacaggcacggggctacctgaggccttgggggccaatccctgctccagtgtgtccgtgaggcagcacacgaagtcaaaagagattatctcttcccacagataccttttctctcccatgaccctttaacagcatctgcttcattcccctcaccttcccaggctgatctgaggtaaactttgaagtaaaataaaagctgtgtttgagcatc

SEQ ID NO: 254 - DNA, 482 bp, Homo sapien
ttccttttcctccctgtcgccaccgaggtcgcacgcgtgagacttctccgccgcctccgccgcagacgccgccgcgatgcgctacgtcgcctcctacctgctggctgccctagggggcaactcctcccccagcgccaaggacatcaagaagatcttggacagcgtgggtatcgaggcggacgacgaccggctcaacaaggttatcagtgagctgaatggaaaaaacattgaagacgtcattgcccagggtattggcaagcttgccagtgtacctgctggtggggctgtagccgtctctgctgccccaggctctgcagcccctgctgctggttctgcccctgctgcagcagaggagaagaaagatgagaagaaggaggagtctgaagagtcagatgatgacatgggatttggcctttttgattaaattcctgctcccctgcaaataaagcctttttacacatctcaaaaaaaaaaaaaaaaaa

SEQ ID NO: 255 - protein, 115 aa, Homo sapien
MRYVASYLLAALGGNSSPSAKDIKKILDSVGIEADDDRLNKVISELNGKNIEDVIAQGIGKLASVPAGGAVAVSAAPGSAAPAAGSAPAAAEEKKDEKKEESEESDDDMGFGLFD

SEQ ID NO: 256 - DNA, 1783 bp, Homo sapien
cctctcggagctggaaatgcagctattgagatcttcgaatgctgcggagctggaggcggaggcagctggggaggtccgagcgatgtgaccaggccgccatcgctcgtctcttcctctctcctgccgcctcctgtgtcgaaaataacttttttagtctaaagaaagaaagacaaaagtagtcgtccgcccctcacgccctctcttcctctcagccttccgcccggtgaggaagcccggggtggctgctccgccgtcggggccgcgccgccgagccccagcgccccgggccgcccccgcacgccgcccccatgcatcccttctacacccgggccgccaccatgataggcgagatcgccgccgccgtgtccttcatctccaagtttctccgcaccaaggggctgacgagcgagcgacagctgcagaccttcagccagagcctgcaggagctgctggcagaacattataaacatcactggttcccagaaaagccatgcaagggatcgggttaccgttgtattcgcatcaaccataaaatggatcctctgattggacaggcagcacagcggattggactgagcagtcaggagctgttcaggcttctcccaagtgaactcacactctgggttgacccctatgaagtgtcctacagaattggagaggatggctccatctgtgtgctgtatgaagcctcaccagcaggaggtagcactcaaaacagcaccaacgtgcaaatggtagacagccgaatcagctgtaaggaggaacttctcttgggcagaacgagcccttccaaaaactacaatatgatgactgtatcaggttaagatatagtctgtggatggatcatctgatgatgatccataaatttgatttttgctttgggtgggctcctcttggggatggattatggaatttaaaccatgtcacagctgtgaagatctggcacaagatagaatggtaaaaaaaaaaaaaaattttaagtgacagtgccatagtttggacagtacctttcaatgattaattttaatagcctgtgagtccaagtaaatgatcactttatttgctagggagggaagtcctagggtggtttcagtttctcccagacatacctaaatttttacatcaatccttttaaagaaaatctgtatttcaaagaatctttctctgcagtaaatctcgcaggggaatttgcactattacacttgaaagttgttattgttaaccttttcggcagcttttaataggaaagttaaacgttttaaacatggtagtactggaaattttacaagacttttacctagcacttaaatatgtataaatgtacataaagacaaactagtaagcatgacctggggaaatggtcagaccttgtattgtgtttttggccttgaaagtagcaagtgaccagaatctgccatggcaacaggctttaaaaaagacccttaaaaagacactgtctcaactgtggtgttagcaccagccagctctctgtacatttgctagcttgtagttttctaagactgagtaaacttcttatttttagaaagtggaggtctggtttgtaactttccttgtacttaattgggtaaaagtcttttccacaaaccaccatctattttgtgaactttgttagtcatcttttatttggtaaattatgaactggtgtaaatttgtacagttcatgtatattgattgtggcaaagttgtacagatttctatattttggatgagaaatttttcttctctctataataaatcgtttcttatcttggcatttttaacc

SEQ ID NO: 257 - protein, 171 aa, Homo sapien
MHPFYTRAATMIGEIAAAVSFISKFLRTKGLTSERQLQTFSQSLQELLAEHYKHHWFPEKPCKGSGYRCIRINHKMDPLIGQAAQRIGLSSQELFRLLPSELTLWVDPYEVSYRIGEDGSICVLYEASPAGGSTQNSTNVQMVDSRISCKEELLLGRTSPSKNYNMMTVSG

SEQ ID NO: 258 - DNA, 1783 bp, Homo sapien; identical to SEQ ID NO: 256

SEQ ID NO: 259 - protein, 171 aa, Homo sapien; identical to SEQ ID NO: 257

SEQ ID NO: 260 - DNA, 2254 bp, Homo sapien
aatcgaaagtagactcttttctgaagcatttcctgggatcagcctgaccacgctccatactgggagaggcttctgggtcaaaggaccagtctgcagagggatcctgtggctggaagcgaggaggctccacacggccgttgcagctaccgcagccaggatctgggcatccaggcacggccatgacccctccgaggctcttctgggtgtggctgctggttgcaggaacccaaggcgtgaacgatggtgacatgcggctggccgatgggggcgccaccaaccagggccgcgtggagatcttctacagaggccagtggggcactgtgtgtgacaacctgtgggacctgactgatgccagcgtcgtctgccgggccctgggcttcgagaacgccacccaggctctgggcagagctgccttcgggcaaggatcaggccccatcatgctggacgaggtccagtgcacgggaaccgaggcctcactggccgactgcaagtccctgggctggctgaagagcaactgcaggcacgagagagacgctggtgtggtctgcaccaatgaaaccaggagcacccacaccctggacctctccagggagctctcggaggcccttggccagatctttgacagccagcggggctgcgacctgtccatcagcgtgaatgtgcagggcgaggacgccctgggcttctgtggccacacggtcatcctgactgccaacctggaggcccaggccctgtggaaggagccgggcagcaatgtcaccatgagtgtggatgctgagtgtgtgcccatggtcagggaccttctcaggtacttctactcccgaaggattgacatcaccctgtcgtcagtcaagtgcttccacaagctggcctctgcctatggggccaggcagctgcagggctactgcgcaagcctctttgccatcctcctcccccaggacccctcgttccagatgcccctggacctgtatgcctatgcagtggccacaggggacgccctgctggagaagctctgcctacagttcctggcctggaacttcgaggccttgacgcaggccgaggcctggcccagtgtccccacagacctgctccaactgctgctgcccaggagcgacctggcggtgcccagcgagctggccctactgaaggccgtggacacctggagctggggggagcgtgcctcccatgaggaggtggagggcttggtggagaagatccgcttccccatgatgctccctgaggagctctttgagctgcagttcaacctgtccctgtactggagccacgaggccctgttccagaagaagactctgcaggccctggaattccacactgtgcccttccagttgctggcccggtacaaaggcctgaacctcaccgaggatacctacaagccccggatttacacctcgcccacctggagtgcctttgtgacagacagttcctggagtgcacggaagtcacaactggtctatcagtccagacgggggcctttggtcaaatattcttctgattacttccaagccccctctgactacagatactacccctaccagtccttccagactccacaacaccccagcttcctcttccaggacaagagggtgtcctggtccctggtctacctccccaccatccagagctgctggaactacggcttctcctgctcctcggacgagctccctgtcctgggcctcaccaagtctggcggctcagatcgcaccattgcctacgaaaacaaagccctgatgctctgcgaagggctcttcgtggcagacgtcaccgatttcgagggctggaaggctgcgattcccagtgccctggacaccaacagctcgaagagcacctcctccttcccctgcccggcagggcacttcaacggcttccgcacggtcatccgccccttctacctgaccaactcctcaggtgtggactagacgcgtggccaagggtggtgagaaccggagaaccccaggacgccctcactgcaggctcccctcctcggcttccttcctctctgcaatgaccttcaacaaccggccaccagatgtcgccctactcacctgaggctcagcttcaagaaattactggaaggcttccactagggtccaccaggagttctcccaccacctcaccagtttccaggtggtaagcaccaggaggccctcgaggttgctctggatccccccacagcccctggtcagtctgcccttgtcactggtctgaggtcattaaaattacattgaggttccta

SEQ ID NO: 261 - protein, 585 aa, Homo sapien
MTPPRLFWVWLLVAGTQGVNDGDMRLADGGATNQGRVEIFYRGQWGTVCDNLWDLTDASVVCRALGFENATQALGRAAFGQGSGPIMLDEVQCTGTEASLADCKSLGWLKSNCRHERDAGVVCTNETRSTHTLDLSRELSEALGQIFDSQRGCDLSISVNVQGEDALGFCGHTVILTANLEAQALWKEPGSNVTMSVDAECVPMVRDLLRYFYSRRIDITLSSVKCFHKLASAYGARQLQGYCASLFAILLPQDPSFQMPLDLYAYAVATGDALLEKLCLQFLAWNFEALTQAEAWPSVPTDLLQLLLPRSDLAVPSELALLKAVDTWSWGERASHEEVEGLVEKIRFPMMLPEELFELQFNLSLYWSHEALFQKKTLQALEFHTVPFQLLARYKGLNLTEDTYKPRIYTSPTWSAFVTDSSWSARKSQLVYQSRRGPLVKYSSDYFQAPSDYRYYPYQSFQTPQHPSFLFQDKRVSWSLVYLPTIQSCWNYGFSCSSDELPVLGLTKSGGSDRTIAYENKALMLCEGLFVADVTDFEGWKAAIPSALDTNSSKSTSSFPCPAGHFNGFRTVIRPFYLTNSSGVD

SEQ ID NO: 262 - DNA, 2188 bp, Homo sapien
ggcacgaggaccgaccgcattgcggcttggttttctcacccagtgcatgtggcaggagcggtgagatcactgcctcacggcgatcctggactgacggtcacgactgcctaccctctaaccctgttctgagctgccccttgcccacacaccccaaacctgtgtgcaggatccgcctccatggagctacagcctcctgaagcctcgatcgccgtcgtgtcgattccgcgccagttgcctggctcacattcggaggctggtgtccagggtctcagcgcgggggacgactcagagttggggtctcactgtgttgcccagactggtctcgaactcttggcctcaggtgatcctcttccctcagcttcccagaatgccgagatgatagagacggggtctgactgtgttacccaggctggtcttcaactcttggcctcaagtgatcctcctgccttagcttccaagaatgctgaggttacaggcaccatgagccaggacaccgaggtggatatgaaggaggtggagctgaatgagttagagcccgagaagcagccgatgaacgcggcgtctggggcggccatgtccctggcgggagccgagaagaatggtctggtgaagatcaaggtggcggaagacgaggcggaggcggcagccgcggctaagttcacgggcctgtccaaggaggagctgctgaaggtggcaggcagccccggctgggtacgcacccgctgggcactgctgctgctcttctggctcggctggctcggcatgcttgctggtgccgtggtcataatcgtgcgagcgccgcgttgtcgcgagctaccggcgcagaagtggtggcacacgggcgccctctaccgcatcggcgaccttcaggccttccagggccacggcgcgggcaacctggcgggtctgaaggggcgtctcgattacctgagctctctgaaggtgaagggccttgtgctgggtccaattcacaagaaccagaaggatgatgtcgctcagactgacttgctgcagatcgaccccaattttggctccaaggaagattttgacagtctcttgcaatcggctaaaaaaaagagcatccgtgtcattctggaccttactcccaactaccggggtgagaactcgtggttctccactcaggttgacactgtggccaccaaggtgaaggatgctctggagttttggctgcaagctggcgtggatgggttccaggttcgggacatagagaatctgaaggatgcatcctcattcttggctgagtggcaaaatatcaccaagggcttcagtgaagacaggctcttgattgcggggactaactcctccgaccttcagcagatcctgagcctactcgaatccaacaaagacttgctgttgactagctcatacctgtctgattctggttctactggggagcatacaaaatccctagtcacacagtatttgaatgccactggcaatcgctggtgcagctggagtttgtctcaggcaaggctcctgacttccttcttgccggctcaacttctccgactctaccagctgatgctcttcaccctgccagggacccctgttttcagctacggggatgagattggcctggatgcagctgcccttcctggacagcctatggaggctccagtcatgctgtgggatgagtccagcttccctgacatcccaggggctgtaagtgccaacatgactgtgaagggccagagtgaagaccctggctccctcctttccttgttccggcggctgagtgaccagcggagtaaggagcgctccctactgcatggggacttccacgcgttctccgctgggcctggactcttctcctatatccgccactgggaccagaatgagcgttttctggtagtgcttaactttggggatgtgggcctctcggctggactgcaggcctccgacctgcctgccagcgccagcctgccagccaaggctgacctcctgctcagcacccagccaggccgtgaggagggctcccctcttgagctggaacgcctgaaactggagcctcacgaagggctgctgctccgcttcccctacgcggcctgacttcagcctgacatggacccactacccttctcctttccttcccaggccctttggcttctgatttttctcttttttaaaaacaaacaaacaaactgttgcaaaaaaaaaaaaaaaaaaa

SEQ ID NO: 263 - protein, 529 aa, Homo sapien
MSQDTEVDMKEVELNELEPEKQPMNAASGAAMSLAGAEKNGLVKIKVAEDEAEAAAAAKFTGLSKEELLKVAGSPGWVRTRWALLLLFWLGWLGMLAGAVVIIVRAPRCRELPAQKWWHTGALYRIGDLQAFQGHGAGNLAGLKGRLDYLSSLKVKGLVLGPIHKNQKDDVAQTDLLQIDPNFGSKEDFDSLLQSAKKKSIRVILDLTPNYRGENSWFSTQVDTVATKVKDALEFWLQAGVDGFQVRDIENLKDASSFLAEWQNITKGFSEDRLLIAGTNSSDLQQILSLLESNKDLLLTSSYLSDSGSTGEHTKSLVTQYLNATGNRWCSWSLSQARLLTSFLPAQLLRLYQLMLFTLPGTPVFSYGDEIGLDAAALPGQPMEAPVMLWDESSFPDIPGAVSANMTVKGQSEDPGSLLSLFRRLSDQRSKERSLLHGDFHAFSAGPGLFSYIRHWDQNERFLVVLNFGDVGLSAGLQASDLPASASLPAKADLLLSTQPGREEGSPLELERLKLEPHEGLLLRFPYAA

SEQ ID NO: 264 - DNA, 1899 bp, Homo sapien
gtccgtactgcagagccgctgccggagggtcgttttaaagggccgcgttgccgccccctcggcccgccatgctgctatccgtgccgctgctgctcggcctcctcggcctggccgtcgccgagcccgccgtctacttcaaggagcagtttctggacggagacgggtggacttcccgctggatcgaatccaaacacaagtcagattttggcaaattcgttctcagttccggcaagttctacggtgacgaggagaaagataaaggtttgcagacaagccaggatgcacgcttttatgctctgtcggccagtttcgagcctttcagcaacaaaggccagacgctggtggtgcagttcacggtgaaacatgagcagaacatcgactgtgggggcggctatgtgaagctgtttcctaatagtttggaccagacagacatgcacggagactcagaatacaacatcatgtttggtcccgacatctgtggccctggcaccaagaaggttcatgtcatcttcaactacaagggcaagaacgtgctgatcaacaaggacatccgttgcaaggatgatgagtttacacacctgtacacactgattgtgcggccagacaacacctatgaggtgaagattgacaacagccaggtggagtccggctccttggaagacgattgggacttcctgccacccaagaagataaaggatcctgatgcttcaaaaccggaagactgggatgagcgggccaagatcgatgatcccacagactccaagcctgaggactgggacaagcccgagcatatccctgaccctgatgctaagaagcccgaggactgggatgaagagatggacggagagtgggaacccccagtgattcagaaccctgagtacaagggtgagtggaagccccggcagatcgacaacccagattacaagggcacttggatccacccagaaattgacaaccccgagtattctcccgatcccagtatctatgcctatgataactttggcgtgctgggcctggacctctggcaggtcaagtctggcaccatctttgacaacttcctcatcaccaacgatgaggcatacgctgaggagtttggcaacgagacgtggggcgtaacaaaggcagcagagaaacaaatgaaggacaaacaggacgaggagcagaggcttaaggaggaggaagaagacaagaaacgcaaagaggaggaggaggcagaggacaaggaggatgatgaggacaaagatgaggatgaggaggatgaggaggacaaggaggaagatgaggaggaagatgtccccggccaggccaaggacgagctgtagagaggcctgcctccagggctggactgaggcctgagcgctcctgccgcagagcttgccgcgccaaataatgtctctgtgagactcgagaactttcatttttttccaggctggttcggatttggggtggattttggttttgttcccctcctccactctcccccaccccctccccgccctttttttttttttttttaaactggtattttatcctttgattctccttcagccctcacccctggttctcatctttcttgatcaacatcttttcttgcctctgtgccccttctctcatctcttagctcccctccaacctggggggcagtggtgtggagaagccacaggcctgagatttcatctgctctccttcctggagcccagaggagggcagcagaagggggtggtgtctccaaccccccagcactgaggaagaacggggctcttctcatttcacccctccctttctcccctgcccccaggactgggccacttctgggtggggcagtgggtcccagattggctcacactgagaatgtaagaactacaaacaaaatttctattaaattaaattttgtgtctc

SEQ ID NO: 265 - protein, 417 aa, Homo sapien
MLLSVPLLLGLLGLAVAEPAVYFKEQFLDGDGWTSRWIESKHKSDFGKFVLSSGKFYGDEEKDKGLQTSQDARFYALSASFEPFSNKGQTLVVQFTVKHEQNIDCGGGYVKLFPNSLDQTDMHGDSEYNIMFGPDICGPGTKKVHVIFNYKGKNVLINKDIRCKDDEFTHLYTLIVRPDNTYEVKIDNSQVESGSLEDDWDFLPPKKIKDPDASKPEDWDERAKIDDPTDSKPEDWDKPEHIPDPDAKKPEDWDEEMDGEWEPPVIQNPEYKGEWKPRQIDNPDYKGTWIHPEIDNPEYSPDPSIYAYDNFGVLGLDLWQVKSGTIFDNFLITNDEAYAEEFGNETWGVTKAAEKQMKDKQDEEQRLKEEEEDKKRKEEEEAEDKEDDEDKDEDEEDEEDKEEDEEEDVPGQAKDEL

SEQ ID NO: 266 - DNA, 547 bp, Homo sapien
acggaagtgtaggttacggtctgagacatcaccgccaagctgggcatcggggagatggccgagactgaccccaagaccgtgcaggacctcacctcggtggtgcagacactcctgcagcagatgcaagataaatttcagaccatgtctgaccagatcattgggagaattgatgatatgagtagtcgcattgatgatctggaaaagaatatcgcggacctcatgacacaggctggggtggaagaactggaaagtgaaaacaagatacctgccacgcaaaagagttgaaggttgctaataatttatactggaatctggcatttttccaagccaagagaagatcgaatggctttttgcagctaactactatgtgtagacaggttttatattataaagtatgcattcttatcacctagtatatagttagtttgtagagtgatttccccccagtttcttgaacatggtatcttcacatcttggaccttggtcagttgtgctattcattattaaacactaaaactttggcggttcttgcataaaaaaaaaaaaa

SEQ ID NO: 267 - protein, 76 aa, Homo sapien
MAETDPKTVQDLTSVVQTLLQQMQDKFQTMSDQIIGRIDDMSSRIDDLEKNIADLMTQAGVEELESENKIPATQKS

SEQ ID NO: 268 - DNA, 6480 bp, Homo sapien
agagcgagcaggggagagcgagaccagttttaaggggaggaccggtgcgagtgaggcagccccgaggctctgctcgcccaccacccaatcctcgcctcccttctgctccaccttctctctctgccctcacctctcccccgaaaaccccctatttagccaaaggaaggaggtcaggggaacgctctcccctccccttccaaaaaacaaaaacagaaaaacccttttccaggccggggaaagcaggagggagaggggccgccgggctggccatggagctgctgtgccacgaggtggacccggtccgcagggccgtgcgggaccgcaacctgctccgagacgaccgcgtcctgcagaacctgctcaccatcgaggagcgctaccttccgcagtgctcctacttcaagtgcgtgcagaaggacatccaaccctacatgcgcagaatggtggccacctggatgctggaggtctgtgaggaacagaagtgcgaagaagaggtcttccctctggccatgaattacctggaccgtttcttggctggggtcccgactccgaagtcccatctgcaactcctgggtgctgtctgcatgttcctggcctccaaactcaaagagaccagcccgctgaccgcggagaagctgtgcatttacaccgacaactccatcaagcctcaggagctgctggagtgggaactggtggtgctggggaagttgaagtggaacctggcagctgtcactcctcatgacttcattgagcacatcttgcgcaagctgccccagcagcgggagaagctgtctctgatccgcaagcatgctcagaccttcattgctctgtgtgccaccgactttaagtttgccatgtacccaccgtcgatgatcgcaactggaagtgtgggagcagccatctgtgggctccagcaggatgaggaagtgagctcgctcacttgtgatgccctgactgagctgctggctaagatcaccaacacagacgtggattgtctcaaagcttgccaggagcagattgaggcggtgctcctcaatagcctgcagcagtaccgtcaggaccaacgtgacggatccaagtcggaggatgaactggaccaagccagcacccctacagacgtgcgggatatcgacctgtgaggatgccagttgggccgaaagagagagacgcgtccataatctggtctcttcttctttctggttgtttttgttctttgtgttttagggtgaaacttaaaaaaaaaattctgcccccacctagatcatatttaaagatcttttagaagtgagagaaaaaggtcctacgaaaacggaataataaaaagcatttggtgcctatttgaagtacagcataagggaatcccttgtatatgcgaacagttattgtttgattatgtaaaagtaatagtaaaatgcttacaggaaaacctgcagagtagttagagaatatgtatgcctgcaatatgggaacaaattagaggagacttttttttttcatgttatgagctagcacatacacccccttgtagtataatttcaaggaactgtgtacgccatttatggcatgattagattgcaaagcaatgaactcaagaaggaattgaaataaggagggacatgatggggaaggagtacaaaacaatctctcaacatgattgaaccatttgggatggagaagcacctttgctctcagccacctgttactaagtcaggagtgtagttggatctctacattaatgtcctcttgctgtctacagtagctgctacctaaaaaaagatgttttattttgccagttggacacaggtgattggctcctgggtttcatgttctgtgacatcctgcttcttcttccaaatgcagttcattgcagacaccaccatattgctatctaatggggaaatgtagctatgggccataaccaaaactcacatgaaacggaggcagatggagaccaagggtgggatccagaatggagtcttttctgttattgtatttaaaagggtaatgtggccttggcatttcttcttagaaaaaaactaatttttggtgctgattggcatgtctggttcacagtttagcattgttataaaccattccattcgaaaagcactttgaaaaattgttcccgagcgatagatgggatggtttatgcaagtcatgctgaatactcctcccctcttctcttttgccccctcccttcctgcccccagtctgggttactcttcgcttctggtatctggcgttctttggtacacagttctggtgttcctaccaggactcaagagacaccccttcctgctgacattcccatcacaacattcctcagacaagcctgtaaactaaaatctgttaccattctgatggcacagaaggatcttaattcccatctctatacttctcctttggacatggaaagaaaagttattgctggtgcaaagatagatggctgaacatcagggtgtggcattttgttcccttttccgttttttttttttttattgttgttgttaattttattgcaaagttgtattcagcgtacttgaatttttcttcctctccacttcttagaggcattcagttagcaaagaggttggagcaacaacttttttttttttttttgcacaattgtaattgacaggtaatgaagctatttgttaaaatatttgcctttttaagtaaaaaagaaaaatcagaacagggctatttgaagaattattttatacacagattctgccttgtttcatagtatgagggttgaagacggaaaacaatctaagggtctctcatttttttaattttgttttgttcagtttggtttttttttttttttgcgctgctaagaagctaaagtcatccatccttattcacgttgacagtacctagctgtaatgtttcacagagtgtgctgctattttataaacatttttataatatattattttactgcttaaattccaagtcctgaagtagatggttgagatatgagttcttcgtactggaaaagcccttccgtagtttgttttcttctggtagcatattcatggttgtttttttttttcttttttggttttttggttttttttttttcctctgatcacattcttcaaagacggagtattctttacctcaggtttactggacaaaatcaataactacaaaaggcaatgattcacgcttttgttttcataatacctcacaaccgtacagtttctgcttgggagcccattcgcatgaggaatacagaagcagtgtgagcagggctgactccctctcaggtggaaggcagggcggtctcactcccagggacctttttggtcatggaggccatcgggctcccagttagaccctggtatcctcatcatgatggaaaaaatacattgaaccaagggatcctccctccccttcaaggcagacgttcagtacaaacatttatgcggtaggctcagatgtcgtaatttgcacttaggtaccaggtgtcaggaaacagactaaaaagaattccaccaggctgtttggagatcctcatcttggagctttttcaaaagcggggcttcatctgcaaagggccctttcatcttgaagtttttcccctccgtctttcccctcccctggcatggacaccttgtgtttaggatcatctctgcaggtttcctaggtctgaatctgcgagtagatgaacctgcagcaagcagcgtttatggtgcttccttctccctcctctgtctcaaactgcgcaggcaagcactatgcaagcccaggccctctgctgagcggtactaaacggtcgggttttcaatcacactgaattggcaggataagaaaaataggtcagataagtatgggatgatagttgaagggaggtgaagaggctgcttctctacagaggtgaaattccagatgagtcagtctcttgggaagtgtgtttagaagggttcaggactttgtgagttagcatgaccctaaaattctaggggatttctggtgggacaatgggtggtgaattttgaagttttggagagggaagtggagcagccagcaagtaagctagccagagttttctcaagagccagctttgctcagcacactctcctgggccccaaggagtcccacggaatggggaaagtgggaaccctggagttcttgggaatcttggagcctaaagagaaaccgaggtgcaaattcatttcatggtgactgacccttgagcttaaacagaagcagcaaatgaaagaaccggacaaataaggaagggcacaagcctacccgactctatttacagtctgtaactttccactcttcctgtagtcccgaggcccctgggtccttctagcttttctctttcccatccttggggccttgtgtgatgatgggtgtggggctgccgatgggaaagtcgggggttgttaggcttttctgcctgctcctgcttaaacacaagaaggaatcctggattttgccctctccttagctcttagtctctttggtaggagttttgttccagaggagctctcccccttggatttgaacttgctctttttgttgttgttgttctttctcttctttttcttacctcccactaaaggggttccaaattatcctggtctttttctaccttgttgtgtttctatctcgtctttacttccatctgtttgtttttttctccatcagtgggggccgagttgttcccccagcctgccaaattttgatccttcccctcttttggccaaatcctagggggaagaaatcctagtatgccaaaaatatatgctaagcataattaaactccatgcgggtccataacagccaagaagcctgcaggagaaagccaagggcagttccctccgcagaacaccccatgcgtgctgagaggcgagctccttgaagaaggggctgttcttccaggaggccttattttgaactgcctcaggaccccactggagagcacagcatgccttactactgggtcatccttggtctatgtgctctgtactggaggctctgttctgcctcttatcagccaggtcaggggcacacatggcttaagtgacaaagccagaggagaagacaaccctgacagcatcacgctgcatcccattgctagcaggattggcaactcttcagacggagctgcgcttccctgcagtctagcacctctagggcctctccagactgtgccctgggagctctgggactgaaaggttaagaacataaggcaggatcagatgactctctccaagagggcaggggaattttctctccatgggccacaggggacagggctgggagaagaaatagacttgcaccttatgtcatgtaaataattgattttctagttcaagaagataatattggtagtgtgggaattggaggtaggaaggggaggaagtctgagtaagccagttggcttctaagccaaaaggattcctctttgtttatctctgagacagtccaaccttgagaatagctttaaaagggaaattaatgctgagatgataaagtccccttaagccaacaaaccctctgtagctatagaatgagtgcaggtttctattggtgtggactcagagcaatttacaagagctgttcatgcagccatccatttgtgcaaaatagggtaagaagattcaagaggatatttattacttcctcataccacatggcttttgatgattctggattctaaacaacccagaatggtcatttcaggcacaacgatactacattcgtgtgtgtctgcttttaaacttggctgggctatcagaccctattctcggctcaggttttgagaagccatcagcaaatgtgtacgtgcatgctgtagctgcagcctgcatcccttcgcctgcagcctactttggggaaataaagtgccttactgactgtagccattacagtatccaatgtcttttgacaggtgcctgtccttgaaaaacaaagtttctatttttatttttaattggtttagttcttaactgctggccaactcttacatccccagcaaatcatcgggccattggattttttccattatgttcatcacccttatatcatgtacctcagatctctctctctctcctctctctcagttatatagtttcttgtcttggactttttttttcttttctttttctttttttttttgctttaaaacaagtgtgatgccatatcaagtccatgttattctctcacagtgtactctataagaggtgtgggtgtctgtttggtcaggatgttagaaagtgctgataagtagcatgatcagtgtatgcgaaaaggtttttaggaagtatggcaaaaatgttgtattggctatgatggtgacatgatatagtcagctgccttttaagaggtcttatctgttcagtgttaagtgatttaaaaaaataataacctgttttctgactagtttaaagatggatttgaaaatggttttgaatgcaattaggttatgctatttggacaataaactcaccttgacct

SEQ ID NO: 269 - protein, 289 aa, Homo sapien
MELLCHEVDPVRRAVRDRNLLRDDRVLQNLLTIEERYLPQCSYFKCVQKDIQPYMRRMVATWMLEVCEEQKCEEEVFPLAMNYLDRFLAGVPTPKSHLQLLGAVCMFLASKLKETSPLTAEKLCIYTDNSIKPQELLEWELVVLGKLKWNLAAVTPHDFIEHILRKLPQQREKLSLIRKHAQTFIALCATDFKFAMYPPSMIATGSVGAAICGLQQDEEVSSLTCDALTELLAKITNTDVDCLKACQEQIEAVLLNSLQQYRQDQRDGSKSEDELDQASTPTDVRDIDL

SEQ ID NO: 270 - DNA, 6480 bp, Homo sapien; identical to SEQ ID NO: 268

SEQ ID NO: 271 - protein, 289 aa, Homo sapien; identical to SEQ ID NO: 269

SEQ ID NO: 272 - DNA, 1105 bp, Homo sapien
gccaccgctgtggtgtcggtgggtcggttggtttttgtctcaccgttggtgtccgtgccgttcagttgcccgccatggctgagctggatccgttcggcgcccctgccggcgcccctggcggtcccgcgctggggaacggagtggccggcgccggcgaagaagacccggctgcggccttcttggcgcagcaagagagcgagattgcgggcatcgagaacgacgaggccttcgccatcctggacggcggcgcccccgggccccagccgcacggcgagccgccggggggtccggatgctgttgatggagtaatgaatggtgaatactaccaggaaagtaatggtccaacagacagttatgcagctatttcacaagtggatcgattgcagtcagagcctgaaagtatccgtaaatggagagaagaacaaatggaacgcttggaagcccttgatgccaattctcggaagcaagaagcagagtggaaagaaaaggcaataaaggagctagaagaatggtatgcaagacaggacgagcagctacagaaaacaaaagcaaacaacagggtggcagatgaagctttctacaaacaacccttcgctgacgtgattggttatgtcacaaacataaaccatccttgctacagcctagaacaggcagcagaagaagcctttgtaaatgacattgacgagtcgtccccaggcactgagtgggaacgggtggcccggctgtgtgactttaaccccaagtctagcaagcaggccaaagatgtctcccgcatgcgctcagtcctcatctccctcaagcaggccccgctggtgcactgaagagccaccctgtggaaacactacatctgcaatatcttaatcctactcagtgaagctcttcacagtcattggattaattatgttgagttcttttggaccaaacctttttgtctttagagttgttcattgtttgtgattgcatgtttccttccttcaactgtgttctccctggcattcagagaggagggagaggaggaagaggaaggggagggaagcttcccaagagtagcctcaacctgtgcttctgtgcattattctgagaataaatttctgtttcaaactgt

SEQ ID NO: 273 - protein, 248 aa, Homo sapien
MAELDPFGAPAGAPGGPALGNGVAGAGEEDPAAAFLAQQESEIAGIENDEAFAILDGGAPGPQPHGEPPGGPDAVDGVMNGEYYQESNGPTDSYAAISQVDRLQSEPESIRKWREEQMERLEALDANSRKQEAEWKEKAIKELEEWYARQDEQLQKTKANNRVADEAFYKQPFADVIGYVTNINHPCYSLEQAAEEAFVNDIDESSPGTEWERVARLCDFNPKSSKQAKDVSRMRSVLISLKQAPLVH

SEQ ID NO: 274 - DNA, 2253 bp, Homo sapien
gtgcatgccgtgggtctgacggcttgagtagcgctagggagaatccctgcaggtaatatttgacttttgcttcatattaatctgagtggaaaataaaagggccctcttctcctctcgcttccctgccgggcaggcgccatggcggaagcctcggcgacgggcgcctgcggagaggcgatggcagcggcggaaggctcctcgggcccggcgggcttgactctgggccggagcttctcgaactaccggcccttcgagccccaggcgttgggcctcagcccgagctggcggctgacgggcttctccggcatgaagggctgaggctgcaaggtcccgcaggaggcgctgctcaaactcctggcgggactgacgcggccggacgtgcggcccccgctgggccggggcctggtgggtggccaggaagaggcgtcccaggaagccggcctgccggcaggagcgggccccagccccacctttccagccctgggcatcgggatggactcctgcgtcatccccctgaggcacgggggcctgtcactggtgcagaccacggacttcttttaccccttggtagaagatccctacatgatggggcgcatagcttgtgccaacgtgctgagtgacctctacgccatggggattactgagtgtgacaacatgttgatgttactcagcgtcagccagagtatgagtgaggaggaacgcgaaaaggtaacgccactcatggtcaaaggctttcgggatgcggctgaggaaggagggacggcagtgaccggtgggcaaacggtggtcaacccttggattataatcggtggagttgccactgtagtatgccaaccaaatgagttcataatgccggacagcgccgtcgttggggacgtgctggtgttaaccaaaccgttaggaacccaggttgctgtcaatgcccaccaatggctggataatcctgaaagatggaataaagtaaagatggtggtctccagagaagaggtggagctggcctatcaggaagccatgttcaatatggctaccctcaacagaactgctgcaggtttaatgcacacatttaatgcccatgcggccacagatatcacaggctttggcattctaggacactcccagaaccttgcaaaacaacaaagaaatgaagtgtcctttgttattcataatctgccaataattgccaagatggctgccgtcagcaaggccagtggacggtttgggcttcttcaaggaacctcagctgaaacctctgggggattactgatttgtctgccaagagaacaggcggctcgcttttgttctgaaatcaaatcctccaagtacggagagggtcaccaagcgtggatcgttggcattgtggaaaagggaaaccgaacggcccggatcattgacaagccgcgagttattgaagtcctgcctcgtggggccacagctgctgttcttgctcctgacagttcaaatgcctcctctgagcctagctcgtgagatgaaagaacagaagttgtttggaccttagagccattgtccacaatcacggatggttctcaagagttgattgtaagaaatttccaaagaaggctgcctgcatagtggttccggctgccctttctaggtgattggaatcagcccatctaaagcagtctttatatgcattccgaggccagagtaacattttgaactttggggggatatttgttcatcacttgggtagaagaggagcaaaaatacttctgttttctcttgccaaagtaagatgaagctattccaggttgagggatttttctttgcacggggttgattaatttctgcacagggagtgagattattaaagtaacacacacacaaagtaaattgcaaaatgaaaaaaattagaagcaaatgagttttggaccaatattgttgataaatctaaattgttaagagagatcttataatgcaacatcaaattctttattcaattttactgaagtactggctctttcctgctctggacaagaattgagcaacttgtctgatgactgggaaaggaggacctgcaaccatctgacttggtctctgttaatgacgtctctccctctaaaccccattaaggactgggagaggcagagcaagcctcagagcccaggcctcagtggtcattaagatgttaagtcttttgcggcagattcctggtgatttgatcaataaagagtaatttcttgctaaataaataaaagaaaccttgttgaaaaactaaaaaaaaaaaaaaaaaaa

SEQ ID NO: 275 - protein, 448 aa, Homo sapien
  unsure 60: unknown amino acid
MAEASATGACGEAMAAAEGSSGPAGLTLGRSFSNYRPFEPQALGLSPSWRLTGFSGMKGXGCKVPQEALLKLLAGLTRPDVRPPLGRGLVGGQEEASQEAGLPAGAGPSPTFPALGIGMDSCVIPLRHGGLSLVQTTDFFYPLVEDPYMMGRIACANVLSDLYAMGITECDNMLMLLSVSQSMSEEEREKVTPLMVKGFRDAAEEGGTAVTGGQTVVNPWIIIGGVATVVCQPNEFIMPDSAVVGDVLVLTKPLGTQVAVNAHQWLDNPERWNKVKMVVSREEVELAYQEAMFNMATLNRTAAGLMHTFNAHAATDITGFGILGHSQNLAKQQRNEVSFVIHNLPIIAKMAAVSKASGRFGLLQGTSAETSGGLLICLPREQAARFCSEIKSSKYGEGHQAWIVGIVEKGNRTARIIDKPRVIEVLPRGATAAVLAPDSSNASSEPSS

SEQ ID NO: 276 - DNA, 6755 bp, Homo sapien
gagagaagcctgatatgtaacccaggcgggtgggagcctcagtctgtcgggctgaggtctggcatctacaaagcctcttggccgtgttctgaacttgaagcctggaggagttctctgctcagcacagccaaggaacagaattagaagaaaaggaaccctggcctgaggcaggtgacaaacattaccaccccagctgtgcacgatgcagcagatgcaaccagatgttcacagaaggagaggaaatgtatcttcaaggctccaccgtttggcatcccgactgtaagcaatctacgaagaccgaggaaaagctgcggcctaccaggacatcctcggaaagtatttattctaggccaggctccagtattcctggctcaccaggtcatactatctatgcaaaagtagacaatgagatcctggattacaaggatttagcagccattccgaaggtcaaggcaatttatgacattgaacgtccagatcttattacctatgagcctttctacacttcgggctatgatgacaaacaggagagacagagccttggagagtctccgaggactttgtctcctactccatcagcagaagggtaccaggatgttcgggatcggatgatccatcggtccacgagccagggctccatcaactcccctgtgtacagccgccacagctacactccaaccacgtcccgctctccccagcatttccacagacctggcaatgagccgtccagcggccggaactcccctctcccttaccggccagacagccgccctctaactccaacttacgctcaggcccctaaacatttccatgttccagatcaaggaatcaacatttaccgaaagccacccatctacaaacagcatgctgccttggcagcccagagcaagtcctcagaagatatcatcaagttttccaagttcccagcagcccaggcaccagaccccagcgagacaccagagattgagacggaccactggcctggtcccccctcatttgctgtcataggacctgacatgaaacgcagatctagtggcagagaggaagatgatgaggaacttctgagacgtcggcagcttcaagaagagcaattaatgaagcttaactcaggcctgggacagttgatcttgaaagaagagatggagaaagagagccgggaaaggtcatctctgttagccagtcgctacgattctcccatcaactcagcttcacatattccatcatctaaaactgcatctctccctggctatggaagaaatgggcttcaccggcctgtttctaccgacttcgctcagtataacagctatggggatgtcagcgggggagtgcgagattaccagacactcccagatggccacatgcctgcaatgagaatggaccgaggagtgtctatgcccaacatgttggaaccaaagatatttccatatgaaatgctcatggtgaccaacagagggcgaaacaaaatcctcagagaggtggacagaaccaggctggagcgccacttagcccctgaagtgtttcgggaaatctttggaatgtccatacaggagtttgacaggttacctctttggagacgcaacgacatgaagaaaaaagcaaaactcttctaagtcccactcgtgaatggcaattagagaaaggactgacagtggcggtgccccataggatgtcatattgaggcccaaacttgattggagaatttgcaaactaccgtcgctcagcaacaccaaaaagagaaagtctggttaaaacaccatgagtcaaatgtcgggccagccaacagtaacacttgccaagaagcatggcgtagaaatttctatgttccgaaacacagagtagtgtccacatgtgaccttttcacattaccttatgtatacaacaggagctgcgttgttttcttctttttcttttcctttatctgttgtccaacaacagtgctgactgtccggataagagctggcaagtgcccttaggatgccgcatgggaaaaatcggttatcataatttcaaagtataaatatatttattatgtagcgctgcggctaagaaggaagagtgaggggtctgtccatggggtggcagtgatttcacacccgcctttcttgaatggcttcgtgttactcagccgtgccctggcaggaatggaactccatcagggaacagggcagctctgtttgaatggggtgaaaaacagcaaaattaattcttagcaagctccttgttctctactgttcaccgggacctggctggcaaatgacttagctattagtatatttaaaaactgttcaaaagcaaaagagaaggaacaggaatgaaaggaaaccttcccttaactctttctgcttcccatagcaggtctggttcctgctccccgcctaggacaggagctgtctggagctccacctttgcaaagaaaggaaaaacacaaattgcccccagattggcccagtggcatgccattaggtgattttgcgtaggggccatatcattcatggccaaaaaaaaccaaaaagcaaaaaacaaaaacaagtcccatgtcctactgactctagttcttccagtcgttatcctctgctgtctctctggcatcctatgaatcagatcaagcccatgctgttgttggtttttaaggtttctttcaataataggctaaggaaagacatgtttttctcttttaaatctctgcaactccaaagtagactccttcgaacgtatttaatttggccttttcagctttcttcttgcccagctctgtcgaattcatgggtgtgtgtgcacatgttggtttcactcacccagagtaattttgtgagcatgcatgtgctttttaatttctgcttgaatgtttgtcctgctgtgttgcagcttctaaagacattgtcaccgagtgtgtgtgactcaaagatcaagagtgaggctaaactgcgaccccaacatcacttccttcatggaaaggtgttggcgctgatgtagctcatggaaggatcagactgggaaccacagaggaaggatgaggtgggatgtggaggtcagagcatctcacgagagtccctcaggctctgcaacactagattcgaatatgagcctagggtttccccaacacgtgcgtgcatatgaaaccacatcatgattcccgacgtgagttagatgagggagagtttgtgtaactccacacccaggagggtaagccactttattatcatgctttggggctgtgcttaagaatttaagctctgttttaaagccgaagaagaaaacatttgaatttaccttcatatgccactaagaacaaaagctctgaagttcttcctgctggcaccaaatattaggattacaagctgtctctctgacaccagtggtaaaaaagcaagtagaatagtttctgagtctgtgttgcagcctctgacacgtggctcactgctgtcatttggggggtggaatgaacagtcactgttctatagcatcctcctgtgctcttacctaaggaatctaaattgtcctagccttccattgctatgcactgaatgaggactactctcgtgtgtgtgtgtgtgtgtgtgtgtgtgtgtgtgtgtgtgtgtgtgtgttggatctactaacatgtttagcaaatggctctgacagggtggccatgagcagatgagaccagctcttgcttggttggaagccacactgcagtttgcagtttagcctttggtgtctcagtggcctcttgcttattccatgctttttctatcccatcctctctctgtgccctcctgcaatggcagccttggcacaatgcctgggtgtcctcatccttgctttactctggaaagtgtggggatggagaggatggtgcatttccagtgcttccttacctgtcaataacaatggtggccacctgggtcccagcacttggctggtggagagatttttttcattatggagctaataaagggtccctacgttttacattgattaatgaattatcacccagacatgtgcagatgaaatgtcaatataagaaaaatcaaggtatttgggaaacatgggcataatcaggtagttttgctaaaattcctcttccttggtctacataaagaagacatgggtctgtcatagaatggggacattagactgaaaactgggacaacccccttccttattttatagagactaggagttaaggggcctgcctaagattgcagtgataaagaactgaaccctaaatcagctcccactaatgaaaccctgctttccttgtatcttttaaactcagttctgcatccaacttgagaagaaaaaaagcttctttccatatcaagtaccatatgagttcatttaaactgcaccttgcagaaatgcattgccagaaagcaccagtagcctcctatctgcaagcagagtagtgctctgctctggggaggggtcattggaaaccataatgcagagtgggccccctactccatttcccagcaaaaggctccagctggagggatgggttgtggggcaacctggttcctgctaactgccagattgaatgtgtgggctagaatgcctgcgcatttagttaaactgggctcagcatgcttgtcctcaaaatgtccatcctggtcacagcacacaagatggctattggtctgcttttaccctaccctgtactatacatgaaaattccagttattaacacactcaaactggtggagcttgttcaccctaggaaggggattgtatatatggcaggcttccctggtgccgatgtaaagggctacatttgggaacatttgacttccttgggactcttaagtgcatactgatggcatgaagtaaaaggggcctcaatgatgataggaaaatcagttcttttaaaatttcttcaagaaaatccaggctatcacatagtctttctgtgtgacttattaggagataggaagagcattgggaaacttgcacagctagctatgcatctacattttggtttggggttagttatgaaatgttcttaatatgacgtgttcaataacttcacataaacttcctgttctccaaaacctcaaagagatagagttaatgagttgttgtttttttttaaatgggggtagttttctatctgtcatgggctctagcatctactccgctacccaattctgtcatctccaagctgagtttcctcttctgaggcagaggctggagcagttctttttcagttctcatcctctccatcccaatccagtatatcaatcaactctaactcggagacgtctagctggcaatgtttctaaaactttcactggatttctttagacattgaagcaaacatttttttctaagaattgcttctcagatgatgatatcaaatgtatatgcttttgcaagtttgaaaagttcaaattaaccacttttgactaggtaagtctttctaaaaaccatttaaagctaactgggtcttagcatcctcctgtgtatggaagagacaggtgaccgctccaggttgggtgctcacagaacccttttcctgactctcatggaagatggtggaaggaaaatagactgtctcatcaaccctcctgtgtcctctgaagcaatctcagtttttattaaccacctcttctgtgtttctggtagctatttaacctgtatttaatctgtacttcctatgccagcctcaattttatttgatttttaaaattattctcttctaaccaatgaagtgtttgtcagtatgccccaaagcttgctcttttgtgctcccttttgaataactttctatccagaaaaagagattatttgggacttgagatttgcagtgataccaacttatagcaatgatgtactttaagggaactacccaactatgttgtgatagaagaaagagaaaccttcactttggcattttttttaatcactgtttatttttctgtttgcggcccaggaagcagtgggaggtggtggcagatatgctttgcatatggattgttatgtttttatttgggcaagtttaatcatggaaaactcaaaaagaaggggggaaatggtcagtttaagccaaaagaaactttctaaacaatgtataggtacacagcaaaattaaacaaatccaacaatttctgaagcttagtgtaattgagtggtggttgttattcaataaaattattcccaaaagtgtttctcctaagagtgcagttcccatgagtcacttcctgaacccattgaccaaaggtggacagagacaatcctgtagaccttgacattcagaaagatgtgagctgcttactgatcatatatgcatacgtttctttacagcagaggaaaccattgtccacaaaactgatgttcttttggggttttatgtacagacttgtccaatcatgtgtgtggttcctgcgagttgctgatgactccgcattgaagctctctgagttctttgattttaagttgggtttatggaattttttcaaatgttggaaggcgtgtggttcttcctgccctccctccccttttggaaatatgaaagcaaatgtttagaagaattccttttgaaaagctgtgtcgtgttccctgtgaaactgagcaggtgtgtgttggcgcgctaagtgccacatgcttgtgtgtagaggaggaggtggccctgccggctccgcgctgctgtgcctgtgatccctacctgctccccgctcctgttgccagcagcactcactgcactcctttgtcatatactctgcatcactgtcatactcacaacttcgtgaataaagttgtgtgctttattcgtc

SEQ ID NO: 277 - protein, 462 aa, Homo sapien
MFTEGEEMYLQGSTVWHPDCKQSTKTEEKLRPTRTSSESIYSRPGSSIPGSPGHTIYAKVDNEILDYKDLAAIPKVKAIYDIERPDLITYEPFYTSGYDDKQERQSLGESPRTLSPTPSAEGYQDVRDRMIHRSTSQGSINSPVYSRHSYTPTTSRSPQHFHRPGNEPSSGRNSPLPYRPDSRPLTPTYAQAPKHFHVPDQGINIYRKPPIYKQHAALAAQSKSSEDIIKFSKFPAAQAPDPSETPEIETDHWPGPPSFAVIGPDMKRRSSGREEDDEELLRRRQLQEEQLMKLNSGLGQLILKEEMEKESRERSSLLASRYDSPINSASHIPSSKTASLPGYGRNGLHRPVSTDFAQYNSYGDVSGGVRDYQTLPDGHMPAMRMDRGVSMPNMLEPKIFPYEMLMVTNRGRNKILREVDRTRLERHLAPEVFREIFGMSIQEFDRLPLWRRNDMKKKAKLF

SEQ ID NO: 278 - DNA, 1464 bp, Homo sapien
agtaccgggtacgcaggggtgcctcaaccacactccgtccacggactctccgttattttaggaggtccctggccaaagatttatttctcttgacaaccaagggcctccgtctggatttccaaggaagaatttcctctgaagcaccggaacttgctactaccagcaccatgccctaccaatatccagcactgaccccggagcagaagaaggagctgtctgacatcgctcaccgcatcgtggcacctggcaagggcatcctggctgcagatgagtccactgggagcattgccaagcggctgcagtccattggcaccgagaacaccgaggagaaccggcgcttctaccgccagctgctgctgacagctgacgaccgcgtgaacccctgcattgggggtgtcatcctcttccatgagacactctaccagaaggcggatgatgggcgtcccttcccccaagttatcaaatccaagggcggtgttgtgggcatcaaggtagacaagggcgtggtccccctggcagggacaaatggcgagactaccacccaagggttggatgggctgtctgagcgctgtgcccagtacaagaaggacggagctgacttcgccaagtggcgttgtgtgctgaagattggggaacacaccccctcagccctcgccatcatggaaaatgccaatgttctggcccgttatgccagtatctgccagcagaatggcattgtgcccatcgtggagcctgagatcctccctgatggggaccatgacttgaagcgctgccagtatgtgaccgagaaggtgctggctgctgtctacaaggctctgagtgaccaccacatctacctggaaggcaccttgctgaagcccaacatggtcaccccaggccatgcttgcactcagaagttttctcatgaggagattgccatggcgaccgtcacagcgctgcgccgcacagtgccccccgctgtcactgggatcaccttcctgtctggaggccagagtgaggaggaggcgtccatcaacctcaatgccattaacaagtgccccctgctgaagccctgggccctgaccttctcctacggccgagccctgcaggcctctgccctgaaggcctggggcgggaagaaggagaacctgaaggctgcgcaggaggagtatgtcaagcgagccctggccaacagccttgcctgtcaaggaaagtacactccgagcggtcaggctggggctgctgccagcgagtccctcttcgtctctaaccacgcctattaagcggaggtgttcccaggctgcccccaacaactccaggccctgccccctcccactcttgaagaggaggccgcctcctcggggctccaggctggcttgcccgcgctctttcttccctcgtgacagtggtgtgtggtgtcgtctgtgaatgctaagtccatcaccctttccggcacactgccaaataaacagctatttaaggggg

SEQ ID NO: 279 - protein, 364 aa, Homo sapien
MPYQYPALTPEQKKELSDIAHRIVAPGKGILAADESTGSIAKRLQSIGTENTEENRRFYRQLLLTADDRVNPCIGGVILFHETLYQKADDGRPFPQVIKSKGGVVGIKVDKGVVPLAGTNGETTTQGLDGLSERCAQYKKDGADFAKWRCVLKIGEHTPSALAIMENANVLARYASICQQNGIVPIVEPEILPDGDHDLKRCQYVTEKVLAAVYKALSDHHIYLEGTLLKPNMVTPGHACTQKFSHEEIAMATVTALRRTVPPAVTGITFLSGGQSEEEASINLNAINKCPLLKPWALTFSYGRALQASALKAWGGKKENLKAAQEEYVKRALANSLACQGKYTPSGQAGAAASESLFVSNHAY

SEQ ID NO: 280 - DNA, 1268 bp, Homo sapien
ctgactctctgaggctcattttgcagttgttgaaattgtccccgcagttttcaatcatgtctgaaccaatcagagtccttgtgactggagcagctggtcaaattgcatattcactgctgtacagtattggaaatggatctgtctttggtaaagatcagcctataattcttgtgctgttggatatcacccccatgatgggtgtcctggacggtgtcctaatggaactgcaagactgtgcccttcccctcctgaaagatgtcatcgcaacagataaagaagacgttgccttcaaagacctggatgtggccattcttgtgggctccatgccaagaagggaaggcatggagagaaaagatttactgaaagcaaatgtgaaaatcttcaaatcccagggtgcagccttagataaatacgccaagaagtcagttaaggttattgttgtgggtaatccagccaataccaactgcctgactgcttccaagtcagctccatccatccccaaggagaacttcagttgcttgactcgtttggatcacaaccgagctaaagctcaaattgctcttaaacttggtgtgactgctaatgatgtaaagaatgtcattatctggggaaaccattcctcgactcagtatccagatgtcaaccatgccaaggtgaaattgcaaggaaaggaagttggtgtttatgaagctctgaaagatgacagctggctcaagggagaatttgtcacgactgtgcagcagcgtggcgctgctgtcatcaaggctcgaaaactatccagtgccatgtctgctgcaaaagccatctgtgaccacgtcagggacatctggtttggaaccccagagggagagtttgtgtccatgggtgttatctctgatggcaactcctatggtgttcctgatgatctgctctactcattccctgttgtaatcaagaataagacctggaagtttgttgaaggtctccctattaatgatttctcacgtgagaagatggatcttactgcaaaggaactgacagaagaaaaagaaagtgcttttgaatttctttcctctgcctgactagacaatgatgttactaaatgcttcaaagctgaagaatctaaatgtcgtctttgactcaagtaccaaataataataatgctatacttaaattacttgtgaaaaacaacacattttaaagattacgtgcttcttggtacaggtttgtgaatgacagtttatcgtcatgctgttagtgtgcattctaaataaatatatattcaaatg

SEQ ID NO: 281 - protein, 334 aa, Homo sapien
MSEPIRVLVTGAAGQIAYSLLYSIGNGSVFGKDQPIILVLLDITPMMGVLDGVLMELQDCALPLLKDVIATDKEDVAFKDLDVAILVGSMPRREGMERKDLLKANVKIFKSQGAALDKYAKKSVKVIVVGNPANTNCLTASKSAPSIPKENFSCLTRLDHNRAKAQIALKLGVTANDVKNVIIWGNHSSTQYPDVNHAKVKLQGKEVGVYEALKDDSWLKGEFVTTVQQRGAAVIKARKLSSAMSAAKAICDHVRDIWFGTPEGEFVSMGVISDGNSYGVPDDLLYSFPVVIKNKTWKFVEGLPINDFSREKMDLTAKELTEEKESAFEFLSSA

SEQ ID NO: 282 - DNA, 2510 bp, Homo sapien
gccacgtgtccggctcggagcccacggctgtcctcccggtccgcgccgctgcggttgctgctgggctaacgggctccgatccagcgagcgctgcgtcctcgagtccgcccgtgcgggcgcagggacccgaggcctccgctgcggctggattctgctgcgaaccggagaccatggccaaaccagcacagggtgccaagtaccggggctccatccatgacttcccaggctttgaccccaaccaggatgccgaggctctgtacactgccatgaagggctttggcagtgacaaggaggccatactggacataatcacctcacggagcaacaggcagaggcaggaggtctgccagagctacaagtccctctacggcaaggacctcattgctgatttaaagtatgaattgacgggcaagtttgaacggttgattgtgggcctgatgaggccacctgcctattgtgatgccaaagaaattaaagatgccatctcgggcattggcactgatgagaagtgcctcattgagatcttggcttcccggaccaatgagcagatgcaccagctggtggcagcatacaaagatgcctacgagcgggacctggaggctgacatcatcggcgacacctctggccacttccagaagatgcttgtggtcctgctccagggaaccagggaggaggatgacgtagtgagcgaggacctggtacaacaggatgtccaggacctatacgaggcaggggaactgaaatggggaacagatgaagcccagttcatttacatcttgggaaatcgcagcaagcagcatcttcggttggtgttcgatgagtatctgaagaccacagggaagccgatgaaggccagcatccgaggggagctgtctggggactttgagaagctaatgctggccgtagtgaagtgtatccggagcaccccggaatattttgctgaaaggctcttcaaggctatgaagggcctggggactcgggacaacaccctgatccgcatcatggtctcccgtagtgagttggacatgctcgacattcgggagatcttccggaccaagtatgagaagtccctctacagcatgatcaagaatgacacctctggcgagtacaagaagactctgctgaagctgtctgggggagatgatgatgctgctggccagttcttcccggaggcagcgcaggtggcctatcagatgtgggaacttagtgcagtggcccgagtagagctgaagggaactgtgcgcccagccaatgacttcaaccctgacgcagatgccaaagcgctgcggaaagccatgaagggactcgggactgacgaagacacaatcatcgatatcatcacgcaccgcagcaatgtccagcggcagcagatccggcagaccttcaagtctcactttggccgggacttaatgactgacctgaagtctgagatctctggagacctggcaaggctgattctggggctcatgatgccaccggcccattacgatgccaagcagttgaagaaggccatggagggagccggcacagatgaaaaggctcttattgaaatcctggccactcggaccaatgctgaaatccgggccatcaatgaggcctataaggaggactatcacaagtccctggaggatgctctgagctcagacacatctggccacttcaggaggatcctcatttctctggccacggggcatcgtgaggagggaggagaaaacctggaccaggcacgggaagatgcccaggaaatagcagacacacctagtggagacaaaacttccttggagacacgtttcatgacgatcctgtgtacccggacgtatccgcacctccggagagtcttccaggagttcatcaagatgaccaactatgacgtggagcacaccatcaagaaggagatgtctggggatgtcagggatgcatttgtggccattgttcaaagtgtcaagaacaagcctctcttctttgccgacaaactttacaaatccatgaagggtgctggcacagatgagaagactctgaccaggatcatggtatcccgcagtgagattgacctgctcaacatccggagggaattcattgagaaatatgacaagtctctccaccaagccattgagggtgacacctccggagacttcctgaaggccttgctggctctctgtggtggtgaggactagggccacagctttggcgggcacttctgccaagaaatggttatcagcaccagccgccatggccaagcctgattgttccagctccagagactaaggaaggggcaggggtggggggaggggttgggttgggctcttatcttcatggagcttaggaaacgctcccactcccacgggccatcgagggccagcacggctgagcggtgaaaaaccgtagccatagatcctgtccacctccactcccctctgaccctcaggctttcccagcttcctccccttgctacagcctctgccctggtttggctatgtcagatccaataaacatcctgaacctctgtctgt

SEQ ID NO: 283 - protein, 667 aa, Homo sapien
MAKPAQGAKYRGSIHDFPGFDPNQDAEALYTAMKGFGSDKEAILDIITSRSNRQRQEVCQSYKSLYGKDLIADLKYELTGKFERLIVGLMRPPAYCDAKEIKDAISGIGTDEKCLIEILASRTNEQMHQLVAAYKDAYERDLEADIIGDTSGHFQKMLVVLLQGTREEDDVVSEDLVQQDVQDLYEAGELKWGTDEAQFIYILGNRSKQHLRLVFDEYLKTTGKPMKASIRGELSGDFEKLMLAVVKCIRSTPEYFAERLFKAMKGLGTRDNTLIRIMVSRSELDMLDIREIFRTKYEKSLYSMIKNDTSGEYKKTLLKLSGGDDDAAGQFFPEAAQVAYQMWELSAVARVELKGTVRPANDFNPDADAKALRKAMKGLGTDEDTIIDIITHRSNVQRQQIRQTFKSHFGRDLMTDLKSEISGDLARLILGLMMPPAHYDAKQLKKAMEGAGTDEKALIEILATRTNAEIRAINEAYKEDYHKSLEDALSSDTSGHFRRILISLATGHREEGGENLDQAREDAQEIADTPSGDKTSLETRFMTILCTRTYPHLRRVFQEFIKMTNYDVEHTIKKEMSGDVRDAFVAIVQSVKNKPLFFADKLYKSMKGAGTDEKTLTRIMVSRSEIDLLNIRREFIEKYDKSLHQAIEGDTSGDFLKALLALCGGED

SEQ ID NO: 284 - DNA, 3933 bp, Homo sapien
cacgaggcagcactctcttcgtcgcttcggccagtgtgtcgggctgggccctgacaagccacctgaggagaggctcggagccgggcccggaccccggcgattgccgcccgcttctctctagtctcacgaggggtttcccgcctcgcacccccacctctggacttgcctttccttctcttctccgcgtgtggagggagccagcgcttaggccggagcgagcctgggggccgcccgccgtgaagacatcgcggggaccgattcaccatggagggcgccggcggcgcgaacgacaagaaaaagataagttctgaacgtcgaaaagaaaagtctcgagatgcagccagatctcggcgaagtaaagaatctgaagttttttatgagcttgctcatcagttgccacttccacataatgtgagttcgcatcttgataaggcctctgtgatgaggcttaccatcagctatttgcgtgtgaggaaacttctggatgctggtgatttggatattgaagatgacatgaaagcacagatgaattgcttttatttgaaagccttggatggttttgttatggttctcacagatgatggtgacatgatttacatttctgataatgtgaacaaatacatgggattaactcagtttgaactaactggacacagtgtgtttgattttactcatccatgtgaccatgaggaaatgagagaaatgcttacacacagaaatggccttgtgaaaaagggtaaagaacaaaacacacagcgaagcttttttctcagaatgaagtgtaccctaactagccgaggaagaactatgaacataaagtctgcaacatggaaggtattgcactgcacaggccacattcacgtatatgataccaacagtaaccaacctcagtgtgggtataagaaaccacctatgacctgcttggtgctgatttgtgaacccattcctcacccatcaaatattgaaattcctttagatagcaagactttcctcagtcgacacagcctggatatgaaattttcttattgtgatgaaagaattaccgaattgatgggatatgagccagaagaacttttaggccgctcaatttatgaatattatcatgctttggactctgatcatctgaccaaaactcatcatgatatgtttactaaaggacaagtcaccacaggacagtacaggatgcttgccaaaagaggtggatatgtctgggttgaaactcaagcaactgtcatatataacaccaagaattctcaaccacagtgcattgtatgtgtgaattacgttgtgagtggtattattcagcacgacttgattttctcccttcaacaaacagaatgtgtccttaaaccggttgaatcttcagatatgaaaatgactcagctattcaccaaagttgaatcagaagatacaagtagcctctttgacaaacttaagaaggaacctgatgctttaactttgctggccccagccgctggagacacaatcatatctttagattttggcagcaacgacacagaaactgatgaccagcaacttgaggaagtaccattatataatgatgtaatgctcccctcacccaacgaaaaattacagaatataaatttggcaatgtctccattacccaccgctgaaacgccaaagccacttcgaagtagtgctgaccctgcactcaatcaagaagttgcattaaaattagaaccaaatccagagtcactggaactttcttttaccatgccccagattcaggatcagacacctagtccttccgatggaagcactagacaaagttcacctgagcctaatagtcccagtgaatattgtttttatgtggatagtgatatggtcaatgaattcaagttggaattggtagaaaaactttttgctgaagacacagaagcaaagaacccattttctactcaggacacagatttagacttggagatgttagctccctatatcccaatggatgatgacttccagttacgttccttcgatcagttgtcaccattagaaagcagttccgcaagccctgaaagcgcaagtcctcaaagcacagttacagtattccagcagactcaaatacaagaacctactgctaatgccaccactaccactgccaccactgatgaattaaaaacagtgacaaaagaccgtatggaagacattaaaatattgattgcatctccatctcctacccacatacataaagaaactactagtgccacatcatcaccatatagagatactcaaagtcggacagcctcaccaaacagagcaggaaaaggagtcatagaacagacagaaaaatctcatccaagaagccctaacgtgttatctgtcgctttgagtcaaagaactacagttcctgaggaagaactaaatccaaagatactagctttgcagaatgctcagagaaagcgaaaaatggaacatgatggttcactttttcaagcagtaggaattggaacattattacagcagccagacgatcatgcagctactacatcactttcttggaaacgtgtaaaaggatgcaaatctagtgaacagaatggaatggagcaaaagacaattattttaataccctctgatttagcatgtagactgctggggcaatcaatggatgaaagtggattaccacagctgaccagttatgattgtgaagttaatgctcctatacaaggcagcagaaacctactgcagggtgaagaattactcagagctttggatcaagttaactgagctttttcttaatttcattcctttttttggacactggtggctcactacctaaagcagtctatttatattttctacatctaattttagaagcctggctacaatactgcacaaacttggttagttcaatttttgatcccctttctacttaatttacattaatgctcttttttagtatgttctttaatgctggatcacagacagctcattttctcagttttttggtatttaaaccattgcattgcagtagcatcattttaaaaaatgcacctttttatttatttatttttggctagggagtttatccctttttcgaattatttttaagaagatgccaatataatttttgtaagaaggcagtaacctttcatcatgatcataggcagttgaaaaatttttacaccttttttttcacattttacataaataataatgctttgccagcagtacgtggtagccacaattgcacaatatattttcttaaaaaataccagcagttactcatggaatatattctgcgtttataaaactagtttttaagaagaaattttttttggcctatgaaattgttaaacctggaacatgacattgttaatcatataataatgattcttaaatgctgtatggtttattatttaaatgggtaaagccatttacataatatagaaagatatgcatatatctagaaggtatgtggcatttatttggataaaattctcaattcagagaaatcatctgatgtttctatagtcactttgccagctcaaaagaaaacaataccctatgtagttgtggaagtttatgctaatattgtgtaactgatattaaacctaaatgttctgcctaccctgttggtataaagatattttgagcagactgtaaacaagaaaaaaaaaatcatgcattcttagcaaaattgcctagtatgttaatttgctcaaaatacaatgtttgattttatgcactttgtcgctattaacatcctttttttcatgtagatttcaataattgagtaattttagaagcattattttaggaatatatagttgtcacagtaaatatcttgttttttctatgtacattgtacaaatttttcattccttttgctctttgtggttggatctaacactaactgtattgttttgttacatcaaataaacatcttctgtggaaaaaaaaaaaaaaaaaaaa

SEQ ID NO: 285 - protein, 826 aa, Homo sapien
MEGAGGANDKKKISSERRKEKSRDAARSRRSKESEVFYELAHQLPLPHNVSSHLDKASVMRLTISYLRVRKLLDAGDLDIEDDMKAQMNCFYLKALDGFVMVLTDDGDMIYISDNVNKYMGLTQFELTGHSVFDFTHPCDHEEMREMLTHRNGLVKKGKEQNTQRSFFLRMKCTLTSRGRTMNIKSATWKVLHCTGHIHVYDTNSNQPQCGYKKPPMTCLVLICEPIPHPSNIEIPLDSKTFLSRHSLDMKFSYCDERITELMGYEPEELLGRSIYEYYHALDSDHLTKTHHDMFTKGQVTTGQYRMLAKRGGYVWVETQATVIYNTKNSQPQCIVCVNYVVSGIIQHDLIFSLQQTECVLKPVESSDMKMTQLFTKVESEDTSSLFDKLKKEPDALTLLAPAAGDTIISLDFGSNDTETDDQQLEEVPLYNDVMLPSPNEKLQNINLAMSPLPTAETPKPLRSSADPALNQEVALKLEPNPESLELSFTMPQIQDQTPSPSDGSTRQSSPEPNSPSEYCFYVDSDMVNEFKLELVEKLFAEDTEAKNPFSTQDTDLDLEMLAPYIPMDDDFQLRSFDQLSPLESSSASPESASPQSTVTVFQQTQIQEPTANATTTTATTDELKTVTKDRMEDIKILIASPSPTHIHKETTSATSSPYRDTQSRTASPNRAGKGVIEQTEKSHPRSPNVLSVALSQRTTVPEEELNPKILALQNAQRKRKMEHDGSLFQAVGIGTLLQQPDDHAATTSLSWKRVKGCKSSEQNGMEQKTIILIPSDLACRLLGQSMDESGLPQLTSYDCEVNAPIQGSRNLLQGEELLRALDQVN

SEQ ID NO: 286 - DNA, 1658 bp, Homo sapien
tgtaaataagataaggtcatctgatagccttattcagtcttcatcattttcatcattgttcctatgtagattattggacatttattgtagcactacataactgattataaaaatctgtaaatgaattagcactttcatattgaaacaagcctgctagcctattttatacataggctagcaggcttgtttcaatatgaaagtgctaattcatttacagattgaaacaagcctgctagcctatgtataaaatagcaaatgtttgctgttataaaaagatgtaatggggtggggggcaggggtaatttcaagttattaatttaaaaatgaactagcaattttgtacctggtgactttgtggtgcactcacctctgatagtgacttgaattcggtatgtaaaaaggggttagtggtatttcattgctgctaaaaatgacaactccctctgtgtcctgtttttcttaaagctgtcagtgtacaagtgggtatttgaataccagaccttactgtaaaaaataaaaaaggtggtatctagagcatgtaaattggatataaagttctgctcttaaagagttgatctaagagtatggctaaacatctatatatgcaatctattaaaagaacttaattcggctattatgtcttgatttgattgcagttttttcctaattataacaaatttttcctcattggcctgtttttaatcctgtgcctagaaggagtacaaaatgcacactttacaaaattgatatttaacacttacccactcccctttccccatctcttctaccgctcttgttgatcgtggtatctgatcttgactagataggctgaaggcacatggttccctccaaaaaccactattgataccactacaaaaacaagccagcaaaaagatactgtagagaggttggcttgcttccctctcttcctaactgcatgttgaaaaataagccgttattgatcttaaacatcggtcagatgagtcatacattgggttattttttatatacatgtatacacaaaatatttcaaattgaaagcaacatcttaatggattcaaaactattacaagctgttgtctaaaacaggtgagaaaaaaatttataactgtaaaaacaaatgcacatattgatatttaaaatgcgtaattaagaaaacccattgttgttgtgtttttcttgtataccaataattaagccactactgttggcactgtttggttttctattttaacactgaaggagtgaaagtatttcctatatttatgaatttactactaaaatcttggcaaaaaaagaaaaaaattgtctaacgtgtgtgggtgaaaactgttaatcaagtgtttctactcccccccgaaaatcccctgaaagttggacaccaactgtataccctaggttgcttaaagggatttcactattatataaagtcaataaaaatgaagtagttgtatatatgcaacattgtgtacagaggggaaataatgaatagtattaaagaaacattctcgtcttcctttacctttaatcccctaatacctagtctactttttaaattttcagacttcactgctttttgaattcataattctaattttcacattattgttaatggaaaatcatatctaataaaggttttagttattcccatgcacagt

SEQ ID NO: 287 - protein, 32 aa, Homo sapien
VNKIRSSDSLIQSSSFSSLFLCRLLDIYCSTT

SEQ ID NO: 288 - DNA, 2913 bp, Homo sapien
gggggagcccctgcaagtttcccgggccgcgcgccgcgctcgctcgcctcccagcccgcggcccgagccgccgccgcgcccgccatgccctcggccaaacaaaggggctccaagggcggccacggcgccgcgagcccctcggagaagggtgcccacccgtcgggcggcgcggatgacgtggcgaagaagccgccgccggcgccgcagcagccgccgccgccgcccgcgccgcacccgcagcagcacccgcagcagcacccgcagaaccaggcgcacggcaagggcggccaccgcggcggcggcggcggcggcggcaagtcctcctcctcctcctccgcctccgccgccgctgccgccgccgccgcctcgtcctcggcgtcctgctcgcgcaggctcggcagggcgctcaactttctcttctacctcgccctggtggcggcggccgctttctcgggctggtgcgtccaccacgtcctggaggaggtccagcaggtccggcgcagccaccaggacttctcccggcagagggaggagctgggccagggcttgcagggcgtcgagcagaaggtgcagtctttgcaagccacatttggaacttttgagtccatcttgagaagctcccaacataaacaagacctcacagagaaagctgtgaagcaaggggagagtgaggtcagccggatcagcgaagtgctgcagaaactccagaatgagattctcaaagacctctcggatgggatccatgtggtgaaggacgcccgggagcgggacttcacgtccctggagaacacggtggaggagcggctgacggagctcaccaaatccatcaacgacaacatcgccatcttcacagaagtccagaagaggagccagaaggagatcaatgacatgaaggcaaaggttgcctccctggaagaatctgaggggaacaagcaggatttgaaagccttaaaggaagctgtgaaggagatacagacctcagccaagtccagagagtgggacatggaggccctgagaagtacccttcagactatggagtctgacatctacaccgaggttcgcgagctggtgagcctcaagcaggagcagcaggctttcaaggaggcggccgacacggagcggctcgccctgcaggccctcacggagaagcttctcaggtctgaggagtccgtctcccgcctcccggaggagatccggagactggaggaagagctccgccagctgaagtccgattcccacgggccgaaggaggacggaggcttcagacactcggaagcctttgaggcactccagcaaaagagtcagggactggactccaggctccagcacgtggaggatggggtgctctccatgcaggtggcttctgcgcgccagaccgagagcctggagtccctcctgtccaagagccaggagcacgagcagcgcctggccgccctgcaggggcgcctggaaggcctcgggtcctcagaggcagaccaggatggcctggccagcacggtgaggagcctgggcgagacccagctggtgctctacggtgacgtggaggagctgaagaggagtgtgggcgagctccccagcaccgtggaatcactccagaaggtgcaggagcaggtgcacacgctgctcagtcaggaccaagcccaggccgcccgtctgcctcctcaggacttcctggacagactttcttctctagacaacctgaaagcctcagtcagccaagtggaggcggacttgaaaatgctcaggactgctgtggacagtttggttgcatactcggtcaaaatagaaaccaacgagaacaatctggaatcagccaagggtttactagatgacctgaggaatgatctggataggttgtttgtgaaagtggagaagattcacgaaaaggtctaaatgaattgcgtgtgcagggcgcggatttaaagtccaatttctcatgaccaaaaaatgtgtggttttttcccatgtgtcccctaccccccaatttcttgtcccctcttaaagagcagttgtcaccacctgaacaccaaggcattgtattttcatgcccagttaacttatttacaatatttaagttctctgcttctgcatttggttggtttcctgaagcgcagcccctgtgaataacaggtggcttttcatggatgtctctagtcagagaaaaatgataaaggcttaaattgaggattaacagaagcagattaacctcagaaatcctgtctggctggcagatttcaagtaaaaaaaaaaaaaaggtgggttggggggacccttttctttctagttgtctttaaggaaaattaattttacttttttttttgttctggccgaaatttttatgagatatctctcacttgtcttccactttgaaccggttaaagctcatagctgtcagctctgaatgaggaggggagaagcccctgggtctttctttgaaaggaatccgctgcttgagggctgcctccctcatggtgtgcgtgtcgttctcttcctgacgcatctgtgatatcagaggtaactatgcaaagcatccaggcggttctgaatgtgaagcactacacccagcagagtcccggtgccctctgtccccactgccggcccatgtcctctctccggaggtcaccaaggaatgcacaggtttcgactaccagaaaggggagtccttgggttctttcaaaaaattcgtgaggagagctgtctacagtggaatagggggtctccctggggaatgcaggccaagtccttttattttaacatgatgtccatgaagaggtttgccgtctgggcagccctgtcggcaaggagcgtgcatactgcgtttgtgtaattgtttgctgtatctcccttccctctgagctgtattgttctttaatggctgtcttgcccttccaaaaaaaattgaaaaaaaaaaaa

SEQ ID NO: 289 - protein, 602 aa, Homo sapien
MPSAKQRGSKGGHGAASPSEKGAHPSGGADDVAKKPPPAPQQPPPPPAPHPQQHPQQHPQNQAHGKGGHRGGGGGGGKSSSSSSASAAAAAAAASSSASCSRRLGRALNFLFYLALVAAAAFSGWCVHHVLEEVQQVRRSHQDFSRQREELGQGLQGVEQKVQSLQATFGTFESILRSSQHKQDLTEKAVKQGESEVSRISEVLQKLQNEILKDLSDGIHVVKDARERDFTSLENTVEERLTELTKSINDNIAIFTEVQKRSQKEINDMKAKVASLEESEGNKQDLKALKEAVKEIQTSAKSREWDMEALRSTLQTMESDIYTEVRELVSLKQEQQAFKEAADTERLALQALTEKLLRSEESVSRLPEEIRRLEEELRQLKSDSHGPKEDGGFRHSEAFEALQQKSQGLDSRLQHVEDGVLSMQVASARQTESLESLLSKSQEHEQRLAALQGRLEGLGSSEADQDGLASTVRSLGETQLVLYGDVEELKRSVGELPSTVESLQKVQEQVHTLLSQDQAQAARLPPQDFLDRLSSLDNLKASVSQVEADLKMLRTAVDSLVAYSVKIETNENNLESAKGLLDDLRNDLDRLFVKVEKIHEKV

SEQ ID NO: 290 - DNA, 1060 bp, Homo sapien
cccacgcgtccgattcacgaaaaggtctaaatgaattgcgtgtgcagggcgcggatttaaagtccaatttctcatgaccaaaaaatgtgtggttttttcccatgtgtcccctaccccccaatttcttgtcccctcttaaagagcagttgtcaccacctgaacaccaaggcattgtattttcatgcccagttaacttatttacaatatttaagttctctgcttctgcatttggttggtttcctgaagcgcagcccctgtgaataacaggtggcttttcatggatgtctctagtcagagaaaaatgataaaggcttaaattgaggattaacagaagcagattaacctcagaaatcctgtctggctggcagatttcaagtaaaaaaaaaaaaaaggtgggttggggggacccttttctttctagttgtctttaaggaaaattaattttacttttttttttgttctggccgaaatttttatgagatatctctcacttgtcttccactttgaaccggttaaagctcatagctgtcagctctgaatgaggaggggagaagcccctgggtctttctttgaaaggaatccgctgcttgagggctgcctccctcatggtgtgcgtgtcgtttctcttcctgacgcatcttgtgatatcagaggtaactatgcaaagcatccaggcggttctgaatgtgaagcactacacccagcagagtcccggtgccctctgtccccactgccggcccatgttctctctccggaggtcaccaaggaatgcacaggtttcgactaccagaaaggggagtccttgggttctttcaaaaaattcgtgaggagagctgtctacagtggaatagggggtctccctggggaatgcaggccaagtccttttattttaacatgatgtccatgaagaggtttgccgtctgggcagccctgtcggcaaggagcgtgcatactgcgtttgtgtaattgtttgctgtatctcccttccctctgagctgtattgttctttaatggctgtcttgcccttccaaaaaaaattgaaaaaaaaaaaaaaaaaaaa

SEQ ID NO: 291 - DNA, 3344 bp, Homo sapien
ggtacagctgcgcgtctgcgggaataggtgcagcgggcccttggcgggggactctgagggaggagctggggacggcgaccctaggagagttctttggggtgactttcaagatggactctactctaacagcaagtgaaatccggcagcgatttatagatttcttcaagaggaacgagcatacgtatgttcactcgtctgccaccatcccattggatgaccccactttgctctttgccaatgcaggcatgaaccagtttaaacccattttcctgaacacaattgacccatctcaccccatggcaaagctgagcagagctgccaatacccagaagtgcatccgggctgggggcaaacaaaatgacctggacgatgtgggcaaggatgtctatcatcacaccttcttcgagatgctgggctcttggtcttttggagattactttaaggaattggcatgtaagatggctctggaactcctcacccaagagtttggcattcccattgaaagactttatgttacttactttggcggggatgaagcagctggcttagaagcagatctggaatgcaaacagatctggcaaaatttggggctggatgacaccaaaatcctcccaggcaacatgaaggataacttctgggagatgggtgacacgggcccctgtggtccttgcagtgagatccactacgaccggattggtggtcgggacgccgcacatcttgtcaaccaggacgaccctaatgtgctggagatctggaaccttgtgttcatccagtataacagggaagctgatggcattctgaaacctcttcccaagaaaagcattgacacagggatgggcctggaacgactggtatctgtgctgcagaataagatgtccaactatgacactgacctttttgtcccttactttgaagccattcagaagggcacaggtgcccgaccatacactgggaaagttggtgctgaggatgccgatgggattgacatggcctaccgggtgctggctgaccatgctcggaccatcactgtggcactggctgatggtggccggcctgacaacacagggcgtggatatgtgttgagacggattctccgccgagctgtccgatacgcccatgaaaagctcaatgccagcaggggcttctttgctacgttagtggatgttgtcgtccagtccctgggagatgcatttcctgagctgaagaaggacccagacatggtgaaggacatcattaatgaagaagaggtgcagtttctcaagactctcagcagagggcgtcgcatcctggacaggaaaattcagagcctgggagacagcaagaccattcccggagacactgcttggctcctctatgacacctatgggtttccagtggatctgactggactgattgctgaagagaagggcctggtggtagacatggatggctttgaagaggagaggaaactggcccagctgaaatcacagggcaagggagctggtggggaagacctcattatgctggacatttacgctatcgaagagctccgggcacggggtctggaggtcacagatgattccccaaagtacaattaccatttggactccagtggtagctatgtatttgagaacacagtggctacggtgatggctctgcgcagggagaagatgttcgtggaagaggtgtccacaggccaggagtgtggagtggtgctggacaagacctgtttctatgctgagcaaggaggccagatctatgacgaaggctacctggtgaaggtggatgacagcagtgaagataaaacagagtttacagtgaagaatgctcaggtccgaggagggtatgtgctacacattggaaccatctacggtgacctgaaagtgggggatcaggtctggctgtttattgatgagccccgacgaagacccatcatgagcaaccacacagctacgcacattctgaacttcgccctgcgctcagtgcttggggaagctgaccagaaaggctcattggttgctcctgaccgcctcagatttgactttactgccaagggagccatgtccacccaacagatcaagaaggctgaagagattgctaatgagatgattgaggcagccaaggccgtctatacccaggattgccccctggcagcagcgaaagccatccagggcctacgggctgtgtttgatgagacctatcctgaccctgtgcgagtcgtctccattggggtcccggtgtccgagttgctggatgacccctctgggcctgctggctccctgacttctgttgagttctgtgggggaacgcacctgcggaactcgagtcatgcaggagcttttgtgatcgtgacggaagaagccattgccaagggtatccggaggattgtggctgtcacaggtgccgaggcccagaaggccctcaggaaagcagagagcttgaagaaatgtctctctgtcatggaagccaaagtgaaggctcagactgctccaaacaaggatgtgcagagggagatcgctgaccttggagaggccctggccactgcagtcatcccccagtggcagaaggatgaattgcgggagactctcaaatccctaaagaaggtcatggatgacttggaccgagccagcaaagccgatgtccagaaacgagtgttagagaagacgaagcagttcatcgacagcaaccccaaccagcctcttgtcatcctggagatggagagcggcgcctcagccaaggccctgaatgaagccttgaagctcttcaagatgcactcccctcagacttctgccatgctcttcacggtggacaatgaggctggcaagatcacgtgcctgtgtcaagtcccccagaatgcagccaatcggggcttaaaagccagcgagtgggtgcagcaggtgtcaggcttgatggacggtaaaggtggtggcaaggatgtgtctgcacaggccacaggcaagaacgttggctgcctgcaggaggcgctgcagctggccacttccttcgcccagctgcgcctcggggatgtaaagaactgagtggggaaggaggaggctcccactggatccatccgtccagccaagagctcttcatctgctacaagaacatttgaatcttgggacctttaaagagcccctcctaacccagcagtaactggaacacacttgggagcagtcctatgtctcagtgccccttaaatttctgccctgagccctccacgtcagtgccatcggtctagaaccactaaccccgcattgctgttgatcgtcacgctcgcatctatagataacggctctccagacctgagctttccgcgtcagcaagtaggaatcgtttttgctgcagagaataaaaggaccacgtgc

SEQ ID NO: 292 - protein, 968 aa, Homo sapien
MDSTLTASEIRQRFIDFFKRNEHTYVHSSATIPLDDPTLLFANAGMNQFKPIFLNTIDPSHPMAKLSRAANTQKCIRAGGKQNDLDDVGKDVYHHTFFEMLGSWSFGDYFKELACKMALELLTQEFGIPIERLYVTYFGGDEAAGLEADLECKQIWQNLGLDDTKILPGNMKDNFWEMGDTGPCGPCSEIHYDRIGGRDAAHLVNQDDPNVLEIWNLVFIQYNREADGILKPLPKKSIDTGMGLERLVSVLQNKMSNYDTDLFVPYFEAIQKGTGARPYTGKVGAEDADGIDMAYRVLADHARTITVALADGGRPDNTGRGYVLRRILRRAVRYAHEKLNASRGFFATLVDVVVQSLGDAFPELKKDPDMVKDIINEEEVQFLKTLSRGRRILDRKIQSLGDSKTIPGDTAWLLYDTYGFPVDLTGLIAEEKGLVVDMDGFEEERKLAQLKSQGKGAGGEDLIMLDIYAIEELRARGLEVTDDSPKYNYHLDSSGSYVFENTVATVMALRREKMFVEEVSTGQECGVVLDKTCFYAEQGGQIYDEGYLVKVDDSSEDKTEFTVKNAQVRGGYVLHIGTIYGDLKVGDQVWLFIDEPRRRPIMSNHTATHILNFALRSVLGEADQKGSLVAPDRLRFDFTAKGAMSTQQIKKAEEIANEMIEAAKAVYTQDCPLAAAKAIQGLRAVFDETYPDPVRVVSIGVPVSELLDDPSGPAGSLTSVEFCGGTHLRNSSHAGAFVIVTEEAIAKGIRRIVAVTGAEAQKALRKAESLKKCLSVMEAKVKAQTAPNKDVQREIADLGEALATAVIPQWQKDELRETLKSLKKVMDDLDRASKADVQKRVLEKTKQFIDSNPNQPLVILEMESGASAKALNEALKLFKMHSPQTSAMLFTVDNEAGKITCLCQVPQNAANRGLKASEWVQQVSGLMDGKGGGKDVSAQATGKNVGCLQEALQLATSFAQLRLGDVKN

SEQ ID NO: 293 - DNA, 2704 bp, Homo sapien
gcttagtgtaaccagcggcgtatattttttaggcgccttttcgaaaacctagtagttaatattcatttgtttaaatcttattttatttttaagctcaaactgcttaagaataccttaattccttaaagtgaaataattttttgcaaaggggtttcctcgatttggagctttttttttcttccaccgtcatttctaactcttaaaaccaactcagttccatcatggtgatgttcaagaagatcaagtcttttgaggtggtctttaacgaccctgaaaaggtgtacggcagtggcgagagggtggctggccgggtgatagtggaggtgtgtgaagttactcgtgtcaaagccgttaggatcctggcttgcggagtggctaaagtgctttggatgcagggatcccagcagtgcaaacagacttcggagtacctgcgctatgaagacacgcttcttctggaagaccagccaacaggtgagaatgagatggtgatcatgagacctggaaacaaatatgagtacaagttcggctttgagcttcctcaggggcctctgggaacatccttcaaaggaaaatatgggtgtgtagactactgggtgaaggcttttcttgaccgcccgagccagccaactcaagagacaaagaaaaactttgaagtagtggatctggtggatgtcaatacccctgatttaatggcacctgtgtctgctaaaaaagaaaagaaagtttcctgcatgttcattcctgatgggcgggtgtctgtctctgctcgaattgacagaaaaggattctgtgaaggtgatgagatttccatccatgctgactttgagaatacatgttcccgaattgtggtccccaaagctgccattgtggcccgccacacttaccttgccaatggccagaccaaggtgctgactcagaagttgtcatcagtcagaggcaatcatattatctcagggacatgcgcatcatggcgtggcaagagccttcgggttcagaagatcaggccttctatcctgggctgcaacatccttcgagttgaatattccttactgatctatgttagcgttcctggatccaagaaggtcatccttgacctgcccctggtaattggcagcagatcaggtctaagcagcagaacatccagcatggccagccgaaccagctctgagatgagttgggtagatctgaacatccctgataccccagaagctcctccctgctatatggatgtcattcctgaagatcaccgattggagagcccaacaactcctctgctagatgacatggatggctctcaagacagccctatctttatgtatgcccctgagttcaagttcatgccaccaccgacttatactgaggtggatccctgcatcctcaacaacaatgtgcagtgagcatgtggaagaaaagaagcagctttacctacttgtttctttttgtctctcttcctggacactcactttttcagagactcaacagtctcgtcaatggagtgtgggtccaccttagcctctgacttcctaatgtaggaggtggtcagcaggcaatctcctgggccttaaaggatgcggactcatcctcagccagcgcccatgttgtgatacaggggtgtttgttggatgggtttaaaaataactagaaaaactcaggcccatccattttctcagatctccttgaaaattgaggccttttcgatagtttcgggtcaggtaaaaatggcctcctggcgtaagcttttcaaggttttttggaggctttttgtaaattgtgataggaactttggaccttgaacttacgtatcatgtggagaagagccaatttaacaaactaggaagatgaaaagggaaattgtggccaaaactttgggaaaaggaggttcttaaaatcagtgtttcccctttgtgcacttgtagaaaaaaaagaaaaaccttctagagctgatttgatggacaatggagagagctttccctgtgattataaaaaaggaagctagctgctctacggtcatctttgcttagagtatactttaacctggcttttaaagcagtagtaactgccccaccaaaggtcttaaaagccatttttggagcctattgcactgtgttctcctactgcaaatattttcatatgggaggatggttttctcttcatgtaagtccttggaattgattctaaggtgatgttcttagcactttaattcctgtcaaattttttgttctccccttctgccatcttaaatgtaagctgaaactggtctactgtgtctctagggttaagccaaaagacaaaaaaaattttactacttttgagattgccccaatgtacagaattatataattctaacgcttaaatcatgtgaaagggttgctgctgtcagccttgcccactgtgacttcaaacccaaggaggaactcttgatcaagatgcccaaccctgtgatcagaacctccaaatactgccatgagaaactagagggcaggtgttcataaaagccctttgaacccccttcctgccctgtgttaggagatagggatattggcccctcactgcagctgccagcacttggtcagtcactctcagccatagcactttgttcactgtcctgtgtcagagcactgagctccacccttttctgagagttattacagccagaaagtgtgggctgaagatggttggtttcatgtgggggtattatgtaccc

SEQ ID NO: 294 - protein, 391 aa, Homo sapien
MVMFKKIKSFEVVFNDPEKVYGSGERVAGRVIVEVCEVTRVKAVRILACGVAKVLWMQGSQQCKQTSEYLRYEDTLLLEDQPTGENEMVIMRPGNKYEYKFGFELPQGPLGTSFKGKYGCVDYWVKAFLDRPSQPTQETKKNFEVVDLVDVNTPDLMAPVSAKKEKKVSCMFIPDGRVSVSARIDRKGFCEGDEISIHADFENTCSRIVVPKAAIVARHTYLANGQTKVLTQKLSSVRGNHIISGTCASWRGKSLRVQKIRPSILGCNILRVEYSLLIYVSVPGSKKVILDLPLVIGSRSGLSSRTSSMASRTSSEMSWVDLNIPDTPEAPPCYMDVIPEDHRLESPTTPLLDDMDGSQDSPIFMYAPEFKFMPPPTYTEVDPCILNNNVQ

SEQ ID NO: 295 - DNA, 2704 bp, Homo sapien; identical to SEQ ID NO: 293

SEQ ID NO: 296 - protein, 391 aa, Homo sapien; identical to SEQ ID NO: 294

SEQ ID NO: 297 - DNA, 2704 bp, Homo sapien; identical to SEQ ID NO: 293

SEQ ID NO: 298 - protein, 391 aa, Homo sapien; identical to SEQ ID NO: 294

SEQ ID NO: 299 - DNA, 1399 bp, Homo sapien
agtgtgaaatcttcagagaagaatttctctttagttctttgcaagaaggtagagataaagacactttttcaaaaatggcaatggtatcagaattcctcaagcaggcctggtttattgaaaatgaagagcaggaatatgttcaaactgtgaagtcatccaaaggtggtcccggatcagcggtgagcccctatcctaccttcaatccatcctcggatgtcgctgccttgcataaggccataatggttaaaggtgtggatgaagcaaccatcattgacattctaactaagcgaaacaatgcacagcgtcaacagatcaaagcagcatatctccaggaaacaggaaagcccctggatgaaacacttaagaaagcccttacaggtcaccttgaggaggttgttttagctctgctaaaaactccagcgcaatttgatgctgatgaacttcgtgctgccatgaagggccttggaactgatgaagatactctaattgagattttggcatcaagaactaacaaagaaatcagagacattaacagggtctacagagaggaactgaagagagatctggccaaagacataacctcagacacatctggagattttcggaacgctttgctttctcttgctaagggtgaccgatctgaggactttggtgtgaatgaagacttggctgattcagatgccagggccttgtatgaagcaggagaaaggagaaaggggacagacgtaaacgtgttcaataccatccttaccaccagaagctatccacaacttcgcagagtgtttcagaaatacaccaagtacagtaagcatgacatgaacaaagttctggacctggagttgaaaggtgacattgagaaatgcctcacagctatcgtgaagtgcgccacaagcaaaccagctttctttgcagagaagcttcatcaagccatgaaaggtgttggaactcgccataaggcattgatcaggattatggtttcccgttctgaaattgacatgaatgatatcaaagcattctatcagaagatgtatggtatctccctttgccaagccatcctggatgaaaccaaaggagattatgagaaaatcctggtggctctttgtggaggaaactaaacattcccttgatggtctcaagctatgatcagaagactttaattatatattttcatcctataagcttaaataggaaagtttcttcaacaggattacagtgtagctacctacatgctgaaaaatatagcctttaaatcatttttatattataactctgtataatagagataagtccattttttaaaaatgttttccccaaaccataaaaccctatacaagttgttctagtaacaatacatgagaaagatgtctatgtagctgaaaataaaatgacgtcacaagac

SEQ ID NO: 300 - protein, 346 aa, Homo sapien
MAMVSEFLKQAWFIENEEQEYVQTVKSSKGGPGSAVSPYPTFNPSSDVAALHKAIMVKGVDEATIIDILTKRNNAQRQQIKAAYLQETGKPLDETLKKALTGHLEEVVLALLKTPAQFDADELRAAMKGLGTDEDTLIEILASRTNKEIRDINRVYREELKRDLAKDITSDTSGDFRNALLSLAKGDRSEDFGVNEDLADSDARALYEAGERRKGTDVNVFNTILTTRSYPQLRRVFQKYTKYSKHDMNKVLDLELKGDIEKCLTAIVKCATSKPAFFAEKLHQAMKGVGTRHKALIRIMVSRSEIDMNDIKAFYQKMYGISLCQAILDETKGDYEKILVALCGGN

SEQ ID NO: 301 - DNA, 3322 bp, Homo sapien
gaaagctgtatttgctgcacgtggaaatctccgttattttccagcacccaacagtagcgtaatgggagtaacggacttaacctcatttctctttcagagcatttagccttcatatgcccttccctgcatgcttcccccaggccgtcaagacttgagttctgcctcgcttcccggcgcggtcgcagccctcagcccacttaggataatggcgacagctgaggtactgaacattggtaaaaaattatatgagggtaaaacaaaagaagtctacgaattgttagacagtccaggaaaagtcctcctgcagtccaaggaccagattacagcaggaaatgcagctagaaaaaaccacctggaaggaaaagctgcaatctcaaataaaatcaccagttgtatttttcagttattacaggaagcaggtattaaaactgccttcaccagaaaatgtggggagacagctttcattgcaccgcagtgtgaaatgattccaattgaatgggtttgcagaagaatagcaactggttcttttctcaaaagaaatcctggtgtcaaggaaggatataagttttacccacctaaagtggagttgtttttcaaggatgatgccaataatgacccacagtggtctgaggaacagctgattgctgcaaaattttgctttgctggacttcttataggccagactgaagtggatatcatgagtcatgctacacaggctatatttgaaatactggagaaatcctggttgccccagaattgtacactggttgatatgaagattgaatttggtgttgatgtaaccaccaaagaaattgttcttgctgatgttattgacaatgattcctggagactctggccatcaggagatcgaagccaacagaaagacaaacagtcttatcgggacctcaaagaagtaactcctgaagggctccaaatggtaaagaaaaactttgagtgggttgcagagagagtagagttgcttttgaaatcagaaagtcagtgcagggttgtagtgttgatgggctctacttctgatcttggtcactgtgaaaaaatcaagaaggcctgtggaaattttggcattccatgtgaacttcgagtaacatctgcgcataaaggaccagatgaaactctgaggattaaagctgagtatgaaggggatggcattcctactgtatttgtggcagtggcaggcagaagtaatggtttgggaccagtgatgtctgggaacactgcatatccagttatcagctgtcctcccctcacaccagactggggagttcaggatgtgtggtcttctcttcgactacccagtggtcttggctgttcaaccgtactttctccagaaggatcagctcaatttgctgctcagatatttgggttaagcaaccatttggtatggagcaaactgcgagcaagcattttgaacacatggatttccttgaagcaggctgacaagaaaatcagagaatgtaatttataagaaagaatgccattgaattttttaggggaaaaactacaaatttctaatttagctgaaggaaaatcaagcaagatgaaaaggtaattttaaattagagaacacaaataaaatgtattagtgaataaatgcttctctagatccatattaataaacatgagcatctaacccctcctttcttaggctagacaccaagatatttcagccagcctttatcattcctcttactttatcctttttccttaagtattggtggtcactactattgagtttcttccttaacactgattaaatgatcttaactccctcagctaaaactggcattactgactcccagctatatttctccagacttgcatttttttttttttttttgagacagggtctcactgtcgcccaggctggagtgcagtggcgtgatctcagttcactgctgctttccctcctgggctcaagcagttctcccacctcagcctctcgactaacagggactataatcttgcagcaccatgccgagctaattttattttttgtagagatgagctctcactatgtcacccaggttcgtctcaaactcctgaaccctagtaattctcctatctcagcctcccaaagtgctagggttacagacatgagccactgtgcctgtctagacttgtactttcaactgtccatttctccctgtctgtcccatgggcactcatgaaaaaacagaatgctcccaactttattcatcttccaagcctgtagctcttggtatactcactgttgcaagtcagaagcttgatttcatcattgatgtttttctcacgtttcacatctcactcatcaccaagtcatgttggtgttaatttctgattaacccttgaatttaccgtcttctcatcctctgtacaaaagcctcaagtgagggtcaaattcaacattatcctgatctagacagcccccattctcaatccacccttttccaagttgattgcccaaggacttctaacaataaactctcttttgcaccacagacttctttgaaaatatacatgctgttgaccctctctgtagaaaaccgcacacataaaacttaccaacagatttcattggttcttgggttctcccgaagcctatccatggtttatagattaagaattgatgaggtagctgggcacagtggctcacacctacgatcacagcacttcgggaggctgaagcaagcagatcacttgaggtcaggagtttgagaccagcctggccaacatggtgaaaccctgtctctactaaaaatacaaaaagtagccagccgtgatgacaggcacctgtaatcccagctactcgggaggctgaggcatgagaattgcttgaacccgggaggcggaggttgcagtgagcctggatcatgccactgcactccaacctgggcagcagagcaagactctgtctcaaaaggggaaaaaaaaaattgctgatgtgacccatgaagggaactcattttcctcgtaattttggactgccacacattggtacctttagttctctgaaggcccacgtttttatcattaagacctatttgttagctagtagagctttatgttcgctgtccatgaaaccttctgtaaccacagtgactacaagtagttctttctctattgaattattaggtccagaatagaagatgtcattgtacactttatttccctcacactgtgttatgctctgatgtgctatgcttagctatctgtcagagattagtaaattataaaactcatgtgtactacttaagtttatatcttatgctagtttataagaacaattaaaaggacttagaagattaaaaaaaaaaaaaaaaaa

SEQ ID NO: 302 - protein, 425 aa, Homo sapien
MATAEVLNIGKKLYEGKTKEVYELLDSPGKVLLQSKDQITAGNAARKNHLEGKAAISNKITSCIFQLLQEAGIKTAFTRKCGETAFIAPQCEMIPIEWVCRRIATGSFLKRNPGVKEGYKFYPPKVELFFKDDANNDPQWSEEQLIAAKFCFAGLLIGQTEVDIMSHATQAIFEILEKSWLPQNCTLVDMKIEFGVDVTTKEIVLADVIDNDSWRLWPSGDRSQQKDKQSYRDLKEVTPEGLQMVKKNFEWVAERVELLLKSESQCRVVVLMGSTSDLGHCEKIKKACGNFGIPCELRVTSAHKGPDETLRIKAEYEGDGIPTVFVAVAGRSNGLGPVMSGNTAYPVISCPPLTPDWGVQDVWSSLRLPSGLGCSTVLSPEGSAQFAAQIFGLSNHLVWSKLRASILNTWISLKQADKKIRECNL

SEQ ID NO: 303 - DNA, 3322 bp, Homo sapien; identical to SEQ ID NO: 301

SEQ ID NO: 304 - protein, 425 aa, Homo sapien; identical to SEQ ID NO: 302

SEQ ID NO: 305 - DNA, 1767 bp, Homo sapien
  Unsure 26: Unknown base
  Unsure 68: Unknown base
  Unsure 80: Unknown base
  Unsure 107: Unknown base
  Unsure 1762: Unknown base
aagaaaaaaataggcctggttgccanattaaggtcccctgggctattttaaaccggatttggataccnaggtctttccanaggccgtattttgccccccgtaacccntaaaaaaaaaaaaagatttccaaaatgccgttttcagaacctgggttttaatagcagtattgaatttgtaagcttagtagttgcagaaattgaacactaggtggcactcagttatcttaacaggggaagtactgatacaattgttgacttttcttttactatgtgtaagaaataccccaaacatgaaaagattgttttgatcatatgcatgtatgtagaatatttttgcagagcagaaagattatgttagaagtgtgatttttattttcagaagtcatatacatgtaagctacaattttgagtgctttataaacacttaagatatatatataaattttaatttcatagcaacttgtaaaaaataaaatacttgttgaaaagcctttttcaacatatccctaagctaagggaagaggaaggaataacaactcagtgaaaagatggtctccagtttctgaatgaaaaagctacagctgagaaataaaataaaatgtcatgctgcagaatatgttatacccttattttgtgttaaggatatattttattatgtgaatggttttgtttttgttttttgtttttgttttttgcttgtattgggaattagctttactggtaacttccttatttagtttttagtggtcaactctaataaaatgaaactagggctgagctagttagccctcactagccaaactgaaactctatgcaacattaaaagaagagatccatcatgtagcttgtgacacttttattttattagtcaccggggaacttttcagtgatgaaaatacacagggtaataaaccttcacatggcttcaaaaggaaaacaagcaaatcttctctaatctactcttactataatttcctaagtgtacaccaaactctggatttaaaaatctgaagtactatagaacattaagttgaagaatggaaattaagagtacgtattcatggtttatatttcttattctatggagttcgtgaacacatctaggtggaatgcatctgagactaagggctggtttttaatcctcataagaaaccagccttgaagaattaacaattctcttcattggtattctaaacctcctaagatatttaggcttctgtacataaaagtgtttttgctaaatttacagtatatatagatcctttcatattattttactaagaatgtttgaactttgcatatttgatatagttcctggtaggaatagcacagctcaaacattagtttttctacttacctcctctaacacgtggtttgtctggagagtttctaaaaattcagctataaccccagttcatgtatttactggtgattgttcttgctgaggtagtaacagcccaatcttgggctgttaaatcctaggaaatctcgaatcatagtgattaaaatagttggggtaaagttgtagcttatatgcaatactacttggaggaattcttctactaatttgtatttaatgtggaaattgtatagtttcattgatttaatcataaataatggaaatggtctccaagaagttttatttttcatttttttgcttatacactctgattcctataatacagtgctataagctatgcacagaaaataaaatgtttgaaatccaaaaaaaaaaaaaaaaaaaaaaaaaaaaaaaaaaaaanggggg

SEQ ID NO: 306 - protein, 27 aa, Homo sapien
MVLFLFFVFVFCLYWELALLVTSLFSF

SEQ ID NO: 307 - DNA, 4170 bp, Homo sapien
cgcgggtctgtggagagccgggtgcgagcggcggcagcacgaggggaaaagagctgagcggagaccaaagtcagccgggagacagtgggtctgtgagagaccgaatagaggggctggggccacgagcgccattgacaagcaatggggaagaaacagaaaaacaagagcgaagacagcaccaaggatgacattgatcttgatgccttggctgcagaaatagaaggagctggtgctgccaaagaacaggagcctcaaaagtcaaaagggaaaaagaaaaaagagaaaaaaaagcaggactttgatgaagatgatatcctgaaagaactggaagaattgtctttggaagctcaaggcatcaaagctgacagagaaactgttgcagtgaagccaacagaaaacaatgaagaggaattcacctcaaaagataaaaaaaagaaaggacagaagggcaaaaaacagagttttgatgataatgatagcgaagaattggaagataaagattcaaaatcaaaaaagactgcaaaaccgaaagtggaaatgtactctgggagtgatgatgatgatgattttaacaaacttcctaaaaaagctaaagggaaagctcaaaaatcaaataagaagtgggatgggtcagaggaggatgaggataacagtaaaaaaattaaagagcgttcaagaataaattcttctggtgaaagtggtgatgaatcagatgaatttttgcaatctagaaaaggacagaaaaaaaatcagaaaaacaagccaggtcctaacatagaaagtgggaatgaagatgatgacgcctccttcaaaattaagacagtggcccaaaagaaggcagaaaagaaggagcgcgagagaaaaaagcgagatgaagaaaaagcgaaactgcggaagctgaaagaaaaagaagagttagaaacaggtaaaaaggatcagagtaaacaaaaggaatctcaaaggaaatttgaagaagaaactgtaaaatccaaagtgactgttgatactggagtaattcctgcctctgaagagaaagcagagactcccacagctgcagaagatgacaatgaaggagacaaaaagaagaaagataagaagaaaaagaaaggagaaaaggaagaaaaagagaaagagaagaaaaaaggacctagcaaagccactgttaaagctatgcaagaagctctggctaagcttaaagaggaagaagaaagacagaagagagaagaggaagaacgtataaaacggcttgaagaattagaagccaagcgtaaagaagaggaacgattggaacaagaaaaaagagaaaggaaaaagcaaaaagaaaaagaaagaaaagaacgcttgaaaaaagaagggaaacttttaactaaatcccagagagaagccagagccagagccgaagctactcttaaactgctacaagctcagggtgttgaagtgccatcaaaagactctttgccaaagaagaggccaatttatgaagataaaaagaggaaaaaaataccacagcagctagaaagtaaagaagtgtctgaatcaatggaattatgtgctgctgtagaagttatggaacaaggagtaccagaaaaggaagagacaccacctcctgttgaaccagaagaagaagaagatactgaggatgctggattggatgattgggaagctatggccagtgatgaggagacagaaaaagtagaaggaaacacagttcatatagaagtaaaagaaaaccctgaagaggaggaggaggaggaagaagaggaagaagaagatgaagaaagtgaagaagaggaggaagaggagggagaaagtgaaggcagtgaaggtgatgaggaagatgaaaaggtgtcagatgagaaggattcagggaagacattagataaaaagccaagtaaagaaatgagctcagattctgaatatgactctgatgatgatcggactaaagaagaaagggcttatgacaaagcaaaacggaggattgagaaacggcgacttgaacatagtaaaaatgtaaacaccgaaaagctaagagcccctattatctgcgtacttgggcatgtggacacagggaagacaaaaattctagataagctccgtcacacacatgtacaagacggtgaagcaggtggtatcacacaacaaatttgggccaccaatgttcctcttgaagctattaatgaacagactaagatgattaaaaattttgatagagagaatgtacggattccaggaatgctaattattgatactcctgggcatgaatctttcagtaatctgagaaatagaggaagctctctttgtgacattgccattttagttgttgatattatgcatggtttggagccccagacaattgagtctatcaaccttctcaaatctaaaaaatgtcccttcattgttgcactcaataagattgataggttatatgattggaaaaagagtcctgactctgatgtggctgctactttaaagaagcagaaaaagaatacaaaagatgaatttgaggagcgagcaaaggctattattgtagaatttgcacagcagggtttgaatgctgctttgttttatgagaataaagatccccgcacttttgtgtctttggtacctacctctgcacatactggtgatggcatgggaagtctgatctaccttcttgtagagttaactcagaccatgttgagcaagagacttgcacactgtgaagagctgagagcacaggtgatggaggttaaagctctcccggggatgggcaccactatagatgtcattttgatcaatgggcgtttgaaggaaggagatacaatcattgttcctggagtagaagggcccattgtaactcagattcgaggcctcctgttacctcctcctatgaaggaattacgagtgaagaaccagtatgaaaagcataaagaagtagaagcagctcagggggtaaagattcttggaaaagacctggagaaaacattggctggtttacccctccttgtggcttataaagaagatgaaatccctgttcttaaagatgaattgatccatgagttaaagcagacactaaatgctatcaaattagaagaaaaaggagtctatgtccaggcatctacactgggttctttggaagctctactggaatttctgaaaacatcagaagtgccctatgcaggaattaacattggcccagtgcataaaaaagatgttatgaaggcttcagtgatgttggaacatgaccctcagtatgcagtaattttggccttcgatgtgagaattgaacgagatgcacaagaaatggctgatagtttaggagttagaatttttagtgcagaaattatttatcatttatttgatgcctttacaaaatatagacaagactacaagaaacagaaacaagaagaatttaagcacatagcagtatttccctgcaagataaaaatcctccctcagtacatttttaattctcgagatccgatagtgatgggggtgacggtggaagcaggtcaggtgaaacaggggacacccatgtgtgtcccaagcaaaaattttgttgacatcggaatagtaacaagtattgaaataaaccataaacaagtggatgttgcaaaaaaaggacaagaagtttgtgtaaaaatagaacctatccctggtgagtcacccaaaatgtttggaagacattttgaagctacagatattcttgttagtaagatcagccggcagtccattgatgcactcaaagactggttcagagatgaaatgcagaagagtgactggcagcttattgtggagctgaagaaagtatttgaaatcatctaattttttcacatggagcaggaactggagtaaatgcaatactgtgttgtaatatcccaacaaaaatcagacaaaaaatggaacagacgtatttggacactgatggacttaagtatggaaggaagaaaaataggtgtataaaatgttttccatgagaaaccaagaaacttacactggtttgacagtggtcagttacatgtccccacagttccaatgtgcctgttcactcacctctcccttccccaacccttctctacttggctgctgttttaaagtttgcccttccccaaatttggatttttattacagagtctaaagctctttcgattttatactgattaaatcagtactgcagtatttgattaacca

SEQ ID NO: 308 - protein, 1220 aa, Homo sapien
MGKKQKNKSEDSTKDDIDLDALAAEIEGAGAAKEQEPQKSKGKKKKEKKKQDFDEDDILKELEELSLEAQGIKADRETVAVKPTENNEEEFTSKDKKKKGQKGKKQSFDDNDSEELEDKDSKSKKTAKPKVEMYSGSDDDDDFNKLPKKAKGKAQKSNKKWDGSEEDEDNSKKIKERSRINSSGESGDESDEFLQSRKGQKKNQKNKPGPNIESGNEDDDASFKIKTVAQKKAEKKERERKKRDEEKAKLRKLKEKEELETGKKDQSKQKESQRKFEEETVKSKVTVDTGVIPASEEKAETPTAAEDDNEGDKKKKDKKKKKGEKEEKEKEKKKGPSKATVKAMQEALAKLKEEEERQKREEEERIKRLEELEAKRKEEERLEQEKRERKKQKEKERKERLKKEGKLLTKSQREARARAEATLKLLQAQGVEVPSKDSLPKKRPIYEDKKRKKIPQQLESKEVSESMELCAAVEVMEQGVPEKEETPPPVEPEEEEDTEDAGLDDWEAMASDEETEKVEGNTVHIEVKENPEEEEEEEEEEEEDEESEEEEEEEGESEGSEGDEEDEKVSDEKDSGKTLDKKPSKEMSSDSEYDSDDDRTKEERAYDKAKRRIEKRRLEHSKNVNTEKLRAPIICVLGHVDTGKTKILDKLRHTHVQDGEAGGITQQIWATNVPLEAINEQTKMIKNFDRENVRIPGMLIIDTPGHESFSNLRNRGSSLCDIAILVVDIMHGLEPQTIESINLLKSKKCPFIVALNKIDRLYDWKKSPDSDVAATLKKQKKNTKDEFEERAKAIIVEFAQQGLNAALFYENKDPRTFVSLVPTSAHTGDGMGSLIYLLVELTQTMLSKRLAHCEELRAQVMEVKALPGMGTTIDVILINGRLKEGDTIIVPGVEGPIVTQIRGLLLPPPMKELRVKNQYEKHKEVEAAQGVKILGKDLEKTLAGLPLLVAYKEDEIPVLKDELIHELKQTLNAIKLEEKGVYVQASTLGSLEALLEFLKTSEVPYAGINIGPVHKKDVMKASVMLEHDPQYAVILAFDVRIERDAQEMADSLGVRIFSAEIIYHLFDAFTKYRQDYKKQKQEEFKHIAVFPCKIKILPQYIFNSRDPIVMGVTVEAGQVKQGTPMCVPSKNFVDIGIVTSIEINHKQVDVAKKGQEVCVKIEPIPGESPKMFGRHFEATDILVSKISRQSIDALKDWFRDEMQKSDWQLIVELKKVFEII

SEQ ID NO: 309 - DNA, 4170 bp, Homo sapien; identical to SEQ ID NO: 307

SEQ ID NO: 310 - protein, 1220 aa, Homo sapien; identical to SEQ ID NO: 308

SEQ ID NO: 311 - DNA, 2591 bp, Homo sapien
cccggacgtgcggctcccctcggcctcctcgccatggacgcggacgactcccgggcccccaagggctccttgcggaagttcctggagcacctctccggggccggcaaggccatcggcgtgctgaccagcggcggggatgctcaaggtatgaacgctgccgtccgtgccgtggtgcgcatgggtatctacgtgggggccaaggtgtacttcatctacgagggctaccagggcatggtggacggaggctcaaacatcgcagaggccgactgggagagtgtctccagcatcctgcaagtgggcgggacgatcattggcagtgcgcggtgccaggccttccgcacgcgggaaggccgcctgaaggctgcttgcaacctgctgcagcgcggcatcaccaacctgtgtgtgatcggcggggacgggagcctcaccggggccaacctcttccggaaggagtggagtgggctgctggaggagctggccaggaacggccagatcgataaggaggccgtgcagaagtacgcctacctcaacgtggtgggcatggtgggctccatcgacaatgatttctgcggcaccgacatgaccatcggcacggactccgccctgcacaggatcatcgaggtcgtcgacgccatcatgaccacggcccagagccaccagaggaccttcgttctggaggtgatgggacgacactgtgggtacctggccctggtgagtgccttggcctgcggtgcggactgggtgttccttccagaatctccaccagaggaaggctgggaggagcagatgtgtgtcaaactctcggagaaccgtgcccggaaaaaaaggctgaatattattattgtggctgaaggagcaattgatacccaaaataaacccatcacctctgagaaaatcaaagagcttgtcgtcacgcagctgggctatgacacacgtgtgaccatcctcgggcacgtgcagagaggagggaccccttcggcattcgacaggatcttggccagccgcatgggagtggaggcagtcatcgccttgctagaggccaccccggacaccccagcttgcgtcgtgtcactgaacgggaaccacgccgtgcgcctgccgctgatggagtgcgtgcagatgactcaggatgtgcagaaggcgatggacgagaggagatttcaagatgcggttcgactccgagggaggagctttgcgggcaacctgaacacctacaagcgacttgccatcaagctgccggatgatcagatcccaaagaccaattgcaacgtagctgtcatcaacgtgggggcacccgcggctgggatgaacgcggccgtacgctcagctgtgcgcgtgggcattgccgacggccacaggatgctcgccatctatgatggctttgacggcttcgccaagggccagatcaaagaaatcggctggacagatgtcgggggctggaccggccaaggaggctccattcttgggacaaaacgcgttctcccggggaagtacttggaagagatcgccacacagatgcgcacgcacagcatcaacgcgctgctgatcatcggtggattcgaggcctacctgggactcctggagctgtcagccgcccgggagaagcacgaggagttctgtgtccccatggtcatggttcccgctactgtgtccaacaatgtgccgggttccgatttcagcatcggggcagacaccgccctgaacactatcaccgacacctgcgaccgcatcaagcagtccgccagcggaaccaagcggcgcgtgttcatcatcgagaccatgggcggctactgtggctacctggccaacatgggggggctcgcggccggagctgatgccgcatacattttcgaagagcccttcgacatcagggatctgcagtccaacgtggagcacctgacggagaaaatgaagaccaccatccagagaggccttgtgctcagaaatgagagctgcagtgaaaactacaccaccgacttcatttaccagctgtattcagaagagggcaaaggcgtgtttgactgcaggaagaacgtgctgggtcacatgcagcagggtggggcaccctctccatttgatagaaactttggaaccaaaatctctgccagagctatggagtggatcactgcaaaactcaaggaggcccggggcagaggaaaaaaatttaccaccgatgattccatttgtgtgctgggaataagcaaaagaaacgttatttttcaacctgtggcagagctgaagaagcaaacggattttgagcacaggattcccaaagaacagtggtggctcaagctacggcccctcatgaaaatcctggccaagtacaaggccagctatgacgtgtcggactcaggccagctggaacatgtgcagccctggagtgtctgacccagtcccgcctgcatgtgcctgcagccaccgtggactgtctgtttttgtaacacttaagttattttatcagcactttatgcacgtattattgacattaatacctaatcggcgagtgcccatctgccccaccagctccagtgcgtgctgtctgtggagtgtgtctcatgctttcagatgtgcatatgagcagaattaattaa

SEQ ID NO: 312 - protein, 784 aa, Homo sapien
MDADDSRAPKGSLRKFLEHLSGAGKAIGVLTSGGDAQGMNAAVRAVVRMGIYVGAKVYFIYEGYQGMVDGGSNIAEADWESVSSILQVGGTIIGSARCQAFRTREGRLKAACNLLQRGITNLCVIGGDGSLTGANLFRKEWSGLLEELARNGQIDKEAVQKYAYLNVVGMVGSIDNDFCGTDMTIGTDSALHRIIEVVDAIMTTAQSHQRTFVLEVMGRHCGYLALVSALACGADWVFLPESPPEEGWEEQMCVKLSENRARKKRLNIIIVAEGAIDTQNKPITSEKIKELVVTQLGYDTRVTILGHVQRGGTPSAFDRILASRMGVEAVIALLEATPDTPACVVSLNGNHAVRLPLMECVQMTQDVQKAMDERRFQDAVRLRGRSFAGNLNTYKRLAIKLPDDQIPKTNCNVAVINVGAPAAGMNAAVRSAVRVGIADGHRMLAIYDGFDGFAKGQIKEIGWTDVGGWTGQGGSILGTKRVLPGKYLEEIATQMRTHSINALLIIGGFEAYLGLLELSAAREKHEEFCVPMVMVPATVSNNVPGSDFSIGADTALNTITDTCDRIKQSASGTKRRVFIIETMGGYCGYLANMGGLAAGADAAYIFEEPFDIRDLQSNVEHLTEKMKTTIQRGLVLRNESCSENYTTDFIYQLYSEEGKGVFDCRKNVLGHMQQGGAPSPFDRNFGTKISARAMEWITAKLKEARGRGKKFTTDDSICVLGISKRNVIFQPVAELKKQTDFEHRIPKEQWWLKLRPLMKILAKYKASYDVSDSGQLEHVQPWSV

SEQ ID NO: 313 - DNA, 2015 bp, Homo sapien
tcgctgcgaaggacatttgggctgtgtgtgcgacgcgggtcggaggggcagtcgggggaaccgcgaagaagccgaggagcccggagccccgcgtgacgctcctctctcagtccaaaagcggcttttggttcggcgcagagagacccgggggtctagcttttcctcgaaaagcgccgccctgcccttggccccgagaacagacaaagagcaccgcagggccgatcacgctgggggcgctgaggccggccatggtcatggaagtgggcaccctggacgctggaggcctgcgggcgctgctgggggagcgagcggcgcaatgcctgctgctggactgccgctccttcttcgctttcaacgccggccacatcgccggctctgtcaacgtgcgcttcagcaccatcgtgcggcgccgggccaagggcgccatgggcctggagcacatcgtgcccaacgccgagctccgcggccgcctgctggccggcgcctaccacgccgtggtgttgctggacgagcgcagcgccgccctggacggcgccaagcgcgacggcaccctggccctggcggccggcgcgctctgccgcgaggcgcgcgccgcgcaagtcttcttcctcaaaggaggatacgaagcgttttcggcttcctgcccggagctgtgcagcaaacagtcgacccccatggggctcagccttcccctgagtactagcgtccctgacagcgcggaatctgggtgcagttcctgcagtaccccactctacgatcagggtggcccggtggaaatcctgccctttctgtacctgggcagtgcgtatcacgcttcccgcaaggacatgctggatgccttgggcataactgccttgatcaacgtctcagccaattgtcccaaccattttgagggtcactaccagtacaagagcatccctgtggaggacaaccacaaggcagacatcagctcctggttcaacgaggccattgacttcatagactccatcaagaatgctggaggaagggtgtttgtccactgccaggcaggcatttcccggtcagccaccatctgccttgcttaccttatgaggactaatcgagtcaagctggacgaggcctttgagtttgtgaagcagaggcgaagcatcatctctcccaacttcagcttcatgggccagctgctgcagtttgagtcccaggtgctggctccgcactgttcggcagaggctgggagccccgccatggctgtgctcgaccgaggcacctccaccaccaccgtgttcaacttccccgtctccatccctgtccactccacgaacagtgcgctgagctaccttcagagccccattacgacctctcccagctgctgaaaggccacgggaggtgaggctcttcacatcccattgggactccatgctccttgagaggagaaatgcaataactctgggaggggctcgagagggctggtccttatttatttaacttcacccgagttcctctgggtttctaagcagttatggtgatgacttagcgtcaagacatttgctgaactcagcacattcgggaccaatatatagtgggtacatcaagtccatctgacaaaatggggcagaagagaaaggactcagtgtgtgatccggtttctttttgctcgcccctgttttttgtagaatctcttcatgcttgacatacctaccagtattattcccgacgacacatatacatatgagaatataccttatttatttttgtgtaggtgtctgccttcacaaatgtcattgtctactcctagaagaaccaaatacctcaatttttgtttttgagtactgtactatcctgtaaatatatcttaagcaggtttgttttcagcactgatggaaaataccagtgttgggtttttttttagttgccaacagttgtatgtttgctgattatttatgacctgaaataatatatttcttcttctaagaagacattttgttacataaggatgacttttttatacaatggaataaattatggcatttctattg

SEQ ID NO: 314 - protein, 367 aa, Homo sapien
MVMEVGTLDAGGLRALLGERAAQCLLLDCRSFFAFNAGHIAGSVNVRFSTIVRRRAKGAMGLEHIVPNAELRGRLLAGAYHAVVLLDERSAALDGAKRDGTLALAAGALCREARAAQVFFLKGGYEAFSASCPELCSKQSTPMGLSLPLSTSVPDSAESGCSSCSTPLYDQGGPVEILPFLYLGSAYHASRKDMLDALGITALINVSANCPNHFEGHYQYKSIPVEDNHKADISSWFNEAIDFIDSIKNAGGRVFVHCQAGISRSATICLAYLMRTNRVKLDEAFEFVKQRRSIISPNFSFMGQLLQFESQVLAPHCSAEAGSPAMAVLDRGTSTTTVFNFPVSIPVHSTNSALSYLQSPITTSPSC

SEQ ID NO: 315 - DNA, 2015 bp, Homo sapien; identical to SEQ ID NO: 313

SEQ ID NO: 316 - protein, 367 aa, Homo sapien; identical to SEQ ID NO: 314

SEQ ID NO: 317 - DNA, 3595 bp, Homo sapien
aaaagttgcggggcatagacgagcgccccgggacgcagctagcgcgaccctgagccggcgcccgtggtccggccatggacgacctcgacgccctgctggcggacttggagtctaccacctcccacatctccaaacggcctgtgttcttgtcggaggagaccccctactcatacccaactggaaaccacacataccaggagattgccgtgccaccccccgtccccccacccccgtccagcgaggccctcaatggcacaatccttgaccccttagaccagtggcagcccagcggctcccgattcatccaccagcagcctcagtcctcatcacctgtgtacggctccagtgccaaaacttccagtgtctccaaccctcaggacagtgttggctctccgtgctcccgagtgggtgaggaggagcacgtctacagcttccccaacaagcagaaatcagctgagccttcacccaccgtaatgagcacgtccctgggcagcaacctttctgaactcgaccgcctgctgctggaactgaacgctgtacagcataacccgccaggcttccctgcagatgaggccaactcaagccccccgcttcctggggccctgagccccctctatggtgtcccagagactaacagccccttgggaggcaaagctgggcccctgacgaaagagaagcctaagcggaatgggggccggggcctggaggacgtgcggcccagtgtggagagtctcttggatgaactggagagctccgtgcccagccccgtccctgccatcactgtgaaccagggcgagatgagcagcccgcagcgcgtcacctccacccaacagcagacacgcatctcggcctcctctgccaccagggagctggacgagctgatggcttcgctgtcggatttcaagttcatggcccaggggaagacagggagcagctcaccccctggggggcccccgaagcccgggagccagctggacagcatgctggggagcctgcagtctgacctgaacaagctgggggtcgccacagtcgccaaaggagtctgcggggcctgcaagaagcccatcgccgggcaggttgtgaccgccatggggaagacgtggcaccccgagcacttcgtctgcacccactgccaggaggagatcggatcccggaacttcttcgagcgggatggacagccctactgtgaaaaggactaccacaacctcttctccccgcgctgctactactgcaacggccccatcctggataaagtggtgacagcccttgaccggacgtggcaccctgaacacttcttctgtgcacagtgtggagccttctttggtcccgaagggttccacgagaaggacggcaaggcctactgtcgcaaggactacttcgacatgttcgcacccaagtgtggcggctgcgcccgggccatcctggagaactatatctcagccctcaacacgctgtggcatcctgagtgctttgtgtgccgggaatgcttcacgccattcgtgaacggcagcttcttcgagcacgacgggcagccctactgtgaggtgcactaccacgagcggcgcggctcgctgtgttctggctgccagaagcccatcaccggccgctgcatcaccgccatggccaagaagttccaccccgagcacttcgtctgtgccttctgcctcaagcagctcaacaagggcaccttcaaggagcagaacgacaagccttactgtcagaactgcttcctcaagctcttctgctaggtgccctgcccctgtctctgccccccttccccagccagcatccccaactgcgactgtgacctagagacttcacccgggggtgaaggggtaaacccgactgaaactggaacccttgtcctccgctggtgcgggatggacagagggccgtgaggggtccccctgcttgtcttcacccctgccagagcctctgggccccctcctccctcctgtagctctccctaggctgcccactctccatcctccccaggggtagaggctgggggctccaccccagcccatgtacgtccccacgaactggcctggccagcaccccacactggagccatctcttcctcatatttcagcagtgcagccggggggcagggaagggcaggcagggtctgttggggtctctttttatccttattcctcccccgacctaattgtctttgttctgtgattattgggggacacccggctccctccagacaatgccagcataaatccatccatccaaaggcagagaaccaaaggggccatggaaggttctctgtgctcctcctacccttccagtgccctaggcctggcgactgcccctgccttttagacccgcactccccttttatacctgctcttgttctactgagaaaagcctctccagcaataatgttttctagtcacttcctccgtctccgggacggcgtgcctggacactgtccgactttgatagatttctacactgaggttgaattcatatcgcctgagatgttttacttctctatacaccatgattttgtagagatattaaagacgttcccttttgtatctcttcttcatcaccgccactgggccttcactgatggtgtctggtgtgtagattgctttgtctgtggggtggggtggggaagcaatatgtattttattgtttcttagcacaagcaggtgtgctgggagcagctctgtgactccccctctttcacttcatagctcccaggactgttttataaactgctgctatttggaaaccccttctttacttcccaggccagcaagccttcactgaaactggttgaagagtgttgcacccttttgggcctagaattctgaactttatctgttctgtttctgtgggaggagaaggggaagtatgttttggggggctgcttcctgtctgagtaagccctcaggagcctcttgctcccctgtgaacccctgaaccttctgagcccccctgcttctatggggctctctcttctgccttctcaggaaagctgtgtctgattttggccatcaggactctgacgtctctttggtcttgttgatttacctctgggcatatcccttccccagatctgctcctcccctttcacaggtgggatcggcactcagggggtctggaaagaaggtcataagggagcatgataggatttggggcagagggacaggctcctctggggaaaccccccagagctctttaccaaggatgaaagaggagccaggccttgggctcctgatgaccagaaaggggccaccggggtctaatggtgacagtccaaaccactccactggcctcctggcagaagccgagtgtgctggggtctccgaagagggtccctcctttttgggggaaggtcagcccagcccctccaaaggtctgatgtctccactttcacccgcaggccttaccgctctgtttatagtgacccaccctagatcttccccaagagggactggggtttctggggtccattctctgagtcagtggttatttgaaaatttgattttgattttattttttctctgtaaacttccaagctggcttttcccatttcaattcctgtgatttatgccaataaagtttgcccatg

SEQ ID NO: 318 - protein, 557 aa, Homo sapien
MDDLDALLADLESTTSHISKRPVFLSEETPYSYPTGNHTYQEIAVPPPVPPPPSSEALNGTILDPLDQWQPSGSRFIHQQPQSSSPVYGSSAKTSSVSNPQDSVGSPCSRVGEEEHVYSFPNKQKSAEPSPTVMSTSLGSNLSELDRLLLELNAVQHNPPGFPADEANSSPPLPGALSPLYGVPETNSPLGGKAGPLTKEKPKRNGGRGLEDVRPSVESLLDELESSVPSPVPAITVNQGEMSSPQRVTSTQQQTRISASSATRELDELMASLSDFKFMAQGKTGSSSPPGGPPKPGSQLDSMLGSLQSDLNKLGVATVAKGVCGACKKPIAGQVVTAMGKTWHPEHFVCTHCQEEIGSRNFFERDGQPYCEKDYHNLFSPRCYYCNGPILDKVVTALDRTWHPEHFFCAQCGAFFGPEGFHEKDGKAYCRKDYFDMFAPKCGGCARAILENYISALNTLWHPECFVCRECFTPFVNGSFFEHDGQPYCEVHYHERRGSLCSGCQKPITGRCITAMAKKFHPEHFVCAFCLKQLNKGTFKEQNDKPYCQNCFLKLFC

SEQ ID NO: 319 - DNA, 1976 bp, Homo sapien
gccacacggtctttgagctgagtcgaggtggaccctttgaacgcagtcgccctacagccgctgattccccccgcatcgcctcccgtggaagcccaggcccgcttcgcagctttctccctttgtctcataaccatgtccaccaacgagaatgctaatacaccagctgcccgtcttcacagattcaagaacaagggaaaagacagtacagaaatgaggcgtcgcagaatagaggtcaatgtggagctgaggaaagctaagaaggatgaccagatgctgaagaggagaaatgtaagctcatttcctgatgatgctacttctccgctgcaggaaaaccgcaacaaccagggcactgtaaattggtctgttgatgacattgtcaaaggcataaatagcagcaatgtggaaaatcagctccaagctactcaagctgccaggaaactactttccagagaaaaacagccccccatagacaacataatccgggctggtttgattccgaaatttgtgtccttcttgggcagaactgattgtagtcccattcagtttgaatctgcttgggcactcactaacattgcttctgggacatcagaacaaaccaaggctgtggtagatggaggtgccatcccagcattcatttctctgttggcatctccccatgctcacatcagtgaacaagctgtctgggctctaggaaacattgcaggtgatggctcagtgttccgagacttggttattaagtacggtgcagttgacccactgttggctctccttgcagttcctgatatgtcatctttagcatgtggctacttacgtaatcttacctggacactttctaatctttgccgcaacaagaatcctgcacccccgatagatgctgttgagcagattcttcctaccttagttcggctcctgcatcatgatgatccagaagtgttagcagatacctgctgggctatttcctaccttactgatggtccaaatgaacgaattggcatggtggtgaaaacaggagttgtgccccaacttgtgaagcttctaggagcttctgaattgccaattgtgactcctgccctaagagccatagggaatattgtcactggtacagatgaacagactcaggttgtgattgatgcaggagcactcgccgtctttcccagcctgctcaccaaccccaaaactaacattcagaaggaagctacgtggacaatgtcaaacatcacagccggccgccaggaccagatacagcaagttgtgaatcatggattagtcccattccttgtcagtgttctctctaaggcagattttaagacacaaaaggaagctgtgtgggccgtgaccaactataccagtggtggaacagttgaacagattgtgtaccttgttcactgtggcataatagaaccgttgatgaacctcttaactgcaaaagataccaagattattctggttatcctggatgccatttcaaatatctttcaggctgctgagaaactaggtgaaactgagaaacttagtataatgattgaagaatgtggaggcttagacaaaattgaagctctacaaaaccatgaaaatgagtctgtgtataaggcttcgttaagcttaattgagaagtatttctctgtagaggaagaggaagatcaaaacgttgtaccagaaactacctctgaaggctacactttccaagttcaggatggggctcctgggacctttaacttttagatcatgtagctgagacataaatttgttgtgtactacgtttggtattttgtcttattgtttctctactaagaactctttcttaaatgtggtttgttactgtagcactttttacactgaaactatacttgaacagttccaactgtacatacatactgtatgaagcttgtcctctgactaggtttctaatttctatgtggaatttcctatcttgcagcatcctgtaaataaacattcaagtccacccttaaaaaaaa

SEQ ID NO: 320 - protein, 529 aa, Homo sapien [sequence omitted]

SEQ ID NO: 321 - DNA, 3054 bp, Homo sapien
gcctcccagcacgctggtcagctcctcttgctcgcaagcaggtctggccccagcggcgcgaagtcacgaggctgggggcggccggcggcgaagggggcggggcgaggccgggcgccgcagcgcgcataggcggagcctcggccgcgggccgccttggtatatctgcgtgcgcgcgtctgctgggccagtcgggacagaggagacaagatggcgctgcgggcgatgcgggggattgtcaacggggccgcacccgagctacccgtgcccaccggtgggccggcggtgggagctcgggagcaggcgctggcagtcagtcggaactacctctcccagcctcgcctcacatacaagacagtatctggagtcaatggtccactagtgatcttagatcatgttaagtttcccaggtatgctgaaattgtccatttgaccttaccggatggcacaaagagaagtgggcaagttctggaagttagtggttccaaggcagtagttcaggtatttgaagggacttcaggtatagatgctaagaaaacgtcctgtgagtttactggggatattctccgaacaccggtgtctgaggatatgcttggtcgggtattcaatggatcgggaaaacccattgacagaggtcctgttgtactggccgaagacttccttgatatcatgggtcagccaatcaaccctcaatgtcgaatctacccagaggaaatgattcagactggcatttcggccatcgatgggatgaacagtattgctagggggcagaaaattcctatcttctctgctgctgggctaccacacaatgagattgcagctcagatctgtcgccaggctggtttggtaaagaaatccaaagatgtagtagactacagtgaggaaaattttgcaattgtatttgctgctatgggtgtaaacatggaaactgcccggttcttcaaatctgactttgaagaaaatggctcaatggacaatgtctgcctctttttgaacttggctaatgacccaaccattgagcgaattatcactcctcgcctggctctaaccacagctgaatttctggcgtaccaatgtgagaaacatgtattggttattctaacagacatgagttcttatgctgaagcacttcgagaggtttcagcagccagggaagaggtacctggtcgacgaggttttccaggttacatgtatacagatttagccacgatatatgaacgcgctgggcgagtggaagggagaaacggctcgattactcaaatccctattctaaccatgcctaatgatgatatcactcaccccatcccagacttgactggctacattacagaggggcagatctatgtggacagacagctgcacaacagacagatttatccacctatcaatgtgctgccctcactatcacggttaatgaagtctgctattggagaagggatgaccaggaaggatcatgccgatgtatctaaccagctatatgcgtgctatgctattggaaaggatgtgcaagccatgaaagctgtcgttggagaagaagcccttacctcagatgatcttctctacttggaatttctgcagaagtttgagaggaacttcattgctcagggtccttacgaaaatcgcactgtctttgagactttggacattggctggcagctactccgaatcttccccaaagaaatgctgaagagaatccctcagagcaccctcagcgaattttaccctcgagactctgcaaagcattagctgctgcttctgcattgctccgcgctcttgtgaaatactggttctgttttctttattccttttgcactctcggttcccacctttgtgttggagtttaccatgttaccctgtaattaaaaacaaagaataggtaacatattgtgccagtgttgcaacgttttaaactgctaacagaccttaaaatatccccctacctgggtcctcagtgctatgtttaaagtgctgcagggatggagtggcgttttcttattgctgtatgtattgtacatagtggagtagttagttacctgataacagtcttgttatttgggtctcttagaccttacctctcaactccctcaagagtaccagtctctgaagttataatgctttggtctctacattaggggcaagatccagtctgagagaagtctcctttgagaagggccaagaggctctttcctgagtgtttgctttcggtttgttggtatgcctgtattgctgggctgtgctgctgctcgaagcagatggttttgactgtctttttgctctttcctatataatgaatagatgagtgaaaggagttttctttttctctttagtacttacgtattgggattcctgtgtcttacagctctccctctccaaataatacacagaatcctgcaactttttgcacagctggtatctgtctggtagcagtgagaccccttgtcttggtgatccttactgggtttccaagcagaggagtcacatgattacaattgccagtagagttgttgtttggggtacaagatgagaagaaagaaaaacctacagcctttctacattctgacatgctaacagtggtttaagtttctaaagtgtttaccagatgctgaaggcaaggggagggagcagaagcacttatgtttacggatattttaaactctgttagagagcagcctttgaaaatccccaatttggttctgctttttgacctctctctaccttttcagggtaatctttgtggcacaaacgatagcatttccaagctttagagttttctgaattcctgcgccttcctgacgtgagccctgagcgatcttctatgcagttctgccatgcgtcctgttggtctctctgtgttctttgttacttgggtgcaatagcaacttccctaccccgtgcattccatctttcatgttgtgtaaagttcttcacttttttctctgagggctgggggttgggggagtcagcatgattatattttaatgtagaaaatgtgacatctggatataaaatgaaaataaatgttaaattaaatggaccttaaaaaaaaaaaaaaaaaaa

SEQ ID NO: 322 - protein, 511 aa, Homo sapien
MALRAMRGIVNGAAPELPVPTGGPAVGAREQALAVSRNYLSQPRLTYKTVSGVNGPLVILDHVKFPRYAEIVHLTLPDGTKRSGQVLEVSGSKAVVQVFEGTSGIDAKKTSCEFTGDILRTPVSEDMLGRVFNGSGKPIDRGPVVLAEDFLDIMGQPINPQCRIYPEEMIQTGISAIDGMNSIARGQKIPIFSAAGLPHNEIAAQICRQAGLVKKSKDVVDYSEENFAIVFAAMGVNMETARFFKSDFEENGSMDNVCLFLNLANDPTIERIITPRLALTTAEFLAYQCEKHVLVILTDMSSYAEALREVSAAREEVPGRRGFPGYMYTDLATIYERAGRVEGRNGSITQIPILTMPNDDITHPIPDLTGYITEGQIYVDRQLHNRQIYPPINVLPSLSRLMKSAIGEGMTRKDHADVSNQLYACYAIGKDVQAMKAVVGEEALTSDDLLYLEFLQKFERNFIAQGPYENRTVFETLDIGWQLLRIFPKEMLKRIPQSTLSEFYPRDSAKH

SEQ ID NO: 323 - DNA, 1596 bp, Homo sapien
tgtcggggacggtaaccgggacccgtgctctgctcctgtcgccttcgcctcctgaatccctagccatatgcgtgagtgcatctccatccacgttggccaggctggtgtccagattggcaatgcctgctgggagctctactgcctggaacacggcatccagcccgatggccagatgccaagtgacaagaccattgggggaggagatgactccttcaacaccttcttcagtgagacgggcgctggcaagcacgtgccccgggctgtgtttgtagacttggaacccacagtcattgatgaagttcgcactggcacctaccgccagctcttccaccctgagcagctcatcacaggcaaggaagatgctgccaataactatgcccgagggcactacaccattggcaaggagatcattgaccttgtgttggaccgaattcgcaagctggctgaccagtgcacccgtcttcagggcttcttggttttccacagctttggtgggggaactggttctgggttcacctccctgctcatggaacgcctgtcagttgattatggcaagaaatccaagctggagttctccatttacccggcaccccaggtttccacagctgtagttgagccctacaactccatcctcaccacccacaccaccctggagcactctgattgtgccttcatggtagacaatgaggccatctatgacatctgtcgtagaaacctcgatatcgagcgcccaacctacactaaccttaaccgccttattagccagattgtgtcctccatcactgcttccctgagatttgatggagccctgaatgttgacctgacagaattccagaccaacctggtcccctacccccgcatccacttccctctggccacatatgcccctgtcatctctgctgagaaagcctaccatgaacagctttctgtagcagacatcaccaatgcttgctttgagccagccaaccagatggtgaaatgtgaccctggccatggtaaatacatggcttgctgcctgttgtaccgtggtgacgtggttcccaaagatgtcaatgctgccattgccaccatcaaaaccaagcgcacgatccagtttgtggattggtgccccactggcttcaaggttggcatcaactaccagcctcccactgtggtgcctggtggagacctggccaaggtacagagagctgtgtgcatgctgagcaacaccacagccattgctgaggcctgggctcgcctggaccacaagtttgacctgatgtatgccaagcgtgcctttgttcactggtacgtgggtgaggggatggaggaaggcgagttttcagaggcccgtgaagatatggctgcccttgagaaggattatgaggaggttggtgtggattctgttgaaggagagggtgaggaagaaggagaggaatactaattatccattccttttggccctgcagcatgtcatgctcccagaatttcagcttcagcttaactgacagatgttaaagctttctggttagattgttttcacttggtgatcatgtcttttccatgtgtacctgtaatatttttccatcatatctcaaagtaaagtcattaacatca

SEQ ID NO: 324 - protein, 451 aa, Homo sapien
MRECISIHVGQAGVQIGNACWELYCLEHGIQPDGQMPSDKTIGGGDDSFNTFFSETGAGKHVPRAVFVDLEPTVIDEVRTGTYRQLFHPEQLITGKEDAANNYARGHYTIGKEIIDLVLDRIRKLADQCTRLQGFLVFHSFGGGTGSGFTSLLMERLSVDYGKKSKLEFSIYPAPQVSTAVVEPYNSILTTHTTLEHSDCAFMVDNEAIYDICRRNLDIERPTYTNLNRLISQIVSSITASLRFDGALNVDLTEFQTNLVPYPRIHFPLATYAPVISAEKAYHEQLSVADITNACFEPANQMVKCDPGHGKYMACCLLYRGDVVPKDVNAAIATIKTKRTIQFVDWCPTGFKVGINYQPPTVVPGGDLAKVQRAVCMLSNTTAIAEAWARLDHKFDLMYAKRAFVHWYVGEGMEEGEFSEAREDMAALEKDYEEVGVDSVEGEGEEEGEEY

SEQ ID NO: 325 - DNA, 3689 bp, Homo sapien
aagatctcataaaatctatgctgaggaatgagcgacagttcaaggaggagaagcttgcagagcagctcaagcaagctgaggagctcaggcaatataaagtcctggttcacgctcaggaacgagagctgacccagttaagggagaagttgcgggaagggagagatgcctcccgctcattgaatgagcatctccaggccctcctcactccggatgagccggacaagtcccaggggcaggacctccaagaacagctggctgaggggtgtagactggcacagcaccttgtccaaaagctcagcccagaaaatgacaacgatgacgatgaagatgttcaagttgaggtggctgagaaagtgcagaaatcgtctgcccccagggagatgcagaaggctgaagaaaaggaagtccctgaggactcactggaggaatgtgccatcacttgttcaaatagccatggcccttatgactccaaccagccacataggaaaaccaaaatcacatttgaggaagacaaagtcgactcaactctcattggctcatcctctcatgttgaatgggaggatgctgtacacattattccagaaaatgaaagtgatgatgaggaagaggaagaaaaaggaccagtgtctcccaggaatctgcaggagtctgaagaggaggaagtcccccaggagtcctgggatgaaggttattcgactctctcaattcctcctgaaatgttggcctcgtacaagtcttacagcagcacatttcactcattagaggaacagcaagtctgcatggctgttgacataggcagacatcggtgggatcaagtgaaaaaggaggaccacgaggcaacaggtcccaggctcagcagagagctgctggatgagaaagggcctgaagtcttgcaggactcactggatagatgttattcaactccttcaggttgtcttgaactgactgactcatgccagccctacagaagtgccttttacgtattggagcaacagcgtgttggcttggctgttaacatggatgaaattgaaaagtaccaagaagtggaagaagaccaagacccatcatgccccaggctcagcagggagctgctggatgagaaagagcctgaagtcttgcaggactcactgggtagatgttattcgactccttcaggttatcttgaactgcctgacttaggccagccctacagcagtgctgtttactcattggaggaacagtaccttggcttggctcttgacgtggacagaattaaaaaggaccaagaagaggaagaagaccaaggcccaccatgccccaggctcagcagggagctgctggaggtagtagagcctgaagtcttgcaggactcactggatagatgttattcaactccttccagttgtcttgaacagcctgactcctgccagccctatggaagttccttttatgcattggaggaaaagcatgttggcttttctcttgacgtgggagaaattgaaaagaaggggaaggggaagaaaagaaggggaagaagatcaaagaaggaaagaagaaggggaagaaaagaaggggaagaagatcaaaacccaccatgccccaggctcagcagggagctgctggatgagaaagggcctgaagtcttgcaggactcactggatagatgttattcaactccttcaggttgtcttgaactgactgactcatgccagccctacagaagtgccttttacatattggagcaacagcgtgttggcttggctgttgacatggatgaaattgaaaagtaccaagaagtggaagaagaccaagacccatcatgccccaggctcagcggggagctgttggatgagaaagagcctgaagtcttgcaggagtcactggatagatgctattcaactccttcaggttgtcttgaactgactgactcatgccagccctacagaagtgccttttacatattggagcaacagcgtgttggcttggctgttgacatggatgaaattgaaaagtaccaagaagtggaagaagaccaagacccatcatgccccaggctcagcagggagctgctggatgagaaagagcctgaagtcttgcaggactcactgggtagatgttattcgactccttcaggttatcttgaactgcctgacttaggccagccctacagcagtgctgtttactcattggaggaacagtaccttggcttggctcttgacgtggacagaattaaaaaggaccaagaagaggaagaagaccaaggcccaccatgccccaggctcagcagggagctgctggaggtagtagagcctgaagtcttgcaggactcactggatagatgttattcaactccttccagttgtcttgaacagcctgactcctgccagccctatggaagttccttttatgcattggaggaaaaacatgttggcttttctcttgacgtgggagaaattgaaaagaaggggaaggggaagaaaagaaggggaagaagatcaaagaaggaaagaagaaggggaagaaaagaaggggaagaagatcaaaacccaccatgccccaggctcaacagcatgctgatggaagtggaagagcctgaagtcttgcaggactcactggatatatgttattcgactccgtcaatgtactttgaactacctgactcattccagcactacagaagtgtgttttactcatttgaggaagagcatatcagcttcgccctttacgtggacaataggttttttactttgacggtgacaagtctccacctggtgttccagatgggagtcatattcccacaataagcagcccttactaagccgagaggtgtcattcctgcaggcaggacctataggcacgtgaagatttgaatgaaagtacagttccatttggaagcccagacataggatgggtcagtgggcatggctctattcctattctcaaaccatgccagtggcaacctgtgctcagtctgaagacaatggacccacgttaggtgtgacacgttcacataactgtgcagcacatgccgggagtgatcagtcagacattttaatttgaaccacgtatctctgggtagctacaaaattcctcagggatgtcattttgcaggcatgtctctgagcttctatacctgctcaaggtcattgtcatctttgtgtttagctcatccaaaggtgttaccctggtttcaatgaacctaacctcattctttgtgtcttcagtgttggcttgttttagctgatccatctgtaacacaggagggatccttggctgaggattgtatttcagaaccaccaactgctcttgacaattgttaacccgctaggctcctttggttagagaagccacagtccttcagcctccaattggtgtcagtacttaggaagaccacagctagatggacaaacagcattgggaggccttagccctgctcctctcaattccatcctgtagagaacaggagtcaggagccgctggcaggagacagcatgtcacccaggactctgccggtgcagaatatgagcaatgccatgttcttgcagaaaacgcttaacctgagtttcataggaggtaatcaccagacaactgcagaatgtagaacactgagcaggacaactgacctgtctccttcacatagtccatatcaccacaaatcacacaacaaaaaggagaagagatattttcggttgaaaaaaagtaaaaagata

SEQ ID NO: 326 - protein, 921 aa, Homo sapien
MLRNERQFKEEKLAEQLKQAEELRQYKVLVHAQERELTQLREKLREGRDASRSLNEHLQALLTPDEPDKSQGQDLQEQLAEGCRLAQHLVQKLSPENDNDDDEDVQVEVAEKVQKSSAPREMQKAEEKEVPEDSLEECAITCSNSHGPYDSNQPHRKTKITFEEDKVDSTLIGSSSHVEWEDAVHIIPENESDDEEEEEKGPVSPRNLQESEEEEVPQESWDEGYSTLSIPPEMLASYKSYSSTFHSLEEQQVCMAVDIGRHRWDQVKKEDHEATGPRLSRELLDEKGPEVLQDSLDRCYSTPSGCLELTDSCQPYRSAFYVLEQQRVGLAVNMDEIEKYQEVEEDQDPSCPRLSRELLDEKEPEVLQDSLGRCYSTPSGYLELPDLGQPYSSAVYSLEEQYLGLALDVDRIKKDQEEEEDQGPPCPRLSRELLEVVEPEVLQDSLDRCYSTPSSCLEQPDSCQPYGSSFYALEEKHVGFSLDVGEIEKKGKGKKRRGRRSKKERRRGRKEGEEDQNPPCPRLSRELLDEKGPEVLQDSLDRCYSTPSGCLELTDSCQPYRSAFYILEQQRVGLAVDMDEIEKYQEVEEDQDPSCPRLSGELLDEKEPEVLQESLDRCYSTPSGCLELTDSCQPYRSAFYILEQQRVGLAVDMDEIEKYQEVEEDQDPSCPRLSRELLDEKEPEVLQDSLGRCYSTPSGYLELPDLGQPYSSAVYSLEEQYLGLALDVDRIKKDQEEEEDQGPPCPRLSRELLEVVEPEVLQDSLDRCYSTPSSCLEQPDSCQPYGSSFYALEEKHVGFSLDVGEIEKKGKGKKRRGRRSKKERRRGRKEGEEDQNPPCPRLNSMLMEVEEPEVLQDSLDICYSTPSMYFELPDSFQHYRSVFYSFEEEHISFALYVDNRFFTLTVTSLHLVFQMGVIFPQ

SEQ ID NO: 327 - DNA, 526 bp, Homo sapien
atctctctcgggtggagtccttctgacagctggtgcgcctgcccgggaacatcctcctggactcaatcatggcttgtggtctggtcgccagcaacctgaatctcaaacctggagagtgccttcgagtgcgaggcgaggtggctcctgacgctaagagcttcgtgctgaacctgggcaaagacagcaacaacctgtgcctgcacttcaaccctcgcttcaacgcccacggcgacgccaacaccatcgtgtgcaacagcaaggacggcggggcctgggggaccgagcagcgggaggctgtctttcccttccagcctggaagtgttgcagaggtgtgcatcaccttcgaccaggccaacctgaccgtcaagctgccagatggatacgaattcaagttccccaaccgcctcaacctggaggccatcaactacatggcagctgacggtgacttcaagatcaaatgtgtggcctttgactgaaatcagccagcccatggcccccaataaaggcagctgcctctgctcccctg

SEQ ID NO: 328 - protein, 135 aa, Homo sapien
MACGLVASNLNLKPGECLRVRGEVAPDAKSFVLNLGKDSNNLCLHFNPRFNAHGDANTIVCNSKDGGAWGTEQREAVFPFQPGSVAEVCITFDQANLTVKLPDGYEFKFPNRLNLEAINYMAADGDFKIKCVAFD

SEQ ID NO: 329 - DNA, 1418 bp, Homo sapien
  Unsure 1205: Unknown base
tcagaagctgattgcatccaaagcaaatgaccaccaaggtttttatcttctaaacagtataatagagcacatgcctcctgaatcagttgaccaatataggaaacaaatcttcattctgctattccagagacttcagaattccaaaacaaccaagtttatcaagagttttttagtctttattaatttgtattgcataaaatatggggcactagcactacaagaaatatttgatggtatacaaccaaaaatgtttggaatggttttggaaaaaattattattcctgaaattcagaaggtatctggaaatgtagagaaaaagatctgtgcggttggcataaccaaattactaacagaatgtcccccaatgatggacactgagtataccaaactgtggactccattattacagtctttgattggtctttttgagttacccgaagatgataccattcctgatgaggaacattttattgacatagaagatacaccaggatatcagactgccttctcacagttggcatttgctgggaaaaaagagcatgatcctgtaggtcaaatggtgaataaccccaaaattcacctggcacagtcacttcacaagttgtctaccgcctgtccaggaaggacctatttttgaaggcataaaagcagttgagtttctggagaatttttggatggtgattaatgacttgactggctgctcttcccagagctgtggcagctctcccgtagaagatggggtttgtattggcgcaccaagatctccaacagccagtgtgtgtttcccatctcttgtaggttccatcaatggtgagcaccagcctgaatgcagaagcgctccagtatctccaagggtaccttcaggcagccagtgtgacactgctttaaactgcatttttctaatgggctaaacccagatggtttcctaggaaatcacaggcttctgagcacagctgcattaaaacaaaggaagttctccttttgaacttgtcacgaattccatcttgtaaaggatattaaatgttgctttaacctgaaccttgagcaaattagttggtttgtgtgatcatacagttatgtgggtggcttctagtttgcaacttcaagggacaagtattaatagttcagtgtatggcgttggtttgtgttgagcgtttgcacggtttggataatcttaaattttgacggacactgtggagactttnctgttactaaatccttttgttttgaagctgttgctatttgtatttctcttgtcctttatattttttgtctgtttatttacgcttttattggaaatgtgaataagtaaagaattacttgtgttacttgccaagcagtgcacatttcatagtttcaaatctgtaatcagcaataaaaatcctaaaatatgtacctaaaaaaaaaaaaaaaaaaaa

SEQ ID NO: 330 - DNA, 984 bp, Homo sapien
cggcgccgagggtggggcgcgggcgtagtggcgccgggagtcgcgggtgcgcgcgggccgtgagtgtgcgcttttgagagtcgcggcggaaggagcccggccgccgcccgccggcatgagctacgaccgcgccatcaccgtcttctcgcccgacggccacctcttccaagtggagtacgcgcaggaggccgtcaagaagggctcgaccgcggttggtgttcgaggaagagacattgttgttcttggtgtggagaagaagtcagtggccaaactgcaggatgaaagaacagtgcggaagatctgtgctttggatgacaacgtctgcatggcctttgcaggcctcaccgccgatgcaaggatagtcatcaacagggcccgggtggagtgccagagccaccggctgactgtggaggacccggtcactgtggagtacatcacccgctacatcgccagtctgaagcagcgttatacgcagagcaatgggcgcaggccgtttggcatctctgccctcatcgtgggtttcgactttgatggcactcctaggctctatcagactgacccctcgggcacataccatgcctggaaggccaatgccataggtcggggtgccaagtcagtgcgcgagttcctggagaagaactatactgacgaagccattgaaacagatgatctgaccattaagctggtgatcaaggcactcctggaagtggttcagtcaggtggcaaaaacattgaacttgctgtcatgaggcgagatcaatccctcaagattttaaatcctgaagaaattgagaagtatgttgctgaaattgaaaaagaaaaagaagaaaacgaaaagaagaaacaaaagaaagcatcatgatgaataaaatgtctttgcttgtaatttttaaattcatatcaatcatggatgagtctcgatgtgtaggcctttccattccatttattcacactgagtgtcctacaataaacttccgtattttt

SEQ ID NO: 331 - protein, 248 aa, Homo sapien
MSYDRAITVFSPDGHLFQVEYAQEAVKKGSTAVGVRGRDIVVLGVEKKSVAKLQDERTVRKICALDDNVCMAFAGLTADARIVINRARVECQSHRLTVEDPVTVEYITRYIASLKQRYTQSNGRRPFGISALIVGFDFDGTPRLYQTDPSGTYHAWKANAIGRGAKSVREFLEKNYTDEAIETDDLTIKLVIKALLEVVQSGGKNIELAVMRRDQSLKILNPEEIEKYVAEIEKEKEENEKKKQKKAS

SEQ ID NO: 332 - DNA, 1584 bp, Homo sapien
cgggatgcggcgcgccgcgcgttgaacctccttggcctgggcgaagctgtgtggaccaagcaagtcaggagtgtggccatgttttctgagcaggctgcccagagggcccacactctactgtccccaccatcagccaacaatgccacctttgcccgggtgccagtggcaacctacaccaactcctcacaacccttccggctaggagagcgcagctttagccggcagtatgcccacatttatgccacccgcctcatccaaatgagacccttcctggagaaccgggcccagcagcactggggcagtggagtgggagtgaagaagctgtgtgaactgcagcctgaggagaagtgctgtgtggtgggcactctgttcaaggccatgccgctgcagccctccatcctgcgggaggtcagcgaggagcacaacctgctcccccagcctcctcggagtaaatacatacacccagatgacgagctggtcttggaagatgaactgcagcgtatcaaactaaaaggcaccattgacgtgtcaaagctggttacggggactgtcctggctgtgtttggctccgtgagagacgacgggaagtttctggtggaggactattgctttgctgaccttgctccccagaagcccgcacccccacttgacacagataggtttgtgctactggtgtccggcctgggcctgggtggcggtggaggcgagagcctgctgggcacccagctgctggtggatgtggtgacggggcagcttggggacgaaggggagcagtgcagcgccgcccacgtctcccgggttatcctcgctggcaacctcctcagccacagcacccagagcagggattctatcaataaggccaaatacctcaccaagaaaacccaggcagccagcgtggaggctgttaagatgctggatgagatcctcctgcagctgagcgcctcagtgcccgtggacgtgatgccaggcgagtttgatcccaccaattacacgctcccccagcagcccctccacccctgcatgttcccgctggccactgcctactccacgctccagctggtcaccaacccctaccaggccaccattgatggagtcagatttttggggacatcaggacagaacgtgagtgacattttccgatacagcagcatggaggatcacttggagatcctggagtggaccctgcgggtccgtcacatcagccccacagccccggacactctaggttgttaccccttctacaaaactgacccgttcatcttcccagagtgcccgcatgtctacttttgtggcaacacccccagctttggctccaaaatcatccgaggtcctgaggaccagacagtgctgttggtgactgtccctgacttcagtgccacgcagaccgcctgccttgtgaacctgcgcagcctggcctgccagcccatcagcttctcgggcttcggggcagaggacgatgacctgggaggcctggggctgggcccctgactcaaaaaagtggttttgaccagagaggcccagatggaggctgttcattccctgcagtgtcggcattgtaaataaagcctggcacttgctgatgcg

SEQ ID NO: 333 - protein, 469 aa, Homo sapien
MFSEQAAQRAHTLLSPPSANNATFARVPVATYTNSSQPFRLGERSFSRQYAHIYATRLIQMRPFLENRAQQHWGSGVGVKKLCELQPEEKCCVVGTLFKAMPLQPSILREVSEEHNLLPQPPRSKYIHPDDELVLEDELQRIKLKGTIDVSKLVTGTVLAVFGSVRDDGKFLVEDYCFADLAPQKPAPPLDTDRFVLLVSGLGLGGGGGESLLGTQLLVDVVTGQLGDEGEQCSAAHVSRVILAGNLLSHSTQSRDSINKAKYLTKKTQAASVEAVKMLDEILLQLSASVPVDVMPGEFDPTNYTLPQQPLHPCMFPLATAYSTLQLVTNPYQATIDGVRFLGTSGQNVSDIFRYSSMEDHLEILEWTLRVRHISPTAPDTLGCYPFYKTDPFIFPECPHVYFCGNTPSFGSKIIRGPEDQTVLLVTVPDFSATQTACLVNLRSLACQPISFSGFGAEDDDLGGLGLGP

SEQ ID NO: 334 - DNA, 1299 bp, Homo sapien
ggcacgagggcggcggcggcggtagaggcggcggcggcggcggcagcgggctcggaggcagcggttgggctcgcggcgagcggacggggtcgagtcagtgcgttcgcgcgagttggaatcgaagcctcttaaaatggcagatgacttggacttcgagacaggagatgcaggggcctcagccaccttcccaatgcagtgctcagcattacgtaagaatggctttgtggtgctcaaaggccggccatgtaagatcgtcgagatgtctacttcgaagactggcaagcacggccacgccaaggtccatctggttggtattgacatctttactgggaagaaatatgaagatatctgcccgtcaactcataatatggatgtccccaacatcaaaaggaatgacttccagctgattggcatccaggatgggtacctatcactgctccaggacagcggggaggtacgagaggaccttcgtctccctgagggagaccttggcaaggagattgagcagaagtacgactgtggagaagagatcctgatcacggtgctgtctgccatgacagaggaggcagctgttgcaatcaaggccatggcaaaataactggctcccaggatggcggtggtggcagcagtgatcctctgaacctgcagaggccccctccccgagcctggcctggctctggcccggtcctaagctggactcctcctacacaatttatttgacgttttattttggttttccccaccccctcaatctgtcggggagcccctgcccttcacctagctcccttggccaggagcgagcgaagctgtggccttggtgaagctgccctcctcttctcccctcacactacagccctggtgggggagaagggggtgggtgctgcttgtggtttagtcttttttttttttttttttttttttttaaattcaatctggaatcagaaagcggtggattctggcaaatggtccttgtgccctccccactcatccctggtctggtcccctgttgcccatagccctttaccctgagcaccaccccaacagactggggaccagccccctcgcctgcctgtgtctctccccaaacccctttagatggggagggaagaggaggagaggggaggggacctgccccctcctcaggcatctgggagggccctgcccccatgggctttacccttccctgcgggctctctccccgacacatttgttaaaatcaaacctgaataaaactacaagtttaatatgaaaaaaaaaaaaaaaaaaaaaaaaaaaaaaaaaaaaaaaaaaaaaaaaaaa

SEQ ID NO: 335 - protein, 154 aa, Homo sapien
MADDLDFETGDAGASATFPMQCSALRKNGFVVLKGRPCKIVEMSTSKTGKHGHAKVHLVGIDIFTGKKYEDICPSTHNMDVPNIKRNDFQLIGIQDGYLSLLQDSGEVREDLRLPEGDLGKEIEQKYDCGEEILITVLSAMTEEAAVAIKAMAK

SEQ ID NO: 336 - DNA, 2338 bp, Homo sapien
gtagtgccgccgggactcttggcgggtgaaggtgtgtgtcagcttttgcgtcactcgagccctgggcgctgcttgctaaagagccgagcacgcgggtctgtcatcatgtcgcgttacgggcggtacggaggagaaaccaaggtgtatgttggtaacctgggaactggcgctggcaaaggagagttagaaagggctttcagttattatggtcctttaagaactgtatggattgcgagaaatcctccaggatttgcctttgtggaattcgaagatcctagagatgcagaagatgcagtacgaggactggatggaaaggtgatttgtggctcccgagtgagggttgaactatcgacaggcatgcctcggagatcacgttttgatagaccacctgcccgacgtccctttgatccaaatgatagatgctatgagtgtggcgaaaagggacattatgcttatgattgtcatcgttacagccggcgaagaagaagcaggtcacggtctagatcacattctcgatccagaggaaggcgatactctcgctcacgcagcaggagcaggggacgaaggtcaaggtcagcatctcctcgacgatcaagatctatctctcttcgtagatcaagatcagcttcactcagaagatctaggtctggttctataaaaggatcgaggtatttccaatccccgtcgaggtcaagatcaagatccaggtctatttcacgaccaagaagcagccgatcaaagtccagatctccatctccaaaaagaagtcgttccccatcaggaagtcctcgcagaagtgcaagtcctgaaagaatggactgaagctctcaagttcaccctttagggaaaagttattttgtttacattattataagggatttgtgatgtctgtaaagtgtaacctaggaaagataattcaaccatctaatcaaaatggatctggattactatgtaaattcacagcagtaaggataatataaattttgttgaatgtatgaacatcatatggtctgaaaatgtgggtttttatttggcacatttaaataacatgtttctaactagatttttgatttgtgttcaatattaacacttcttaatttgatatatttgagagtcagacattataattgttaatccttattcatacatacctacattcagaattgaaaggtgttggttaagtcttgaacatcactattctatgcataaaacttggccaggatcttaagggactttgaaaattccatcttacccttgtagctctgggtaagatgacctgagtcccttatgatacagcctgaatgcatcatgacagatccttagttagctaatccgtttgaagttggtgttagtaggtattgtatgatcagtggtgaagcaagtaggaccactgatgtgtctaaatgagcatgacaggaactaaacgaaactgattaaatgtatgagaaatagaaactgatttctggatgatctttatactaattgcagctttcaggctactaggtggcatagtgttaattaggactccccaagatatggggagttctactctcaatggtcttgtttctttgctttctacattagttaaccagttttataccaaaaaatgcatgtttgaggaattgtctgaaattgggacaaaacaccttcatgtaaaccagctttgcaaaattttccagcccagatactcttcatctattcaaatggattgtcttattctgagcaaagacctgttgttaatcttcaagctaggttttgcagttcccaaccacaacattcttctattttgccaggctggtgcaaagtaattaaagatgtcaatcagaaatgtcaatgagactaaagtggttttgtaaatctcagctatatttagcaacactccatgtagctaatattttttggtagcatctggtagaccttagaatgttacatagccagtaggttctttattcaaattttaagtatcttaagaatagtagggcagtaacagttacttttgagagttttctggtcaagcttttaccaggcattctctagccttggtacaaaaaaaaaaaaaacctgctggttgcgcagatacctaggcttgtccattttatgcatttcagcaaagtcattggagactattgcaacttgggaatactggtctgcatcaagtttaattcggtagtttgaccgctagtatgttggaagttatttggattgtttttggaattttgactggctgaattatggttggtataaagttatgtgtataactggcaggcttatttatctgttgcacttggttagctttaattgttctgtattatttaaagataagtttactcaacaataa

SEQ ID NO: 337 - protein, 238 aa, Homo sapien
MSRYGRYGGETKVYVGNLGTGAGKGELERAFSYYGPLRTVWIARNPPGFAFVEFEDPRDAEDAVRGLDGKVICGSRVRVELSTGMPRRSRFDRPPARRPFDPNDRCYECGEKGHYAYDCHRYSRRRRSRSRSRSHSRSRGRRYSRSRSRSRGRRSRSASPRRSRSISLRRSRSASLRRSRSGSIKGSRYFQSPSRSRSRSRSISRPRSSRSKSRSPSPKRSRSPSGSPRRSASPERMD

SEQ ID NO: 338 - DNA, 1501 bp, Homo sapien
agcgagtccttcttttcctgactgcagctcttttcattttgccatccttctccagctccatgatggttctgcaggtttctgcggccccccggacagtggctctgacggcgttactgatggtgctgctcacatctgtggtccagggcagggccactccagagaattacgtgtaccagggacggcaggaatgctacgcgtttaatgggacacagcgcttcctggagagatacatctacaaccgggaggagtacgcgcgcttcgacagcgacgtgggggagttccgggcggtgacggagctggggcggcctgctgcggagtactggaacagccagaaggacatcctggaggagaagcgggcagtgccggacagggtatgcagacacaactacgagctggacgaggccgtgaccctgcagcgccgagtccagcctaaggtgaacgtttccccctccaagaaggggcccctgcagcaccacaacctgcttgtctgccacgtgacagatttctacccaggcagcattcaagtccgatggttcctgaatggacaggaggaaacagctggggtcgtgtccaccaacctgatccgtaatggagactggaccttccagatcctggtgatgctggaaatgaccccccagcagggagacgtctacatctgccaagtggagcacaccagcctggacagtcctgtcaccgtggagtggaaggcacagtctgattctgcccagagtaagacattgacgggagctgggggcttcgtgctggggctcatcatctgtggagtgggcatcttcatgcacaggaggagcaagaaagttcaacgaggatctgcataaacagggttcctgacctcaccgaaaagactaatgtgccttagaacaagcatttgctgtgttttgttaacacctggttccaggacagaccctcagcttcccaagaggatactgctgccaagaagttgctctgaagtcagtttctatcgttctgctctttgattcaaagcactgtttctctcactgggcctccaaccatgttcccttcttcttagcaccacaaataatcaaaacccaacataagtgtttgctttcctttaaaaatatgcatcaaatcgtctctcattacttttctctgagggttttagtaaacagtaggagttaataaagaagttcattttggtttacacgtaggaaagaagagaagcatcaaagtggagatatgttaactattgtataatgtggcctgttatacatgacactcttctgaattgactgtatttcagtgagctgcccccaaatcaagtttagtgccctcatccatttatgtctcagaccgctattcttaactattcaatggtgagcagactgcaaatctgcctgataggacccatattcccacagcactaattcaacatatatcttactgagagcatgttttatcattaccattaagaagttaaatgaacatcagaatttaaaatcataaatataatctaatacacttt

SEQ ID NO: 339 - protein, 258 aa, Homo sapien [sequence omitted]

SEQ ID NO: 340 - DNA, 2992 bp, Homo sapien
ggcacgaggggcggccggtgagggggaagcaagtctggtctctgtgattgaagaagtcggctctgggctccagtgcgggaatcacacacatacctcagaatgccgggtctaagttgtagattttatcaacacaaatttcctgaggtggaagatgtagtgatggtgaatgtcagatccattgctgaaatgggggcttatgtcagcttgctggaatacaacaacattgaaggcatgattcttcttagtgaattatccagaaggcgtatccgttctatcaacaaactcatccgaattggcaggaatgagtgtgtggttgtcattagggtggacaaagaaaaaggatatattgatttgtcaaaaagaagagtttctccagaggaagcaatcaaatgtgaagacaaattcacaaaatccaaaactgtttatagcattcttcgtcatgttgctgaggtgttagaatacaccaaggatgagcagctggaaagcctattccagaggactgcctgggtctttgatgacaagtacaagagacctggatatggtgcctatgatgcatttaagcatgcagtctcagacccatctattttggatagtttagatttgaatgaagatgaacgggaagtactcattaataatattaataggcgcttgaccccacaggctgtcaaaattcgagcagatattgaagtggcttgttatggttatgaaggcattgatgctgtaaaagaagccctaagagcaggtttgaattgttctacagaaaacatgcccattaagattaatctaatagctcctcctcggtatgtaatgactacgacaaccctggagagaacagaaggcctttctgtcctcagtcaagctatggctgttatcaaagagaagattgaggaaaagaggggtgtgttcaatgttcaaatggagcccaaagtggtcacagatacagatgagactgaacttgcgaggcagatggagaggcttgaaagagaaaatgccgaagtggatggagatgatgatgcagaagaaatggaagccaaagctgaagattaactttgtgggaaacagagtccaatttaaggaacacagagcagcgcttcctggctgtaaatcctagacttgaaagttttccagtattgaaaacttcaaagctgaatattttttatttctaagtatttaaatgttctaacagatcagaacatgaaatgccctcctaaatgtcagctgttgtcacacagtagctccaacactttgagcatttttaagggagtggcctcatttcactagagacaaatctttaagaatagttctaaaattgggcttgtgatttccatttctgatgtctccagattggcacccctttctagttcaatgcctcacgagatttgccaggggcatccaaggcaaacaatcccaatctttctatataaaatgtattcaagcaaacatcaaataaatttctgggatatttaactataggcttcttccttcttgtcaccagttaaaagcattttaatactaagaccctaattcttttatctttattttagtcttgatgtggaactgtaggagcaggtgaataaaggatctctataacagatcctttcaaaagaagagttttagagaaaataaatttaactttaaccacagtgaaagttgacccttagcgggacaaagccttaaaatgcattgaaagaattagatcggttctgtgccttttatctatttgagattgatgacaacctgtgtgagagaatttatcacaccacgtccttattggaataataagctacttgccttgagtttataattcagggtggtaaagtatgtttttaaattttaaaaagcagctgcattttttatttagttggaatatcacccaattttttatttttattgctattaaaatatccactagatgccacctagagctccagttctttataacaaaacagggatctgtttgaacacttactgttgtttttttttttttacatgtttccatcatttctgtctttaagaactaattcgtacataataagtttcataggtaacacattatattctcttatgatacttgaggtaccagttgtatttaattttattcattatccctagatagctattaagatacttagattagacctaacccaccatagtcaatccaagactagactactcaatattaaagggtctggaaaatagaagagtgtgttgggcaggtagtttgtaccatttatgaaggtttgttcctttgttaaatttagcagcctgtactagcttttgaaatccagaagttttaacttccagtggctggtttctgagagagtgccatgattgctagccagcattccatattgggaatatgtagaggagaacctggatgtacttaagagtggcatataattttcacttctgtctgttgaggcaaaaaaaaaacaagtttagaaagctggcaacatgaagaatgcattcaaaatataacaggtgcttctttgttgtacgcagaggaattttttcttttgattttgtttactgaaatttgttatacttcaaaagccataacttgaaaaatactggtggcgtcgatggtgagtgatttttatcccacgtgggccttttgctcagttccatggcaattttgtaaattgaccctagccagagaatagatcagtatttcactgataccacgaggaaaagaacaaacaaaacttaaaagtattcatacaccttgctaacctaaaagacagcagggacaagatacatatgaggacaaggtatacacccagttctgaataacttgaagaacaggcttggcaaagaagtaagtttatccaaatcttgaatttctgccaggcatggtagctcatgcctgtaaccctggcacttaaggggccaaggcaggaggatcacttgaggccagtgagctgtgatcactccagtgcactcgagcctgggtgacagggcaagaccctgtctcaaaaaaaaaaaaaaaaaa

SEQ ID NO: 341 - protein, 315 aa, Homo sapien
MPGLSCRFYQHKFPEVEDVVMVNVRSIAEMGAYVSLLEYNNIEGMILLSELSRRRIRSINKLIRIGRNECVVVIRVDKEKGYIDLSKRRVSPEEAIKCEDKFTKSKTVYSILRHVAEVLEYTKDEQLESLFQRTAWVFDDKYKRPGYGAYDAFKHAVSDPSILDSLDLNEDEREVLINNINRRLTPQAVKIRADIEVACYGYEGIDAVKEALRAGLNCSTENMPIKINLIAPPRYVMTTTTLERTEGLSVLSQAMAVIKEKIEEKRGVFNVQMEPKVVTDTDETELARQMERLERENAEVDGDDDAEEMEAKAED

SEQ ID NO: 342 - DNA, 1196 bp, Homo sapien
aggtccggcttaccgtcgtttacgacagtgtcaggatcgcgggcttgctttccggtagcgtgggctgacgcctcgctcaatttctcacagggctgcgcaggtttcccccgtctgcgaatggaccactggaggggttcaaaggttcgcgtcccagtacgggaatgagcctctttgatctcttccggggctttttcggctttcctggacctcggagccacagagatcccttttttggagggatgactcgagatgaagatgatgatgaggaagaagaagaagaagggggctcatggggccgtgggaacccaaggttccatagtcctcagcacccccctgaggaatttggcttcggcttcagcttcagcccaggaggagggatacgtttccacgataacttcggctttgatgacctagtacgagatttcaatagcatcttcagcgatatgggggcctggaccttgccttcccatcctcctgaacttccaggtcctgagtcagagacacctggtgagagactacgggagggacagacacttcgggactcaatgcttaagtatccagatagtcaccagcccaggatctttgggggggtcttggagagtgatgcaagaagtgaatccccccaaccagcaccagactggggctcccagaggccatttcataggtttgatgatgtatggcctatggacccccatcctagaaccagagaggacaatgatcttgattcccaggtttcccaggagggtcttggcccggttctacagccccagcccaaatcctatttcaagagcatctctgtgaccaagatcactaaaccagatgggatagtggaggagcgccggactgtggtggacagtgagggccggacagagactacagtaacccgacacgaagcagatagcagtcctaggggtgatccagaatcaccaagacctccagccctggatgatgccttttccatcctggacttattcctgggacgttggttccggtcccggtagccttgttaaccctcagaggccttcaagtcctttccacctctcacccattgcccaccattaataagcttagcttctcttgccacctcaggggcttggatatgtggaatagtgaactggggccatgtcagtttgtcactcacccaaactgaccaataaaacctttatttatgctaaaaaaaaaaaaaaaaaaaaaaa

SEQ ID NO: 343 - protein, 279 aa, Homo sapien
MSLFDLFRGFFGFPGPRSHRDPFFGGMTRDEDDDEEEEEEGGSWGRGNPRFHSPQHPPEEFGFGFSFSPGGGIRFHDNFGFDDLVRDFNSIFSDMGAWTLPSHPPELPGPESETPGERLREGQTLRDSMLKYPDSHQPRIFGGVLESDARSESPQPAPDWGSQRPFHRFDDVWPMDPHPRTREDNDLDSQVSQEGLGPVLQPQPKSYFKSISVTKITKPDGIVEERRTVVDSEGRTETTVTRHEADSSPRGDPESPRPPALDDAFSILDLFLGRWFRSR

SEQ ID NO: 344 - DNA, 2439 bp, Homo sapien
gcagccgccaccgccgccgccgccgccaccagagccgccctgtccgcgccgcgcctcggcagccggaacagggccgccgtcggggagccccaacacacggtccacagctcatcatgatggacttggagctgccgccgccgggactcccgtcccagcaggacatggatttgattgacatactttggaggcaagatatagatcttggagtaagtcgagaagtatttgacttcagtcagcgacggaaagagtatgagctggaaaaacagaaaaaacttgaaaaggaaagacaagaacaactccaaaaggagcaagagaaagcctttttcgctcagttacaactagatgaagagacaggtgaatttctcccaattcagccagcccagcacatccagtcagaaaccagtggatctgccaactactcccaggttgcccacattcccaaatcagatgctttgtactttgatgactgcatgcagcttttggcgcagacattcccgtttgtagatgacaatgaggtttcttcggctacgtttcagtcacttgttcctgatattcccggtcacatcgagagcccagtcttcattgctactaatcaggctcagtcacctgaaacttctgttgctcaggtagcccctgttgatttagacggtatgcaacaggacattgagcaagtttgggaggagctattatccattcctgagttacagtgtcttaatattgaaaatgacaagctggttgagactaccatggttccaagtccagaagccaaactgacagaagttgacaattatcatttttactcatctataccctcaatggaaaaagaagtaggtaactgtagtccacattttcttaatgcttttgaggattccttcagcagcatcctctccacagaagaccccaaccagttgacagtgaactcattaaattcagatgccacagtcaacacagattttggtgatgaattttattctgctttcatagctgagcccagtatcagcaacagcatgccctcacctgctactttaagccattcactctctgaacttctaaatgggcccattgatgtttctgatctatcactttgcaaagctttcaaccaaaaccaccctgaaagcacagcagaattcaatgattctgactccggcatttcactaaacacaagtcccagtgtggcatcaccagaacactcagtggaatcttccagctatggagacacactacttggcctcagtgattctgaagtggaagagctagatagtgcccctggaagtgtcaaacagaatggtcctaaaacaccagtacattcttctggggatatggtacaacccttgtcaccatctcaggggcagagcactcacgtgcatgatgcccaatgtgagaacacaccagagaaagaattgcctgtaagtcctggtcatcggaaaaccccattcacaaaagacaaacattcaagccgcttggaggctcatctcacaagagatgaacttagggcaaaagctctccatatcccattccctgtagaaaaaatcattaacctccctgttgttgacttcaacgaaatgatgtccaaagagcagttcaatgaagctcaacttgcattaattcgggatatacgtaggaggggtaagaataaagtggctgctcagaattgcagaaaaagaaaactggaaaatatagtagaactagagcaagatttagatcatttgaaagatgaaaaagaaaaattgctcaaagaaaaaggagaaaatgacaaaagccttcacctactgaaaaaacaactcagcaccttatatctcgaagttttcagcatgctacgtgatgaagatggaaaaccttattctcctagtgaatactccctgcagcaaacaagagatggcaatgttttccttgttcccaaaagtaagaagccagatgttaagaaaaactagatttaggaggatttgaccttttctgagctagtttttttgtactattatactaaaagctcctactgtgatgtgaaatgctcatactttataagtaattctatgcaaaatcatagccaaaactagtatagaaaataatacgaaactttaaaaagcattggagtgtcagtatgttgaatcagtagtttcactttaactgtaaacaatttcttaggacaccatttgggctagtttctgtgtaagtgtaaatactacaaaaacttatttatactgttcttatgtcatttgttatattcatagatttatatgatgatatgacatctggctaaaaagaaattattgcaaaactaaccactatgtacttttttataaatactgtatggacaaaaaatggcattttttatattaaattgtttagctctggcaaaaaaaaaaaattttaagagctggtactaataaaggattattatgactgttaaaaaaaaaaaaaaaaaaaaaaaaaaaaaaaaaa

SEQ ID NO: 345 - protein, 605 aa, Homo sapien
MMDLELPPPGLPSQQDMDLIDILWRQDIDLGVSREVFDFSQRRKEYELEKQKKLEKERQEQLQKEQEKAFFAQLQLDEETGEFLPIQPAQHIQSETSGSANYSQVAHIPKSDALYFDDCMQLLAQTFPFVDDNEVSSATFQSLVPDIPGHIESPVFIATNQAQSPETSVAQVAPVDLDGMQQDIEQVWEELLSIPELQCLNIENDKLVETTMVPSPEAKLTEVDNYHFYSSIPSMEKEVGNCSPHFLNAFEDSFSSILSTEDPNQLTVNSLNSDATVNTDFGDEFYSAFIAEPSISNSMPSPATLSHSLSELLNGPIDVSDLSLCKAFNQNHPESTAEFNDSDSGISLNTSPSVASPEHSVESSSYGDTLLGLSDSEVEELDSAPGSVKQNGPKTPVHSSGDMVQPLSPSQGQSTHVHDAQCENTPEKELPVSPGHRKTPFTKDKHSSRLEAHLTRDELRAKALHIPFPVEKIINLPVVDFNEMMSKEQFNEAQLALIRDIRRRGKNKVAAQNCRKRKLENIVELEQDLDHLKDEKEKLLKEKGENDKSLHLLKKQLSTLYLEVFSMLRDEDGKPYSPSEYSLQQTRDGNVFLVPKSKKPDVKKN

SEQ ID NO: 346 - DNA, 1809 bp, Homo sapien
ggcacgagggcgaggagcccaagagcgagcgcgcagcacgaagctcgagccgcctccgccgcgcgaccccacctcggccgccgccgcctgcgccgcgagatccgccccggcctccccgagagcgagccccggccgccgcgaccaccagccgcgctaaccgccgaccaaccgccaccgaggcgcctgagcgagagcagaggaggaggaggcatgagtgaggcgggcgaggccaccaccaccaccaccaccaccctcccgcaggctccgacggaggcggccgccgcggctccccaggaccccgcgcccaagagcccggtgggcagcggtgcgccccaggccgcggccccggcgcccgccgcccacgtcgcaggaaaccccggtggggacgcggcccccgcagccacgggcaccgcggccgccgcctctttagccgccgccgccggcagcgaagacgcggagaaaaaagttctcgccaccaaagtccttggcactgtcaaatggttcaacgtcagaaatggatatggatttataaatcgaaatgacaccaaagaagatgtatttgtacatcagactgccatcaagaagaataacccacggaaatatctgcgcagtgtaggagatggagaaactgtagagtttgatgtggttgaaggagagaagggtgcagaagctgccaatgtgactggcccggatggagttcctgtggaagggagtcgttacgctgcagatcggcgccgttacagacgtggctactatggaaggcgccgtggccctccccggaattacgctggggaggaggaggaggaagggagcggcagcagtgaaggatttgacccccctgccactgataggcagttctctggggcccggaatcagctgcgccgcccccagtatcgccctcagtaccggcagcggcggttcccgccttaccacgtgggacagacctttgaccgtcgctcacgggtcttaccccatcccaacagaatacaggctggtgagattggagagatgaaggatggagtcccagagggagcacaacttcagggaccggttcatcgaaatccaacttaccgcccaaggtaccgtagcaggggacctcctcgcccacgacctgccccagcagttggagaggctgaagataaagaaaatcagcaagccaccagtggtccaaaccagccgtctgttcgccgtggatatcggcgtccctacaattaccggcgtcgcccgcgtcctcctaacgctccttcacaagatggcaaagaggccaaggcaggtgaagcaccaactgagaaccctgctccacccacccagcagagcagtgctgagtaacaccaggctcctcaggcaccttcaccatcggcaggtgacctaaagaattaatgaccattcagaaataaagcaaaaagcaggccacaaccttaaccaacaccaaagaaacatccaagcaataaagtggaagactaaccaagatttggacattggaatgtttactgttattctttaagaaacatctacaaaaagaaaatgtcaacaaatttttccagcaagctgagaacctgggaattcctgcacggaagacaagagagtagcctctccagtttcagcaaccgctaggtttctattttttttcctggtttttactgttttggtaatatatatattgaaacaagaaatattaataccacatggggagaaccccaaccaaagaaatctgaaatatatagtaaatgcttttttttccgtttttgttcattttggatgctggtgctaaacctccaagtgtcatgatttaaaaaaaaaaaaaaaaaa

SEQ ID NO: 347 - protein, 372 aa, Homo sapien
MSEAGEATTTTTTTLPQAPTEAAAAAPQDPAPKSPVGSGAPQAAAPAPAAHVAGNPGGDAAPAATGTAAAASLAAAAGSEDAEKKVLATKVLGTVKWFNVRNGYGFINRNDTKEDVFVHQTAIKKNNPRKYLRSVGDGETVEFDVVEGEKGAEAANVTGPDGVPVEGSRYAADRRRYRRGYYGRRRGPPRNYAGEEEEEGSGSSEGFDPPATDRQFSGARNQLRRPQYRPQYRQRRFPPYHVGQTFDRRSRVLPHPNRIQAGEIGEMKDGVPEGAQLQGPVHRNPTYRPRYRSRGPPRPRPAPAVGEAEDKENQQATSGPNQPSVRRGYRRPYNYRRRPRPPNAPSQDGKEAKAGEAPTENPAPPTQQSSAE

SEQ ID NO: 348 - DNA, 2922 bp, Homo sapien
ggacaccgggccatgcacgcccccaactgaagctgcatctcaaagccgaagattccagcagcccaggggatttcaaagagctcagactcagaggaacatctgcggagagacccccgaagccctctccagggcagtcctcatccagacgctccgctagtgcagacaggagcgcgcagtggccccggctcgccgcgccatggagcggatccccagcgcgcaaccaccccccgcctgcctgcccaaagcaccgggactggagcacggagacctaccagggatgtaccctgcccacatgtaccaagtgtacaagtcaagacggggaataaagcggagcgaggacagcaaggagacctacaaattgccgcaccggctcatcgagaaaaagagacgtgaccggattaacgagtgcatcgcccagctgaaggatctcctacccgaacatctcaaacttacaactttgggtcacttggaaaaagcagtggttcttgaacttaccttgaagcatgtgaaagcactaacaaacctaattgatcagcagcagcagaaaatcattgccctgcagagtggtttacaagctggtgagctgtcagggagaaatgtcgaaacaggtcaagagatgttctgctcaggtttccagacatgtgcccgggaggtgcttcagtatctggccaagcacgagaacactcgggacctgaagtcttcgcagcttgtcacccacctccaccgggtggtctcggagctgctgcagggtggtacctccaggaagccatcagacccagctcccaaagtgatggacttcaaggaaaaacccagctctccggccaaaggttcggaaggtcctgggaaaaactgcgtgccagtcatccagcggactttcgctcactcgagtggggagcagagcggcagcgacacggacacagacagtggctatggaggagaatcggagaagggcgacttgcgcagtgagcagccgtgcttcaaaagtgaccacggacgcaggttcacgatgggagaaaggatcggcgcaattaagcaagagtccgaagaaccccccacaaaaaagaaccggatgcagctttcggatgatgaaggccatttcactagcagtgacctgatcagctccccgttcctgggcccacacccacaccagcctcctttctgcctgcccttctacctgatcccaccttcagcgactgcctacctgcccatgctggagaagtgctggtatcccacctcagtgccagtgctatacccaggcctcaacgcctctgccgcagccctctctagcttcatgaacccagacaagatctcggctcccttgctcatgccccagagactcccttctcccttgccagctcatccgtccgtcgactcttctgtcttgctccaagctctgaagccaatcccccctttaaacttagaaaccaaagactaaactctctaggggatcctgctgctttgctttccttcctcgctacttcctaaaaagcaacaaaaaagtttttgtgaatgctgcaagattgttgcattgtgtatactgagataatctgaggcatggagagcagattcagggtgtgtgtgtgtgtgtgtgtgtgtgtgtgtatgtgcgtgtgcgtgcacatgtgtgcctgcgtgttggtataggactttaaagctccttttggcatagggaagtcacgaaggattgcttgacatcaggagacttgggggggattgtagcagacgtctgggcttttccccacccagagaatagcccccttcgatacacatcagctggattttcaaaagcttcaaagtcttggtctgtgagtcactcttcagtttgggagctgggtctgtggctttgatcagaaggtactttcaaaagagggctttccagggctcagctcccaaccagctgttaggaccccacccttttgcctttattgtcgacgtgactcaccagacgtcggggagagagagcagtcagaccgagctttctgctaacatggggaggtagcaggcactggcatagcacggtagtggtttggggaggtttccgcaggtctgctccccacccctgcctcggaagaataaagagaatgtagttccctactcaggctttcgtagtgattagcttactaaggaactgaaaatgggccccttgtacaagctgagctgccccggagggagggaggagttccctgggcttctggcacctgtttctaggcctaaccattagtacttactgtgcagggaaccaaaccaaggtctgagaaatgcggacaccccgagcgagcaccccaaagtgcacaaagctgagtaaaaagctgcccccttcaaacagaactagactcagttttcaattccatcctaaaactccttttaaccaagcttagcttctcaaaggcctaaccaagccttggcaccgccagatcctttctgtaggctaattcctcttgcccaacggcatatggagtgtccttattgctaaaaaggattccgtctccttcaaagaagttttatttttggtccagagtacttgttttcccgatgtgtccagccagctccgcagcagcttttcaagatgcactatgcctgattgctgatcgtgttttaactttttcttttcctgtttttattttggtattaagtcgttgcctttatttgtaaagctgttataaatatatattatataaatatattaaaaaggaaaatgtttcagatgtttatttgtataattacttgattcacacagtgagaaaaaatgaatgtattcctgtttttgaagagaagaataatttttttttctctagggagaggtacagtgtttatattttggagccttcctgaaggtgtaaaattgtaaatatttttatctatgagtaaatgttaagtagttgttttaaaatacttaataaaataattcttttcctgtggaag

SEQ ID NO: 349 - protein, 412 aa, Homo sapien
MERIPSAQPPPACLPKAPGLEHGDLPGMYPAHMYQVYKSRRGIKRSEDSKETYKLPHRLIEKKRRDRINECIAQLKDLLPEHLKLTTLGHLEKAVVLELTLKHVKALTNLIDQQQQKIIALQSGLQAGELSGRNVETGQEMFCSGFQTCAREVLQYLAKHENTRDLKSSQLVTHLHRVVSELLQGGTSRKPSDPAPKVMDFKEKPSSPAKGSEGPGKNCVPVIQRTFAHSSGEQSGSDTDTDSGYGGESEKGDLRSEQPCFKSDHGRRFTMGERIGAIKQESEEPPTKKNRMQLSDDEGHFTSSDLISSPFLGPHPHQPPFCLPFYLIPPSATAYLPMLEKCWYPTSVPVLYPGLNASAAALSSFMNPDKISAPLLMPQRLPSPLPAHPSVDSSVLLQALKPIPPLNLETKD

SEQ ID NO: 350 - DNA, 2922 bp, Homo sapien; identical to SEQ ID NO: 348

SEQ ID NO: 351 - protein, 412 aa, Homo sapien; identical to SEQ ID NO: 349

SEQ ID NO: 352 - DNA, 2354 bp, Homo sapien
cgcggccgcgtcggacctgtggtcccgggtttctgcagagtctacttcagaagcggaggcactgggagtccggtttgggattgccaggctgtggttgtgagtctgagcttgtgagcggctgtggcgccccaactcttcgccagcatatcatcccggcaggcgataaactacattcagttgagtctgcaagactgggaggaactggggtgataagaaatctattcactgtcaaggtttattgaagtcaaaatgtccaaaaaaatcagtggcggttctgtggtagagatgcaaggagatgaaatgacacgaatcatttgggaattgattaaagagaaactcatttttccctacgtggaattggatctacatagctatgatttaggcatagagaatcgtgatgccaccaacgaccaagtcaccaaggatgctgcagaagctataaagaagcataatgttggcgtcaaatgtgccactatcactcctgatgagaagagggttgaggagttcaagttgaaacaaatgtggaaatcaccaaatggcaccatacgaaatattctgggtggcacggtcttcagagaagccattatctgcaaaaatatcccccggcttgtgagtggatgggtaaaacctatcatcataggtcgtcatgcttatggggatcaatacagagcaactgattttgttgttcctgggcctggaaaagtagagataacctacacaccaagtgacggaacccaaaaggtgacatacctggtacataactttgaagaaggtggtggtgttgccatggggatgtataatcaagataagtcaattgaagattttgcacacagttccttccagatggctctgtctaagggttggcctttgtatctgagcaccaaaaacactattctgaagatatatgatgggcgttttaaagacatctttcaggagatatatgacaagcagtacaagtcccagtttgaagctcaaaagatctggtatgagcataggctcatcgacgacatggtggcccaagctatgaaatcagagggaggcttcatctgggcctgtaaaaactatgatggtgacgtgcagtcggactctgtggcccaagggtatggctctctcggcatgatgaccagcgtgctggtttgtccagatggcaagacagtagaagcagaggctgcccacgggactgtaacccgtcactaccgcatgtaccagaaaggacaggagacgtccaccaacctcattgcttccatttttgcctggaccagagggttagcccacagagcaaagcttgataacaataaagagcttgccttctttgcaaatgctttggaagaagtctctattgagacaattgaggctggcttcatgaccaaggacttggctgcttgcattagaggtttacccaatgtgcaacgttctgactacttgaatacatttgagttcatggataaacttggagaaaacttgaagatcaaactagctcaggccaaactttaagttcatacctgagctaagaaggataattgtcttttggtaactaggtctacaggtttacatttttctgtgttacactcaaggataaaggcaaaatcaattttgtaatttgtttagaagccagagtttatcttttctataagtttacagcctttttcttatatatacagttattgccacctttgtgaacatggcaagggacttttttacaatttttattttattttctagtaccagcctaggaattcggttagtactcatttgtattcactgtcactttttctcatgttctaattataaatgaccaaaatcaagattgctcaaaagggtaaatgatagccacagtattgctccctaaaatatgcataaagtagaaattcactgccttcccctcctgtccatgaccttgggcacagggaagttctggtgtcatagatatcccgttttgtgaggtagagctgtgcattaaacttgcacatgactggaacgaagtatgagtgcaactcaaatgtgttgaagatactgcagtcatttttgtaaagaccttgctgaatgtttccaatagactaaatactgtttaggccgcaggagagtttggaatccggaataaatactacctggagtcttgtcctctccatttttctctttctcctcctggcctggcctgaatattatactactctaaatagcatatttcatccaagtgcaataatgtaagctgaatcttttttggacttctgctggcctgttttatttcttttatataaatgtgatttctcagaaattgatattaaacactatcttatcttctcctgaactgttgattttaattaaaattaagtgctaattaccaaaaaaaaaaa

SEQ ID NO: 353 - protein, 414 aa, Homo sapien [sequence omitted]

SEQ ID NO: 354 - DNA, 758 bp, Homo sapien
caggtgggaggttagtgtggcccgggcgtccgctcctcagcggatgtggcagccccgagccatggctctcgccgtccgagtcgtttattgtggcgcttgaggctacaagtccaagtatcttcagctcaagaagaagttagaagatgagttccccggccgcctggacatctgcggcgagggaactccccaggccaccgggttctttgaagtgatggtagccgggaagttgattcactctaagaagaaaggcgatggctacgtggacacagaaagcaagtttctgaagttggtggccgccatcaaagccgccttggctcagggctaatgcgccctgaaggcagagtccagggaccttgacccagcccctctcagcagacgcttcatgataggaaggactgaaaagtcttgtggacacctggtctttccctgatgttctcgtggctgctgttgggggcagagattgacgcccccggtctttgcctctgagcgggagagtctgtgtgtatgtgtcttccccggaatccacaccaccccaccctcctcctgtcccgtggtttcatcatatctctttgcataccccatgtcttccccagttgtcccctggagtttggggggacatcccgcctcaggcatccttctcaaggggaagccaagagaggcatcaggatgggtgggtttctgattgtggcaacgtttgcaaccgttcacgattcaataaatattggatgaaattaaccggaaaaaaaaaaaaaaaaaaa

SEQ ID NO: 355 - protein, 87 aa, Homo sapien
  unsure 13: unknown amino acid
MALAVRVVYCGAXGYKSKYLQLKKKLEDEFPGRLDICGEGTPQATGFFEVMVAGKLIHSKKKGDGYVDTESKFLKLVAAIKAALAQG

SEQ ID NO: 356 - DNA, 3984 bp, Homo sapien
gtcctttcacgcgtgtcttcgtgttggtgcgcttttcactggtcataaagtgctgctcacggccgtgaactgctacagcgtgaaggccgccacccgggtccaggatgcttttgccgccgccaagctcctggccctggccctgatcatcctgctgggcttcgtccagatcgggaagggtgatgtgtccaatctagatcccaagttctcatttgaaggcaccaaactggatgtggggaacattgtgctggcattatacagcggcctctttgcctatggaggatggaattacttgaatttcgtcacagaggaaatgatcaacccctacagaaacctgcccctggccatcatcatctccctgcccatcgtgacgctggtgtacgtgctgaccaacctggcctacttcaccaccctgtccaccgagcagatgctgtcgtccgaggccgtggccgtggacttcgggaactatcacctgggcgtcatgtcctggatcatccccgtcttcgtgggcctgtcctgctttggctccgtcaatgggtccctgttcacatcctccaggctcttcttcgtggggtcccgggaaggccacctgccctccatcctctccatgatccacccacagctcctcacccccgtgccgtccctcgtgttcacgtgtgtgatgacgctgctctacgccttctccaaggacatcttctccgtcatcaacttcttcagcttcttcaactggctctgcgtggccctggccatcatcggcatgatctggctgcgccacagaaagcctgagcttgagcggcccatcaaggtgaacctggccctgcctgtgttcttcatcctggcctgcctcttcctgatcgccgtctccttctggaagacacccgtggagtgtggcatcggcttcaccatcatcctcagcgggctgcccgtctacttcttcggggtctggtggaaaaacaagcccaagtggctcctccagggcatcttctccacgaccgtcctgtgtcagaagctcatgcaggtggtcccccaggagacatagccaggaggccgagtggctgccggaggagcatgcgcagaggccagttaaagtagatcacctcctcgaacccactccggttccccgcaacccacagctcagctgcccatcccagtcctcgccgtccctcccaggtcgggcagtggaggctgctgtgaaaactctggtacgaatctcatccctcaactgagggccagggacccaggtgtgcctgtgctcctgcccaggagcagcttttggtctccttgggccctttttcccttccctcctttgtttacttatatatatattttttttaaacttaaattttgggtcaacttgacaccactaagatgattttttaaggagctgggggaaggcaggagccttcctttctcctgccccaagggcccagaccctgggcaaacagagctactgagacttggaacctcattgctaccacagacttgcactgaagccagacagctgcccagacacatgggcttgtgacattcgtgaaaaccaaccctgtgggcttatgtctctgccttagggtttgcagagtggaaactcagccgtagggtggcactgggagggggtgggggatctgggcaaggtgggtgattcctcccaggaggtgcttgaggccccgatggactcctgaccataatcctagccccgagacaccatcctgagccagggaacagccccagggttggggggtgccggcatctcccctagctcaccaggcctggcctctgggcagtgtggcctcttggctatttctgttccagttttggaggctgagttctggttcatgcagacaaagccctgtccttcagtcttctagaaacagagacaagaaaggcagacacaccgcggccaggcacccatgtgggcgcccaccctgggctccacacagcagtgtcccctgccccagaggtcgcagctaccctcagcctccaatgcattggcctctgtaccgcccggcagccccttctggccggtgctgggttcccactcccggcctaggcacctccccgctctccctgtcacgctcatgtcctgtcctggtcctgatgcccgttgtctaggagacagagccaagcactgctcacgtctctgccgcctgcgtttggaggcccctgggctctcacccagtccccacccgcctgcagagagggaactagggcaccccttgtttctgttgttcccgtgaatttttttcgctatgggaggcagccgaggcctggccaatgcggcccactttcctgagctgtcgctgcctccatggcagcagccaaggacccccagaacaagaagacccccccgcaggatccctcctgagctcggggggctctgccttctcaggccccgggcttcccttctccccagccagaggtggagccaagtggtccagcgtcactccagtgctcagctgtggctggaggagctggcctgtggcacagccctgagtgtcccaagccgggagccaacgaagccggacacggcttcactgaccagcggctgctcaagccgcaagctctcagcaagtgcccagtggagcctgccgcccccacctgggcaccgggaccccctcaccatccagtgggcccggagaaacctgatgaacagtttggggactcaggaccagatgtccgtctctcttgcttgaggaatgaagacctttattcacccctgccccgttgcttcccgctgcacatggacagacttcacagcgtctgctcataggacctgcatccttcctggggacgaattccactcgtccaagggacagcccacggtctggaggccgaggaccaccagcaggcaggtggactgactgtgttgggcaagacctcttccctctgggcctgttctcttggctgcaaataaggacagcagctggtgccccacctgcctggtgcattgctgtgtgaatccaggaggcagtggacatcgtaggcagccacggccccaggtccaggagaagtgctccctggaggcacggaccactgcttcccactggggccggcggggcccacgcacgacgtcagcctcttaccttcccgcctcggctaggggtcctcgggatgccgttctgttccaacctcctgttctgggaggtggacatgcctcaaggatacagggagccggcggcctctcgacggcacgcacttcctgttggctgctgcggctgtgggcgagcatgggggctgccagcgtctgttgtggaaagtagctgctagtgaaatggctggggccgctggggtccgtcttcacactgcgcaggtctcttctgggcgtctgagctggggtgggagctcctccgcagaaggttggtggggggtccagtctgtgatccttggtgctgtgtgccccactccagcctggggaccccacttcagaaggtaggggccgtgtcccgcggtgctgactgaggcctgcttccccctccccctcctgctgtgctggaattccacagggaccagggccaccgcaggggactgtctcagaagacttgatttttccgtccctttttctccacactccactgacaaacgtccccagcggtttccacttgtgggcttcaggtgttttcaagcacaacccaccacaacaagcaagtgcattttcagtcgttgtgcttttttgttttgtgctaacgtcttactaatttaaagatgctgtcggcaccatgtttatttatttccagtggtcatgctcagccttgctgctctgcgtggcgcaggtgccatgcctgctccctgtctgtgtcccagccacgcagggccatccactgtgacgtcggccgaccaggctggacaccctctgccgagtaatgacgtgtgtggctgggaccttctttattctgtgttaatggctaacctgttacactgggctgggttgggtagggtgttctggcttttttgtggggtttttatttttaaagaaacactcaatcatcctag

SEQ ID NO: 357 - protein, 241 aa, Homo sapien
MINPYRNLPLAIIISLPIVTLVYVLTNLAYFTTLSTEQMLSSEAVAVDFGNYHLGVMSWIIPVFVGLSCFGSVNGSLFTSSRLFFVGSREGHLPSILSMIHPQLLTPVPSLVFTCVMTLLYAFSKDIFSVINFFSFFNWLCVALAIIGMIWLRHRKPELERPIKVNLALPVFFILACLFLIAVSFWKTPVECGIGFTIILSGLPVYFFGVWWKNKPKWLLQGIFSTTVLCQKLMQVVPQET

SEQ ID NO: 358 - DNA, 3176 bp, Homo sapien
tgaactgagcggcccctgagctgacagatacactgcgcagtggaacggcgagcgagccgacgggcgagtgaggggcgcacatgatcacctcggccgctggaattatttctcttctggatgaagatgaaccacagcttaaggaatttgcactacacaaattgaatgcagttgttaatgacttctgggcagaaatttccgagtccgtagacaaaatagaggttttatacgaagatgaaggtttccggagtcggcagtttgcagccttagtggcatctaaagtattttatcacctgggggcttttgaggagtctctgaattatgctcttggagcaagggacctcttcaatgtcaatgataactctgaatatgtggaaactattatagcaaaatgcattgatcactacaccaaacaatgtgtggaaaatgcagatttgcctgaaggagaaaaaaaaccaattgaccagagattggaaggcatcgtaaataaaatgttccagcgatgtctagatgatcacaagtataaacaggctattggcattgctctggagacacgaagactggacgtctttgaaaagaccatactggagtcgaatgatgtcccaggaatgttagcttatagccttaagctctgcatgtctttaatgcagaataaacagtttcggaataaagtactaagagttctagttaaaatctacatgaacttggagaaacctgatttcatcaatgtttgtcagtgcttaattttcttagatgatcctcaggctgtgagtgatatcttagagaaactggtaaaggaagacaacctcctgatggcatatcagatttgttttgatttgtatgaaagtgctagccagcagtttttgtcatctgtaatccagaatcttcgaactgttggcacccctattgcttctgtgcctggatccactaatacgggtactgttccgggatcagagaaagacagtgactcgatggaaacagaagaaaagacaagcagtgcatttgtaggaaagacaccagaagccagtccagagcctaaggaccagactttgaaaatgattaaaattttaagtggtgaaatggctattgagttacatctgcagttcttaatacgaaacaataatacagacctcatgattctaaaaaacacaaaggatgcagtacggaattctgtatgtcatactgcaaccgttatagcaaactcttttatgcactgtgggacaaccagtgaccagtttcttagagataatttggaatggttagccagagccactaactgggcaaaatttactgctacagccagtttgggtgtaattcataagggtcatgaaaaagaagcattacagttaatggcaacataccttcccaaggatacttctccaggatcagcctatcaggaaggtggaggtctctatgcactaggtcttattcatgccaatcatggtggtgatataattgactatctgcttaatcagcttaagaacgccagcaatgatatcgttagacacggtggcagtctgggccttggtttggcagccatgggaactgcacgtcaagatgtttatgatttgctaaaaacaaacctttatcaggatgatgcagtaacaggggaagcagctggcctggccctaggtttggttatgttgggctctaaaaatgctcaggctattgaggacatggttggttatgcacaagaaactcaacatgagaagattctgcgtggtcttgcagttggcatagctttagtaatgtatgggaggatggaagaggctgatgctctcattgaatctctctgtcgtgacaaggacccaattcttcgaaggtctggaatgtatactgtagccatggcttattgtggctctggtaacaacaaagcaattcgacgcctgctacatgtggctgtaagtgatgtgaatgatgatgtcaggagtgcagcagtagaatcacttgggttcattctattcagaacccctgaacagtgcccaagtgttgtctctttgttgtcagagagttacaaccctcatgtgcgctacggagctgcaatggccttggggatatgctgtgctggtacaggaaacaaggaagccattaatttgctagaaccaatgacaaacgaccccgtgaactacgtgaggcaaggggcactcatagcttcagctctcatcatgatccagcagactgaaatcacttgtccaaaggtgaatcagttcagacagctgtattccaaagtcatcaatgataagcatgatgatgtcatggccaagtttggcgctattctggcccagggcatactggatgcaggtggtcataatgtcacaatctccttgcagtccaggactgggcatactcatatgccttctgtggttggcgtccttgtatttacccagttttggttctggtttcctctttcacacttcctgtcattggcttatacccctacctgtgtcattggccttaacaaggacttaaagatgccgaaagttcagtataaatcgaactgtaaaccatccacatttgcatatcctgcccctctggaagtaccaaaagaaaaagaaaaggaaaaggtttctactgctgtattatctataactgccaaggctaaaaagaaggaaaaagaaaaggaaaaaaaggaggaggagaaaatggaagtggatgaggcagagaaaaaggaggaaaaagagaagaaaaaagaacctgagccaaacttccagttattggataacccagcccgagttatgcctgcccagcttaaggtcctaaccatgccggagacctgtagataccagcctttcaaaccactctctattggaggcatcatcattctgaaggataccagtgaagacattgaggagctggtggaacctgtggcagcacatggcccaaaaatcgaggaggaggaacaagagccagaacccccagaaccatttgagtatattgatgattaaggaccagaggatctcacttgcttatctgaagaagattgtccaggctcatattgggaatgcttatgaggaaattcatgccgagacctgctattcaatgcatgtatcgttgcctctgcactgacctgaagaaccctgtctccaagtctttggttgaagagaagatatatgactgttgagtgtgctctttcacagaacttggttttcaaataaatataagatctccagatggacaag

SEQ ID NO: 359 - protein, 953 aa, Homo sapien [sequence omitted]

SEQ ID NO: 360 - DNA, 1231 bp, Homo sapien
aggtctcagccggtcgtcgcgacgttcgcccgctcgctctgaggctcctgaagccgaaactagctagactttcctccttcccgcctgcctgtagcggcgttgttgccactccgccaccatgttcgaggcgcgcctggtccagggctccatcctcaagaaggtgttggaggcactcaaggacctcatcaacgaggcctgctgggatattagctccagcggtgtaaacctgcagagcatggactcgtcccacgtctctttggtgcagctcaccctgcggtctgagggcttcgacacctaccgctgcgaccgcaacctggccatgggcgtgaacctcaccagtatgtccaaaatactaaaatgcgccggcaatgaagatatcattacactaagggccgaagataacgcggataccttggcgctagtatttgaagcaccaaaccaggagaaagtttcagactatgaaatgaagttgatggatttagatgttgaacaacttggaattccagaacaggagtacagctgtgtagtaaagatgccttctggtgaatttgcacgtatatgccgagatctcagccatattggagatgctgttgtaatttcctgtgcaaaagacggagtgaaattttctgcaagtggagaacttggaaatggaaacattaaattgtcacagacaagtaatgtcgataaagaggaggaagctgttaccatagagatgaatgaaccagttcaactaacttttgcactgaggtacctgaacttctttacaaaagccactccactctcttcaacggtgacactcagtatgtctgcagatgtaccccttgttgtagagtataaaattgcggatatgggacacttaaaatactacttggctcccaagatcgaggatgaagaaggatcttaggcattcttaaaattcaagaaaataaaactaagctctttgagaactgcttctaagatgccagcatatactgaagtcttttctgtcaccaaatttgtacctctaagtacatatgtagatattgttttctgtaaataacctattttttttctctattctctccaatttgtttaaagaataaagtccaaagtctgatctggtctagttaacctagaagtatttttgtctcttagaaatacttgtgatttttataatacaaaagggtcttgactctaaatgcagttttaagaagtgtttttgaatttaaataaagttacttgaatttcaaac

SEQ ID NO: 361 - protein, 261 aa, Homo sapien
MFEARLVQGSILKKVLEALKDLINEACWDISSSGVNLQSMDSSHVSLVQLTLRSEGFDTYRCDRNLAMGVNLTSMSKILKCAGNEDIITLRAEDNADTLALVFEAPNQEKVSDYEMKLMDLDVEQLGIPEQEYSCVVKMPSGEFARICRDLSHIGDAVVISCAKDGVKFSASGELGNGNIKLSQTSNVDKEEEAVTIEMNEPVQLTFALRYLNFFTKATPLSSTVTLSMSADVPLVVEYKIADMGHLKYYLAPKIEDEEGS

SEQ ID NO: 362 - DNA, 2943 bp, Homo sapien
gagtcacgatgatggcggccaccatcctgtggtgagctagcggattccctgcttgtctcgccgaccccctcgcgccttctgcagactccgtggctggcgctcggcgcgtgaggaagcacggcggcccgagttcgcggggaaggccgcagtcgcggaggcagcggcgcggtccggggcacgggctgggggagaggccgctccgctgggcgaatgtgacaagcccccacccccaccgccttcctccccagagcgcgaggagcgcgggcgaccccggggccccgccaggccacagaccccgcccagcggccagcacccggcgcaggcccggcagccgagctgcgcggcggcaccatgcaggtcaccctgaagaccctccagcagcagaccttcaagatagacattgaccccgaggagacggtgaaagcactgaaagagaagattgaatctgaaaaggggaaagatgcctttccagtagcaggtcaaaaattaatttatgcaggcaaaatcctcaatgatgatactgctctcaaagaatataaaattgatgagaaaaactttgtggtggttatggtgaccaaacccaaagcagtgtccacaccagcaccagctacaactcagcagtcagctcctgccagcactacagcagttacttcctccaccaccacaactgtggctcaggctccaacccctgtccctgccttggcccccacttccacacctgcatccatcactccagcatcagcgacagcatcttctgaacctgcacctgctagtgcagctaaacaagagaagcctgcagaaaagccagcagagacaccagtggctactagcccaacagcaactgacagtacatcgggtgattcttctcggtcaaacctttttgaagatgcaacgagtgcacttgtgacgggtcagtcttacgagaatatggtaactgagatcatgtcaatgggctatgaacgagagcaagtaattgcagccctgagagccagtttcaacaaccctgacagagcagtggagtatcttttaatgggaatccctggagatagagaaagtcaggctgtggttgacccccctcaagcagctagtactggggctcctcagtcttcagcagtggctgcagctgcagcaactacgacagcaacaactacaacaacaagttctggaggacatccccttgaatttttacggaatcagcctcagtttcaacagatgagacaaattattcagcagaatccttccttgcttccagcgttactacagcagataggtcgagagaatcctcaattacttcagcaaattagccaacaccaggagcattttattcagatgttaaatgaaccagttcaagaagctggtggtcaaggaggaggaggtggaggtggcagtggaggaattgcagaagctggaagtggtcatatgaactacattcaagtaacacctcaggaaaaagaagctatagaaaggttaaaggcattaggatttcctgaaggacttgtgatacaagcgtattttgcttgtgagaagaatgagaatttggctgccaattttcttctacagcagaactttgatgaagattgaaagggacttttttatatctcacacttcacaccagtgcattacactaacttgttcactggattgtctgggatgacttgggctcatatccacaatacttggtataaggtagtagattgttgggggtggggagggagggatctaggatacagggcagggataaatacagtgcatgtctgcttcaattagcagatgccgcaactccacacagtgtgtaaaatatatacaaccaaaaatcagcttttgcaggtctttatttcttctgtaaaacagtaggtaacttttcctaggtttcactctttttagtgtactagatccagaaacttagtgtaatgccctgctttatatttctttgacttaacattggtttcagaaagaatcttagctacctagaatttacagtctctgtttcatggcaacactggataatggctttgtgaaatttaaaaaatttttgtagcgactgtaaacagaaatgccaaattgatggttaattgttgctgcttcaaaaataagtataaaattaatatgtaaggaagcccattctttcatgttaaatacttggggtgggaggggagaaagggaaccttttcttaaaatgaaaataattactgctattttaaaatttcttgatcattgaatgtgagacccttctaacatgatttgagaagctgtacaagtataggcagagttattttcctgtttacattttttttttgttttggggaaaaaattggtaggtgtctaattactgtttacttcattgttatattgcagtaaaagttttaaaacaaccattgcatgtttgcttttgatgtatccctttgtgaaattagcacttttggggccaatggagaaatgcagcattcactctccctgtcttttccccttccctcagcagaaacgtgtttatcagcaagtcgtgagtcaaactgctgccttttaaaaaacccacaaaatgctgattcagttcaaaattaatgcaaatgtttcaaaactgggtttctgatatttgtaaatgtgtttctttattagataagagtgtattaccattaaagtcattagtataatattgctttcaaaaagaaatggtagacaaaactataatccagcatcttttattgcattggaaagactggcaaagtcttttggatgggttgggagatgtggctggaaagtactttggaaaatatacaatcaagatatctcatggcatattaaaagaaaaatcttaatagcagtgttggcttttatttggattttttcatctcagttttttctgtggaatctccttcattggcattgttatttaatcataaacggggcagatgtctacttgttcagtttttcaaatctgttttcctg

SEQ ID NO: 363 - protein, 409 aa, Homo sapien
MQVTLKTLQQQTFKIDIDPEETVKALKEKIESEKGKDAFPVAGQKLIYAGKILNDDTALKEYKIDEKNFVVVMVTKPKAVSTPAPATTQQSAPASTTAVTSSTTTTVAQAPTPVPALAPTSTPASITPASATASSEPAPASAAKQEKPAEKPAETPVATSPTATDSTSGDSSRSNLFEDATSALVTGQSYENMVTEIMSMGYEREQVIAALRASFNNPDRAVEYLLMGIPGDRESQAVVDPPQAASTGAPQSSAVAAAAATTTATTTTTSSGGHPLEFLRNQPQFQQMRQIIQQNPSLLPALLQQIGRENPQLLQQISQHQEHFIQMLNEPVQEAGGQGGGGGGGSGGIAEAGSGHMNYIQVTPQEKEAIERLKALGFPEGLVIQAYFACEKNENLAANFLLQQNFDED

SEQ ID NO: 364 - DNA, 1812 bp, Homo sapien
tagctaggcaggaagtcggcgcgggcggcgcggacagtatctgtgggtacccggagcacggagatctcgccggctttacgttcacctcggtgtctgcagcaccctccgcttcctctcctaggcgacgagacccagtggctagaagttcaccatgtctattctcaagatccatgccagggagatctttgactctcgcgggaatcccactgttgaggttgatctcttcacctcaaaaggtctcttcagagctgctgtgcccagtggtgcttcaactggtatctatgaggccctagagctccgggacaatgataagactcgctatatggggaagggtgtctcaaaggctgttgagcacatcaataaaactattgcgcctgccctggttagcaagaaactgaacgtcacagaacaagagaagattgacaaactgatgatcgagatggatggaacagaaaataaatctaagtttggtgcgaacgccattctgggggtgtcccttgccgtctgcaaagctggtgccgttgagaagggggtccccctgtaccgccacatcgctgacttggctggcaactctgaagtcatcctgccagtcccggcgttcaatgtcatcaatggcggttctcatgctggcaacaagctggccatgcaggagttcatgatcctcccagtcggtgcagcaaacttcagggaagccatgcgcattggagcagaggtttaccacaacctgaagaatgtcatcaaggagaaatatgggaaagatgccaccaatgtgggggatgaaggcgggtttgctcccaacatcctggagaataaagaaggcctggagctgctgaagactgctattgggaaagctggctacactgataaggtggtcatcggcatggacgtagcggcctccgagttcttcaggtctgggaagtatgacctggacttcaagtctcccgatgaccccagcaggtacatctcgcctgaccagctggctgacctgtacaagtccttcatcaaggactacccagtggtgtctatcgaagatccctttgaccaggatgactggggagcttggcagaagttcacagccagtgcaggaatccaggtagtgggggatgatctcacagtgaccaacccaaagaggatcgccaaggccgtgaacgagaagtcctgcaactgcctcctgctcaaagtcaaccagattggctccgtgaccgagtctcttcaggcgtgcaagctggcccaggccaatggttggggcgtcatggtgtctcatcgttcgggggagactgaagataccttcatcgctgacctggttgtggggctgtgcactgggcagatcaagactggtgccccttgccgatctgagcgcttggccaagtacaaccagctcctcagaattgaagaggagctgggcagcaaggctaagtttgccggcaggaacttcagaaaccccttggccaagtaagctgtgggcaggcaagcccttcggtcacctgttggctacacagacccctcccctcgtgtcagctcaggcagctcgaggcccccgaccaacacttgcaggggtccctgctagttagcgccccaccgccgtggagttcgtaccgcttccttagaacttctacagaagccaagctccctggagccctgttggcagctctagctttgcagtcgtgtaattggcccaagtcattgtttttctcgcctcactttccaccaagtgtctagagtcatgtgagcctcgtgtcatctccggggtggccacaggctagatccccggtggttttgtgctcaaaataaaaagcctcagtgacccatgag

SEQ ID NO: 365 - protein, 434 aa, Homo sapien
MSILKIHAREIFDSRGNPTVEVDLFTSKGLFRAAVPSGASTGIYEALELRDNDKTRYMGKGVSKAVEHINKTIAPALVSKKLNVTEQEKIDKLMIEMDGTENKSKFGANAILGVSLAVCKAGAVEKGVPLYRHIADLAGNSEVILPVPAFNVINGGSHAGNKLAMQEFMILPVGAANFREAMRIGAEVYHNLKNVIKEKYGKDATNVGDEGGFAPNILENKEGLELLKTAIGKAGYTDKVVIGMDVAASEFFRSGKYDLDFKSPDDPSRYISPDQLADLYKSFIKDYPVVSIEDPFDQDDWGAWQKFTASAGIQVVGDDLTVTNPKRIAKAVNEKSCNCLLLKVNQIGSVTESLQACKLAQANGWGVMVSHRSGETEDTFIADLVVGLCTGQIKTGAPCRSERLAKYNQLLRIEEELGSKAKFAGRNFRNPLAK

SEQ ID NO: 366 - DNA, 2287 bp, Homo sapien
ggctgaggcagtggctccttgcacagcagctgcacgcgccgtggctccggatcttcttcgtctttgcagcgtagcccgagtcggtcagcgccagaggacctcagcagccatgtcgaagccccatagtgaagccgggactgccttcattcagacccagcagctgcacgcagccatggctgacacattcctggagcacatgtgccgcctggacattgattcaccacccatcacagcccggaacactggcatcatctgtaccattggcccagcttcccgatcagtggagacgttgaaggagatgattaagtctggaatgaatgtggctcgtctgaacttctctcatggaactcatgagtaccatgcggagaccatcaagaatgtgcgcacagccacggaaagctttgcttctgaccccatcctctaccggcccgttgctgtggctctagacactaaaggacctgagatccgaactgggctcatcaagggcagcggcactgcagaggtggagctgaagaagggagccactctcaaaatcacgctggataacgcctacatggaaaagtgtgacgagaacatcctgtggctggactacaagaacatctgcaaggtggtggaagtgggcagcaagatctacgtggatgatgggcttatttctctccaggtgaagcagaaaggtgccgacttcctggtgacggaggtggaaaatggtggctccttgggcagcaagaagggtgtgaaccttcctggggctgctgtggacttgcctgctgtgtcggagaaggacatccaggatctgaagtttggggtcgagcaggatgttgatatggtgtttgcgtcattcatccgcaaggcatctgatgtccatgaagttaggaaggtcctgggagagaagggaaagaacatcaagattatcagcaaaatcgagaatcatgagggggttcggaggtttgatgaaatcctggaggccagtgatgggatcatggtggctcgtggtgatctaggcattgagattcctgcagagaaggtcttccttgctcagaagatgatgattggacggtgcaaccgagctgggaagcctgtcatctgtgctactcagatgctggagagcatgatcaagaagccccgccccactcgggctgaaggcagtgatgtggccaatgcagtcctggatggagccgactgcatcatgctgtctggagaaacagccaaaggggactatcctctggaggctgtgcgcatgcagaacctgattgcccgtgaggcagaggctgccatctaccacttgcaattatttgaggaactccgccgcctggcgcccattaccagcgaccccacagaagccaccgccgtgggtgccgtggaggcctccttcaagtgctgcagtggggccataatcgtcctcaccaagtctggcaggtctgctcaccaggtggccagataccgcccacgtgcccccatcattgctgtgacccggaatccccagacagctcgtcaggcccacctgtaccgtggcatcttccctgtgctgtgcaaggacccagtccaggaggcctgggctgaggacgtggacctccgggtgaactttgccatgaatgttggcaaggcccgaggcttcttcaagaagggagatgtggtcattgtgctgaccggatggcgccctggctccggcttcaccaacaccatgcgtgttgttcctgtgccgtgatggaccccagagcccctcctccagcccctgtcccacccccttcccccagcccatccattaggccagcaacgcttgtagaactcactctgggctgtaacgtggcactggtaggttgggacaccagggaagaagatcaacgcctcactgaaacatggctgtgtttgcagcctgctctagtgggacagcccagagcctggctgccccatcatgtggccccacccaatcaagggaagaaggaggaatgctggactggaggcccctggagccagatggcaagagggtgacagcttcctttcctgtgtgtactctgtccagttcctttagaaaaaatggatgcccagaggactcccaaccctggcttggggtcaagaaacagccagcaagagttaggggccttagggcactgggctgttgttccattgaagccgactctggccctggcccttacttgcttctctagctctctaggcctctccagtttgcacctgtccccaccctccactcagctgtcctgcagcaaacactccaccctccaccttccattttcccccactactgcagcacctccaggcctgttgccgc

SEQ ID NO: 367 - protein, 531 aa, Homo sapien
MSKPHSEAGTAFIQTQQLHAAMADTFLEHMCRLDIDSPPITARNTGIICTIGPASRSVETLKEMIKSGMNVARLNFSHGTHEYHAETIKNVRTATESFASDPILYRPVAVALDTKGPEIRTGLIKGSGTAEVELKKGATLKITLDNAYMEKCDENILWLDYKNICKVVEVGSKIYVDDGLISLQVKQKGADFLVTEVENGGSLGSKKGVNLPGAAVDLPAVSEKDIQDLKFGVEQDVDMVFASFIRKASDVHEVRKVLGEKGKNIKIISKIENHEGVRRFDEILEASDGIMVARGDLGIEIPAEKVFLAQKMMIGRCNRAGKPVICATQMLESMIKKPRPTRAEGSDVANAVLDGADCIMLSGETAKGDYPLEAVRMQNLIAREAEAAIYHLQLFEELRRLAPITSDPTEATAVGAVEASFKCCSGAIIVLTKSGRSAHQVARYRPRAPIIAVTRNPQTARQAHLYRGIFPVLCKDPVQEAWAEDVDLRVNFAMNVGKARGFFKKGDVVIVLTGWRPGSGFTNTMRVVPVP

SEQ ID NO: 368 - DNA, 1425 bp, Homo sapien
ggcttggtcactatggaggagataggcatcttggtggagaaggctcaggatgagatcccagcactgtccgtgtcccggccccagaccggcctgtccttcctgggccctgagcctgaggacctggaggacctgtacagccgctacaagaagctgcagcaagagctggagttcctggaggtgcaggaggaatacatcaaagatgagcaaaagaacctgaaaaaggaatttctccatgcccaggaggaggtgaagcgaatccaaagcatcccgctggtcatcggacaatttctggaggctgtggatcagaatacagccatcgtgggctctaccacaggctccaactattatgtgcgcatcctgagcaccatcgatcgggagctgctcaagcccaacgcctcagtggccctccacaagcacagcaatgcactggtggacgtgctgccccccgaagccgacagcagcatcatgatgctcacctcagaccagaagccagatgtgatgtacgcggacatcggaggcatggacatccagaagcaggaggtgcgggaggccgtggagctcccgctcacgcatttcgagctctacaagcagatcggcatcgatcccccccgaggcgtcctcatgtatggcccacctggctgtgggaagaccatgttggcaaaggcggtggcacatcacacaacagctgcattcatccgggtcgtgggctcggagtttgtacagaagtatctgggtgagggcccccgcatggtccgggatgtgttccgcctggccaaggagaatgcacctgccatcatcttcatagacgagattgatgccatcgccaccaagagattcgatgctcagacaggggccgacagggaggttcagaggatcctgctggagctgctgaatcagatggatggatttgatcagaatgtcaatgtcaaggtaatcatggccacaaacagagcagacaccctggatccggccctgctacggccaggacggctggaccgtaaaattgaatttccacttcctgaccgccgccagaagagattgattttctccactatcactagcaagatgaacctctctgaggaggttgacttggaagactatgtggcccggccagataagatttcaggagctgatatcaactccatctgtcaggagagtggaatgttggctgtccgtgaaaaccgctacattgtcctggccaaggacttcgagaaagcatacaagactgtcatcaagaaggacgagcaggagcatgagttttacaagtgacccttcccttccctccaccacaccactcaggggctggggcttctctcgcacccccagcacctctgtcccaaaacctcattcccttttttctttacccaggattggtttcttcaataaatagataagatcgaatccaaaaaaaaaaaaaaaaaaaaa

SEQ ID NO: 369 - protein, 418 aa, Homo sapien
MEEIGILVEKAQDEIPALSVSRPQTGLSFLGPEPEDLEDLYSRYKKLQQELEFLEVQEEYIKDEQKNLKKEFLHAQEEVKRIQSIPLVIGQFLEAVDQNTAIVGSTTGSNYYVRILSTIDRELLKPNASVALHKHSNALVDVLPPEADSSIMMLTSDQKPDVMYADIGGMDIQKQEVREAVELPLTHFELYKQIGIDPPRGVLMYGPPGCGKTMLAKAVAHHTTAAFIRVVGSEFVQKYLGEGPRMVRDVFRLAKENAPAIIFIDEIDAIATKRFDAQTGADREVQRILLELLNQMDGFDQNVNVKVIMATNRADTLDPALLRPGRLDRKIEFPLPDRRQKRLIFSTITSKMNLSEEVDLEDYVARPDKISGADINSICQESGMLAVRENRYIVLAKDFEKAYKTVIKKDEQEHEFYK

SEQ ID NO: 370 - DNA, 2644 bp, Homo sapien
ccgaggccaagtcccgggcgctagcccacctcccacccgcctcttggctcctctcctctaggccgtcgctttcgggttctctcatcgcttcgtcgttcgccaatgtttgaggagaaggccagcagtccttcagggaagatgggaggcgaggagaagccgattggtgctggtgaagagaagcaaaaggaaggaggcaaaaagaagaacaaagaaggatctggagatggaggtcgagctgagttgaatccttggcctgaatatatttacacacgtcttgagatgtataatatactaaaagcagaacatgattccattctggcagaaaaggcagaaaaagatagcaagccaattaaagtcactttgcctgatggtaaacaggttgatgcggaatcttggaaaactacaccatatcaaattgcctgtggaattagtcaaggcctggccgacaacaccgttattgctaaagtaaataatgttgtgtgggacctggaccgccctctggaagaagattgtaccttggagcttctcaagtttgaggatgaggaagctcaggcagtgtattggcactctagtgctcacataatgggtgaaggcatggaaagagtctatggtggatgtttatgctacggtccgccaatagaaaatggattctattatgacatgtacctcgaagaagggggtgtgtctagcaatgatttctcttctctggaggctttgtgtaagaaaatcattaaagaaaaacaagcttttgaaagactggaagttaagaaagaaactttactggcaatgtttaagtacaacaagttcaaatgccggatattgaatgaaaaggtgaatactccaactaccacagtctatagatgtggccctttgatagatctctgccggggtcctcatgttagacacacgggcaaaattaaggctttaaaaatacacaaaaattcctccacgtactgggaaggcaaagcagatatggagactctccagagaatttatggcatttcattcccagatcctaaaatgttgaaagagtgggagaagttccaagaggaagctaaaaaccgagatcataggaaaattggcagggaccaagaactatatttctttcatgaactcagccctggaagttgcttttttctgccaaaaggagtctatatttataatgcacttattgaattcattaggagcgaatataggaaaagaggattccaggaggtagtcaccccaaacatcttcaacagccgactctggatgacctcgggccactggcagcactacagcgagaacatgttctcctttgaggtggagaaggagctgtttgccctgaaacccatgaactgcccaggacactcccttatgtttgatcatcggccaaggtcctggcgagaactgcctctgcggctagctgattttgggggtcttcataggaacgagctgtctggagcactcacaggactcacccgggtacgaagattccaacaggatgatgctcacatattctgtgccatggagcagattgaagatgaaataaaaggttgtttggattttctacgtacggtatatagcgtatttggattttcttttaaactaaacctttctactcgcccggaaaaattccttggagatatcgaagtatgggatcaagctgagaaacaacttgaaaacagtctgaatgaatttggtgaaaagtgggagttaaactctggagatggagctttctatggcccaaagattgacatacagattaaagatgcgattgggcggtaccaccagtgtgcaaccatccagctggatttccagttgcccatcagatttaatcttacttatgtaagccatgatggtgaggataagaaaaggccagtgattgttcatcgagccatcttgggatcagtggaaagaatgattgctatcctcacagaaaactatgggggcaaattggcccccttttggctgtcccctcgccaggtaatggtagttccagtgggaccaacctgtgatgaatatgcccaaaacgtacgacaacaattccacgatgccaaattcatggcagacattgatctggatccaggctgtacattgaataaaaagattcgaaatgcacagttagcacagtataacttcattttagttgttggtgaaaaagagaaaatcactggcactgttaatatccgcacaagagacaataaggtccacggggaacgcaccatttctgaaactatcgagcggctacagcagctcaaagagttccgcagcaaacaggcagaagaagaattttaatgaaaaaattacccagattggctccatggaaaaggaggaacagcgtttccgtaaaattgactttgtactcgaaaacgtcaatttatattgaacttggaggaggagtttggcaaagtctgaaataggtcaacctgcaggcgtaactatttttgacctagtcagtttttaaacaatgtgcatttgaaggagttaattaaaagagagccaataaaatgattttactcattcagtatctgagtactggaagtgaaacatgaggaatgctttagtgtaatgtgggagaacttttttgtaaatttaatgcaattgaaaaagttttcaaattcaattaagataactagaattggttatggtgtaacccgaattc

SEQ ID NO: 371 - protein, 712 aa, Homo sapien
MGGEEKPIGAGEEKQKEGGKKKNKEGSGDGGRAELNPWPEYIYTRLEMYNILKAEHDSILAEKAEKDSKPIKVTLPDGKQVDAESWKTTPYQIACGISQGLADNTVIAKVNNVVWDLDRPLEEDCTLELLKFEDEEAQAVYWHSSAHIMGEGMERVYGGCLCYGPPIENGFYYDMYLEEGGVSSNDFSSLEALCKKIIKEKQAFERLEVKKETLLAMFKYNKFKCRILNEKVNTPTTTVYRCGPLIDLCRGPHVRHTGKIKALKIHKNSSTYWEGKADMETLQRIYGISFPDPKMLKEWEKFQEEAKNRDHRKIGRDQELYFFHELSPGSCFFLPKGVYIYNALIEFIRSEYRKRGFQEVVTPNIFNSRLWMTSGHWQHYSENMFSFEVEKELFALKPMNCPGHSLMFDHRPRSWRELPLRLADFGGLHRNELSGALTGLTRVRRFQQDDAHIFCAMEQIEDEIKGCLDFLRTVYSVFGFSFKLNLSTRPEKFLGDIEVWDQAEKQLENSLNEFGEKWELNSGDGAFYGPKIDIQIKDAIGRYHQCATIQLDFQLPIRFNLTYVSHDGEDKKRPVIVHRAILGSVERMIAILTENYGGKLAPFWLSPRQVMVVPVGPTCDEYAQNVRQQFHDAKFMADIDLDPGCTLNKKIRNAQLAQYNFILVVGEKEKITGTVNIRTRDNKVHGERTISETIERLQQLKEFRSKQAEEEF

SEQ ID NO: 372 - DNA, 3826 bp, Homo sapien
gaattcgggtggagtcctgaaggagggcctgatgtcttcatcattctcaaattcttgtaagctctgcgtcgggtgaaaccagacaaagccgcgagcccagggatgggagcacgcgggggacggcctgccggcggggacgacagcattgcgcctgggtgcagcagtgtgcgtctcggggaagggaagatattttaaggcgtgtctgagcagacggggaggcttttccaaacccaggcagcttcgtggcgtgtgcggtttcgacccggtcacacaaagcttcagcatgtcatgtgaggacggtcgggccctgaaaggaacgctctcggaattggccgcggaaaccgatctgcccgttgtgtttgtgaaacagagaaagataggcggccatggtccaaccttgaaggcttatcaggagggcagacttcaaaagctactaaaaatgaacggccctgaagatcttcccaagtcctatgactatgaccttatcatcattggaggtggctcaggaggtctggcagctgctaaggaggcagcccaatatggcaagaaggtgatggtcctggactttgtcactcccacccctcttggaactagatggggtcttggaggaacatgtgtgaatgtgggttgcatacctaaaaaactgatgcatcaagcagctttgttaggacaagccctgcaagactctcgaaattatggatggaaagtcgaggagacagttaagcatgattgggacagaatgatagaagctgtacagaatcacattggctctttgaattggggctaccgagtagctctgcgggagaaaaaagtcgtctatgagaatgcttatgggcaatttattggtcctcacaggattaaggcaacaaataataaaggcaaagaaaaaatttattcagcagagagttttctcattgccactggtgaaagaccacgttacttgggcatccctggtgacaaagaatactgcatcagcagtgatgatcttttctccttgccttactgcccgggtaagaccctggttgttggagcatcctatgtcgctttggagtgcgctggatttcttgctggtattggtttaggcgtcactgttatggttaggtccattcttcttagaggatttgaccaggacatggccaacaaaattggtgaacacatggaagaacatggcatcaagtttataagacagttcgtaccaattaaagttgaacaaattgaagcagggacaccaggccgactcagagtagtagctcagtccaccaatagtgaggaaatcattgaaggagaatataatacggtgatgctggcaataggaagagatgcttgcacaagaaaaattggcttagaaaccgtaggggtgaagataaatgaaaagactggaaaaatacctgtcacagatgaagaacagaccaatgtgccttacatctatgccattggcgatatattggaggataaggtggagctcaccccagttgcaatccaggcaggaagattgctggctcagaggctctatgcaggttccactgtcaagtgtgactatgaaaatgttccaaccactgtatttactcctttggaatatggtgcttgtggcctttctgaggagaaagctgtggagaagtttggggaagaaaatattgaggtttaccatagttacttttggccattggaatggacgattccgtcaagagataacaacaaatgttatgcaaaaataatctgtaatactaaagacaatgaacgtgttgtgggctttcacgtactgggtccaaatgctggagaagttacacaaggctttgcagctgcgctcaaatgtggactgaccaaaaagcagctggacagcacaattggaatccaccctgtctgtgcagaggtattcacaacattgtctgtgaccaagcgctctggggcaagcatcctccaggctggctgctgaggttaagccccagtgtggatgctgttgccaagactgcaaaccactggctcgtttccgtgcccaaatccaaggcgaagttttctagagggttcttgggctcttggcacctgcgtgtcctgtgcttaccaccgcccaaggcccccttggatctcttggataggagttggtgaatagaaggcaggcagcatcacactggggtcactgacagacttgaagctgacatttggcagggcatcgaagggatgcatccatgaagtcaccagtctcaagcccatgtggtaggcggtgatggaacaactgtcaaatcagttttagcatgacctttccttgtggattttcttattctcgttgtcaagttttctagggttgaatttttttcttttttctccatggtgttaatgatattagagatgaaaaacgttagcagttgatttttgtccaaaagcaagtcatggctagagtatccatgcaaggtgtcttgttgcatggaagggatagtttggctcccttggaggctatgtaggcttgtcccgggaaagagaactgtcctgcagctgaaatggactgttctttactgacctgctcagcagtttcttctctcatatattcccaaaacaagtacatctgcgatcaactctagccaaatttgcccctgtgtgctacatgatggatgattattattttaaggtctgtttaggaagggaaatggctacttggccagccattgcctggcatttggtagtatagtatgattctcaccattatttgtcatggaggcagacatacaccagaaatgggggagaaacagtacatatctttctgtctttagtttattgtgtgctggtctaagcaagctgagatcatttgcaatggaaaacacgtaacttgtttaaaagtttttctggtagctttagctttatgctaaaaaaaataatgacattgggtatctatttctttctaagacatacattagtaggaaaataagtcttttcatgcttatgatttagctgttttgtggtaattgctttttaaaggaagttattaatatcataagttattattaatattttgaacacaggtggatgtgaaggattttcatttaaaaaccaagtggttttgactttttctgttgaatgaacaactgtgccttgtggaatttttgcagaagtgtttatgctttgttagcatttcaacttgcattattataaagaggtattaatgcctcagttatgtgtttgtcaatgtactggctgaggattctatctcagctgtcttttctaactgtgtaggttgagttttgaacacgtgcttgtggacatcagcctcctgccagcagttcttgaagcttctttttcattcctgctactctacctgtatttctcagttgcagcactgagtggtcaaaatacatttctgggccacctcagggaacccatgcatctgcctggcatttaggcagcagagcccctgaccgtcccccacaggctctgcctcacgtcctcatctcatttggctgtgtaaagaaatgggaaaagggaaaaggagagagcaattgaggcagttgaccatattcagttttatttatttatttttaatttgtttttttctccaagtccaccagtctctgaaattagaacagtaggcggtatgagataatcaggcctaatcatgttgtgattctcttttcttagtggagtggaatgttctatccccacaagaaggattatatcttatagacttgtcttgttcagattctgtatttacccattttattgaaacatatactaagttccatgtatttttgttacaaatcttctgaaaaaaaacaaaacaatgtgaaacattaaaattaaaaggcattaataataaaaaaaaaaaaaaaaacccgaattc

SEQ ID NO: 373 - protein, 497 aa, Homo sapien [sequence omitted]

SEQ ID NO: 374 - DNA, 1023 bp, Homo sapien
gttggctgccggtgagttgggtgccggtggagtcgtgttggtcctcagaatccccgcgtagccgctgcctcctcctaccctcgccatgtttcttacccggtctgagtacgacaggggcgtgaatactttttctcccgaaggaagattatttcaagtggaatatgccattgaggctatcaagcttggttctacagccattgggatccagacatcagagggtgtgtgcctagctgtggagaagagaattacttccccactgatggagcccagcagcattgagaaaattgtagagattgatgctcacataggttgtgccatgagtgggctaattgctgatgctaagactttaattgataaagccagagtggagacacagaaccactggttcacctacaatgagacaatgacagtggagagtgtgacccaagctgtgtccaatctggctttgcagtttggagaagaagatgcagatccaggtgccatgtctcgtccctttggagtagcattattatttggaggagttgatgagaaaggaccccagctgtttcatatggacccatctgggacctttgtacagtgtgatgctcgagcaattggctctgcttcagagggtgcccagagctccttgcaagaagtttaccacaagtctatgactttgaaagaagccatcaagtcttcactcatcatcctcaaacaagtaatggaggagaagctgaatgcaacaaacattgagctagccacagtgcagcctggccagaatttccacatgttcacaaaggaagaacttgaagaggttatcaaggacatttaaggaatcctgatcctcagaacttctctgggacaatttcagttctaataatgtccttaaattttatttccagctcctgttccttggaaaatctccattgtatgtgcattttttaaatgatgtctgtacataaaggcagttctgaaataaagaaaattttaaaataaaaaaaaaaaaaaaaaaaaaaaaaaaaaaaaaaaaaaaaaaaaaaaaaa

SEQ ID NO: 375 - protein, 241 aa, Homo sapien [sequence omitted]

SEQ ID NO: 376 - DNA, 1430 bp, Homo sapien
aggtgagagaggatgtgtgctgggccttggaggaagggggccgagaccgggccttacttctgtaacgatactgtgaggcatcggaaggccagcctgttgtgtccgttttgaaggatgcccctgtcccgctggttgagatctgtgggggtcttcctgctgccagccccctactgggcaccccgggagaggtggctgggttccctacggcggccctccctggtgcacgggtacccagtcctggcctggcacagtgcccgctgctggtgccaagcgtggacagaggaacctcgagccctttgctcctccctcagaatgaacggagaccagaattcagatgtttatgcccaagaaaagcaggatttcgttcagcacttctcccagatcgttagggtgctgactgaggatgagatggggcacccagagataggagatgctattgcccggctcaaggaggtcctggagtacaatgccattggaggcaagtataaccggggtttgacggtggtagtagcattccgggagctggtggagccaaggaaacaggatgctgatagtctccagcgggcctggactgtgggctggtgtgtggaactgctgcaagctttcttcctggtggcagatgacatcatggattcatcccttacccgccggggacagatctgctggtatcagaagccgggcgtgggtttggatgccatcaatgatgctaacctcctggaagcatgtatctaccgcctgctgaagctctattgccgggagcagccctattacctgaacctgatcgagctcttcctgcagagttcctatcagactgagattgggcagaccctggacctcctcacagccccccagggcaatgtggatcttgtcagattcactgaaaagaggtacaaatctattgtcaagtacaagacagctttctactccttctaccttcctatagctgcagccatgtacatggcaggaattgatggcgagaaggagcacgccaatgccaagaagatcctgctggagatgggggagttctttcagattcaggatgattaccttgacctctttggggaccccagtgtgaccggcaaaattggcactgacatccaggacaacaaatgcagctggctggtggttcagtgtctgcaacgggccactccagaacagtaccagatcctgaaggaaaattacgggcagaaggaggctgagaaagtggcccgggtgaaggcgctatatgaggagctggatctgccagcagtgttcttgcaatatgaggaagacagttacagccacattatggctctcattgaacagtacgcagcacccctgcccccagccgtctttctggggcttgcgcgcaaaatctacaagcggagaaagtgacctagagattgcaagggcggggagaggaggctctcaataaataatcgtgtaacctt

SEQ ID NO: 377 - protein, 419 aa, Homo sapien
MPLSRWLRSVGVFLLPAPYWAPRERWLGSLRRPSLVHGYPVLAWHSARCWCQAWTEEPRALCSSLRMNGDQNSDVYAQEKQDFVQHFSQIVRVLTEDEMGHPEIGDAIARLKEVLEYNAIGGKYNRGLTVVVAFRELVEPRKQDADSLQRAWTVGWCVELLQAFFLVADDIMDSSLTRRGQICWYQKPGVGLDAINDANLLEACIYRLLKLYCREQPYYLNLIELFLQSSYQTEIGQTLDLLTAPQGNVDLVRFTEKRYKSIVKYKTAFYSFYLPIAAAMYMAGIDGEKEHANAKKILLEMGEFFQIQDDYLDLFGDPSVTGKIGTDIQDNKCSWLVVQCLQRATPEQYQILKENYGQKEAEKVARVKALYEELDLPAVFLQYEEDSYSHIMALIEQYAAPLPPAVFLGLARKIYKRRK

SEQ ID NO: 378 - DNA, 1793 bp, Homo sapien
ggcaccgcgcgggacggagcttggctgttggtcggtgggttcccgtgcggcggcggccaaggaggaggagacacagttggagcagctccgtgggctgactggggcgaggcctcagcagcgcgagcttgagtgcggccgagcctgcggcgccttcccctgcgggtggggacgagcgggccccgcggcgtcatcggcggcgaggagccgccgcgcctcggcctagcatgtcggaagcgggcgaggagcagcccatggagacgacgggcgccaccgagaacggacatgaggccgtccccgaagcgagtcgcggccggggctggacgggcgccgcggcggggctggaggcgcgaccgccgcgcccccgagcgggaatcagaacggcgccgagggaccagatcaacgccagcaagaacgaggaggacgcgggaaaaatgttcgttggtggcctgagctgggatactagcaaaaaagatttaaaagactattttactaaatttggagaggtcgttgactgtacaataaaaatggatcccaacactggacggtcaagagggtttgggtttatcctgttcaaagatgcagccagtgtggagaaggtcctagaccagaaggagcacaggctggatggccgtgtcattgaccctaaaaaggccatggctatgaagaaggacccggtcaagaaaatcttcgttgggggtctgaatcctgaaagtcccactgaggaaaagatcagggagtactttggcgagtttggggagattgaggccattgaattgccaatggatccaaagttgaacaaaagacgaggttttgtgtttatcacctttaaagaagaagaacccgtgaagaaggttctggagaaaaagttccatactgtcagtggaagcaagtgtgagatcaaggtggcccagcccaaagaagtctatcagcagcagcagtatggctctgggggccgtggaaaccgcaaccgagggaaccgaggcagcggaggtggtggtggaggtggaggtcagagtcagagttggaatcagggctacggcaactactggaaccagggctacggctaccagcagggctacgggcctggctatggcggctacgactactcgccctatggctattacggctacggccccggctacgactacagtcagggtagtacaaactacggcaagagccagcgacgtggtggccatcagaataactacaagccatactgaggcggccaagggagcgaccaactgatcgcacacatgctttgtttggatatggagtgaacacaattatgtaccaaatttaacttggcaaactttctattgcctgtcccatgtgcatcttatttaaaatttcccccatggaaatcactctcctgttgactatttccagagctctaggtgtttaggcagcgtgtggtgtctgagaggccatagcgccatcatgggctgatttttattaccaggtcccccagaagcaggtgagaggctctgcttcctgctgccgctctgcagcctggacctgtggaccctggttgtaaagagtaaattgtatcttaggaaaccagtgtcacctttttttcaccttttaattttatattatttgcgtcatacatttcctgtaacggaagtgttaattttactgtactttttggtaccccttttgggaatctaatgtattgtaaggtattttacacgtgtcctgattttgccacaacctggatattgaagctatccaagcttttgaaataaaatttaaaaaccccaagcctgggtgagtgtgggaaaaaaaaaaaaaaa

SEQ ID NO: 379 - protein, 331 aa, Homo sapien
MSEAGEEQPMETTGATENGHEAVPEASRGRGWTGAAAGLEARPPRPRAGIRTAPRDQINASKNEEDAGKMFVGGLSWDTSKKDLKDYFTKFGEVVDCTIKMDPNTGRSRGFGFILFKDAASVEKVLDQKEHRLDGRVIDPKKAMAMKKDPVKKIFVGGLNPESPTEEKIREYFGEFGEIEAIELPMDPKLNKRRGFVFITFKEEEPVKKVLEKKFHTVSGSKCEIKVAQPKEVYQQQQYGSGGRGNRNRGNRGSGGGGGGGGQSQSWNQGYGNYWNQGYGYQQGYGPGYGGYDYSPYGYYGYGPGYDYSQGSTNYGKSQRRGGHQNNYKPY

SEQ ID NO: 380 - DNA, 1249 bp, Homo sapien
ggcacgagccagggtttcctcttcaagtaggtctaaaacattttttttctcattgacttccttcctgttctaactgccagtactcagaagtcagagttgagagacagaggcaccccggacagagacgtgaagcactgaataaatagatcagaatgactgaaaaagccccagagccacatgtggaggaggatgacgatgatgagctggacagcaagctcaattataagcctccaccacagaagtccctgaaagagctgcaggaaatggacaaagatgatgagagtctaattaagtacaagaaaacgctgctgggagatggtcctgtggtgacagatccgaaagcccccaatgtcgttgtcacccggctcaccctggtttgtgagagtgccccgggaccaatcaccatggaccttactggagatctggaagccctcaaaaaggaaaccattgtgttaaaggaaggttctgaatatagagtcaaaattcacttcaaagtgaacagggatattgtgtcaggcctgaaatacgttcagcacacctacaggactggggtgaaagtggataaagcaacatttatggttggcagctatggacctcggcctgaggagtatgagttcctcactccagttgaggaggctcccaagggcatgctggcccgaggcacgtaccacaacaagtccttcttcaccgacgatgacaagcaagaccacctcagctgggagtggaacctgtcgattaagaaggagtggacagaatgaatgcatccaccccgttccccacccttgccacctggaagaattctctcaggcgtgttcagcaccctgtccctcctccctgtccacagctgggtccctcttcaacactgccacatttccttattgatcgatcttttcccaccctgtcactcaacgtggtccctagaacaagaggcttaaaaccgggctttcacccaacctgctccctctgatcctccatcagggccagatcttccacgtctccatctcagtacacaatcatttaatatttccctgtcttacccctattcaagcaactagaggccagaaaatgggcaaattatcactaacaggtctttgactcaggttccagtagttcattctaatgcctagattcttttgtggttgttgctggcccaatgagtccctagtcacatcccctgccagagggagttcttcttttgtgagagacactgtaaacgacacaagagaacaagaataaaacaataactgtg

SEQ ID NO: 381 - protein, 201 aa, Homo sapien
MTEKAPEPHVEEDDDDELDSKLNYKPPPQKSLKELQEMDKDDESLIKYKKTLLGDGPVVTDPKAPNVVVTRLTLVCESAPGPITMDLTGDLEALKKETIVLKEGSEYRVKIHFKVNRDIVSGLKYVQHTYRTGVKVDKATFMVGSYGPRPEEYEFLTPVEEAPKGMLARGTYHNKSFFTDDDKQDHLSWEWNLSIKKEWTE

SEQ ID NO: 382 - DNA, 5698 bp, Homo sapien
aggttcaagtggagctctcctaaccgacgcgcgtctgtggagaagcggcttggtcgggggtggtctcgtggggtcctgcctgtttagtcgctttcagggttcttgagccccttcacgaccgtcaccatggaagtgtcaccattgcagcctgtaaatgaaaatatgcaagtcaacaaaataaagaaaaatgaagatgctaagaaaagactgtctgttgaaagaatctatcaaaagaaaacacaattggaacatattttgctccgcccagacacctacattggttctgtggaattagtgacccagcaaatgtgggtttacgatgaagatgttggcattaactatagggaagtcacttttgttcctggtttgtacaaaatctttgatgagattctagttaatgctgcggacaacaaacaaagggacccaaaaatgtcttgtattagagtcacaattgatccggaaaacaatttaattagtatatggaataatggaaaaggtattcctgttgttgaacacaaagttgaaaagatgtatgtcccagctctcatatttggacagctcctaacttctagtaactatgatgatgatgaaaagaaagtgacaggtggtcgaaatggctatggagccaaattgtgtaacatattcagtaccaaatttactgtggaaacagccagtagagaatacaagaaaatgttcaaacagacatggatggataatatgggaagagctggtgagatggaactcaagcccttcaatggagaagattatacatgtatcacctttcagcctgatttgtctaagtttaaaatgcaaagcctggacaaagatattgttgcactaatggtcagaagagcatatgatattgctggatccaccaaagatgtcaaagtctttcttaatggaaataaactgccagtaaaaggatttcgtagttatgtggacatgtatttgaaggacaagttggatgaaactggtaactccttgaaagtaatacatgaacaagtaaaccacaggtgggaagtgtgtttaactatgagtgaaaaaggctttcagcaaattagctttgtcaacagcattgctacatccaagggtggcagacatgttgattatgtagctgatcagattgtgactaaacttgttgatgttgtgaagaagaagaacaagggtggtgttgcagtaaaagcacatcaggtgaaaaatcacatgtggatttttgtaaatgccttaattgaaaacccaacctttgactctcagacaaaagaaaacatgactttacaacccaagagctttggatcaacatgccaattgagtgaaaaatttatcaaagctgccattggctgtggtattgtagaaagcatactaaactgggtgaagtttaaggcccaagtccagttaaacaagaagtgttcagctgtaaaacataatagaatcaagggaattcccaaactcgatgatgccaatgatgcagggggccgaaactccactgagtgtacgcttatcctgactgagggagattcagccaaaactttggctgtttcaggccttggtgtggttgggagagacaaatatggggttttccctcttagaggaaaaatactcaatgttcgagaagcttctcataagcagatcatggaaaatgctgagattaacaatatcatcaagattgtgggtcttcagtacaagaaaaactatgaagatgaagattcattgaagacgcttcgttatgggaagataatgattatgacagatcaggaccaagatggttcccacatcaaaggcttgctgattaattttatccatcacaactggccctctcttctgcgacatcgttttctggaggaatttatcactcccattgtaaaggtatctaaaaacaagcaagaaatggcattttacagccttcctgaatttgaagagtggaagagttctactccaaatcataaaaaatggaaagtcaaatattacaaaggtttgggcaccagcacatcaaaggaagctaaagaatactttgcagatatgaaaagacatcgtatccagttcaaatattctggtcctgaagatgatgctgctatcagcctggcctttagcaaaaaacagatagatgatcgaaaggaatggttaactaatttcatggaggatagaagacaacgaaagttacttgggcttcctgaggattacttgtatggacaaactaccacatatctgacatataatgacttcatcaacaaggaacttatcttgttctcaaattctgataacgagagatctatcccttctatggtggatggtttgaaaccaggtcagagaaaggttttgtttacttgcttcaaacggaatgacaagcgagaagtaaaggttgcccaattagctggatcagtggctgaaatgtcttcttatcatcatggtgagatgtcactaatgatgaccattatcaatttggctcagaattttgtgggtagcaataatctaaacctcttgcagcccattggtcagtttggtaccaggctacatggtggcaaggattctgctagtccacgatacatctttacaatgctcagctctttggctcgattgttatttccaccaaaagatgatcacacgttgaagtttttatatgatgacaaccagcgtgttgagcctgaatggtacattcctattattcccatggtgctgataaatggtgctgaaggaatcggtactgggtggtcctgcaaaatccccaactttgatgtgcgtgaaattgtaaataacatcaggcgtttgatggatggagaagaacctttgccaatgcttccaagttacaagaacttcaagggtactattgaagaactggctccaaatcaatatgtgattagtggtgaagtagctattcttaattctacaaccattgaaatctcagagcttcccgtcagaacatggacccagacatacaaagaacaagttctagaacccatgttgaatggcaccgagaagacacctcctctcataacagactatagggaataccatacagataccactgtgaaatttgttgtgaagatgactgaagaaaaactggcagaggcagagagagttggactacacaaagtcttcaaactccaaactagtctcacatgcaactctatggtgctttttgaccacgtaggctgtttaaagaaatatgacacggtgttggatattctaagagacttttttgaactcagacttaaatattatggattaagaaaagaatggctcctaggaatgcttggtgctgaatctgctaaactgaataatcaggctcgctttatcttagagaaaatagatggcaaaataatcattgaaaataagcctaagaaagaattaattaaagttctgattcagaggggatatgattcggatcctgtgaaggcctggaaagaagcccagcaaaaggttccagatgaagaagaaaatgaagagagtgacaacgaaaaggaaactgaaaagagtgactccgtaacagattctggaccaaccttcaactatcttcttgatatgcccctttggtatttaaccaaggaaaagaaagatgaactctgcaggctaagaaatgaaaaagaacaagagctggacacattaaaaagaaagagtccatcagatttgtggaaagaagacttggctacatttattgaagaattggaggctgttgaagccaaggaaaaacaagatgaacaagtcggacttcctgggaaaggggggaaggccaaggggaaaaaaacacaaatggctgaagttttgccttctccgcgtggtcaaagagtcattccacgaataaccatagaaatgaaagcagaggcagaaaagaaaaataaaaagaaaattaagaatgaaaatactgaaggaagccctcaagaagatggtgtggaactagaaggcctaaaacaaagattagaaaagaaacagaaaagagaaccaggtacaaagacaaagaaacaaactacattggcatttaagccaatcaaaaaaggaaagaagagaaatccctggtctgattcagaatcagataggagcagtgacgaaagtaattttgatgtccctccacgagaaacagagccacggagagcagcaacaaaaacaaaattcacaatggatttggattcagatgaagatttctcagattttgatgaaaaaactgatgatgaagattttgtcccatcagatgctagtccacctaagaccaaaacttccccaaaacttagtaacaaagaactgaaaccacagaaaagtgtcgtgtcagaccttgaagctgatgatgttaagggcagtgtaccactgtcttcaagccctcctgctacacatttcccagatgaaactgaaattacaaacccagttcctaaaaagaatgtgacagtgaagaagacagcagcaaaaagtcagtcttccacctccactaccggtgccaaaaaaagggctgccccaaaaggaactaaaagggatccagctttgaattctggtgtctctcaaaagcctgatcctgccaaaaccaagaatcgccgcaaaaggaagccatccacttctgatgattctgactctaattttgagaaaattgtttcgaaagcagtcacaagcaagaaatccaagggggagagtgatgacttccatatggactttgactcagctgtggctcctcgggcaaaatctgtacgggcaaagaaacctataaagtacctggaagagtcagatgaagatgatctgttttaaaatgtgaggcgattattttaagtaattatcttaccaagcccaagactggttttaaagttacctgaagctcttaacttcctcccctctgaatttagtttggggaaggtgtttttagtacaagacatcaaagtgaagtaaagcccaagtgttctttagctttttataatactgtctaaatagtgaccatctcatgggcattgttttcttctctgctttgtctgtgttttgagtctgctttcttttgtctttaaaacctgatttttaagttcttctgaactgtagaaatagctatctgatcacttcagcgtaaagcagtgtgtttattaaccatccactaagctaaaactagagcagtttgatttaaaagtgtcactcttcctccttttctactttcagtagatatgagatagagcataattatctgttttatcttagttttatacataatttaccatcagatagaactttatggttctagtacagatactctactacactcagcctcttatgtgccaagtttttctttaagcaatgagaaattgctcatgttcttcatcttctcaaatcatcagaggccaaagaaaaacactttggctgtgtctataacttgacacagtcaatagaatgaagaaaattagagtagttatgtgattatttcagctcttgacctgtcccctctggctgcctctgagtctgaatctcccaaagagagaaaccaatttctaagaggactggattgcagaagactcggggacaacatttgatccaagatcttaaatgttatattgataaccatgctcagcaatgagctattagattcattttgggaaatctccataatttcaatttgtaaactttgttaagacctgtctacattgttatatgtgtgtgacttgagtaatgttatcaacgtttttgtaaatatttactatgtttttctattagctaaattccaacaattttgtactttaataaa

SEQ ID NO: 383 - protein, 1531 aa, Homo sapien
MEVSPLQPVNENMQVNKIKKNEDAKKRLSVERIYQKKTQLEHILLRPDTYIGSVELVTQQMWVYDEDVGINYREVTFVPGLYKIFDEILVNAADNKQRDPKMSCIRVTIDPENNLISIWNNGKGIPVVEHKVEKMYVPALIFGQLLTSSNYDDDEKKVTGGRNGYGAKLCNIFSTKFTVETASREYKKMFKQTWMDNMGRAGEMELKPFNGEDYTCITFQPDLSKFKMQSLDKDIVALMVRRAYDIAGSTKDVKVFLNGNKLPVKGFRSYVDMYLKDKLDETGNSLKVIHEQVNHRWEVCLTMSEKGFQQISFVNSIATSKGGRHVDYVADQIVTKLVDVVKKKNKGGVAVKAHQVKNHMWIFVNALIENPTFDSQTKENMTLQPKSFGSTCQLSEKFIKAAIGCGIVESILNWVKFKAQVQLNKKCSAVKHNRIKGIPKLDDANDAGGRNSTECTLILTEGDSAKTLAVSGLGVVGRDKYGVFPLRGKILNVREASHKQIMENAEINNIIKIVGLQYKKNYEDEDSLKTLRYGKIMIMTDQDQDGSHIKGLLINFIHHNWPSLLRHRFLEEFITPIVKVSKNKQEMAFYSLPEFEEWKSSTPNHKKWKVKYYKGLGTSTSKEAKEYFADMKRHRIQFKYSGPEDDAAISLAFSKKQIDDRKEWLTNFMEDRRQRKLLGLPEDYLYGQTTTYLTYNDFINKELILFSNSDNERSIPSMVDGLKPGQRKVLFTCFKRNDKREVKVAQLAGSVAEMSSYHHGEMSLMMTIINLAQNFVGSNNLNLLQPIGQFGTRLHGGKDSASPRYIFTMLSSLARLLFPPKDDHTLKFLYDDNQRVEPEWYIPIIPMVLINGAEGIGTGWSCKIPNFDVREIVNNIRRLMDGEEPLPMLPSYKNFKGTIEELAPNQYVISGEVAILNSTTIEISELPVRTWTQTYKEQVLEPMLNGTEKTPPLITDYREYHTDTTVKFVVKMTEEKLAEAERVGLHKVFKLQTSLTCNSMVLFDHVGCLKKYDTVLDILRDFFELRLKYYGLRKEWLLGMLGAESAKLNNQARFILEKIDGKIIIENKPKKELIKVLIQRGYDSDPVKAWKEAQQKVPDEEENEESDNEKETEKSDSVTDSGPTFNYLLDMPLWYLTKEKKDELCRLRNEKEQELDTLKRKSPSDLWKEDLATFIEELEAVEAKEKQDEQVGLPGKGGKAKGKKTQMAEVLPSPRGQRVIPRITIEMKAEAEKKNKKKIKNENTEGSPQEDGVELEGLKQRLEKKQKREPGTKTKKQTTLAFKPIKKGKKRNPWSDSESDRSSDESNFDVPPRETEPRRAATKTKFTMDLDSDEDFSDFDEKTDDEDFVPSDASPPKTKTSPKLSNKELKPQKSVVSDLEADDVKGSVPLSSSPPATHFPDETEITNPVPKKNVTVKKTAAKSQSSTSTTGAKKRAAPKGTKRDPALNSGVSQKPDPAKTKNRRKRKPSTSDDSDSNFEKIVSKAVTSKKSKGESDDFHMDFDSAVAPRAKSVRAKKPIKYLEESDEDDLF

SEQ ID NO: 384 - DNA, 2096 bp, Homo sapien
  Unsure 23: Unknown base
  Unsure 27: Unknown base
  Unsure 80: Unknown base
  Unsure 120: Unknown base
agatgtttaaaaatactttgatnctcngtttccacctctcttaaattgtctttccctatgttaaatatacagtcatcacnttgctgaaaaaagttcgcaatgagaacaatcatctaaaantggctgtaactaggtcaggcgcggttgctcatgcctgtaatcccaccactttgggaggccgaggcaattggatcacctgaggtcaggattttgagaccagcttgaccaacatggtggaatcccatctctactaaaaatacaaaaaattagccgggtgtggtggcacacccctgtaatcccacctactcaggaggctgaggcaggaaaatcccttgaacccaggaggcaaaggttgcattgagccgaaataacaccactgcactccagcctggacgatagagtgagaccccatctcaaaaaaagagcagctgtgacaaatgcctgtattgaattgcaggtcagtcttccacctccactaccggtgccaaaaaaagggctgccccaaaaggaactaaaagggatccagctttgaattctggtgtctctcaaaagcctgatcctgccaaaaccaagaatcgccgcaaaaggaagccatccacttctgatgattctgactctaattttgagaaaattgtttcgaaagcagtcacaagcaaggtgagtgttgatcctagtcagtccttttgctgtagatgttctgaaacacgtaactaagccattgttcttaaaaatttggcatatctttaagaaaattaactctcatattctgttagcttttactgtacatatttagttttaacaaagttaaatatgccacttatttggccaatggaagagttggccttagatctgcttcttattacttggtagaaaatagaaaactccttgaatatagtgtcttgatacatttttttacattacaattatgttgtcagatttacaatgtgcaagttacctgggcttttctcttttagaaatccaagggggagagtgatgacttccatatggactttgactcagctgtggctcctcgggcaaaatctgtacgggcaaagaaacctataaagtacctggaagagtcagatgaagatgatctgttttaaaatgtgaggcgattattttaagtaattatcttaccaagcccaagactggttttaaagttacctgaagctcttaacttcctcccctctgaatttagtttggggaaggtgtttttagtacaagacatcaaagtgaagtaaagcccaagtgttctttagctttttataatactgtataaatagtgaccatctcatgggcattgttttcttctctgctttgtctgtgttttgagtctgcttcttttgtctttaaaacctgatttttaagttcttctgaactgtagaaatagctatctgatcacttcagcgtaaagcagtgtgtttattaaccatccactaagctaaaactagagcagtttgatttaaaagtgtcactcttcctccttttctactttcagtagatatgagatagagcataattatctgttttatcttagttttatacataatttaccatcagatagaactttatggttctagtacagatactctactacactcagcctcttatgtgccaagtttttctttaagcaatgagaaattgctcatgttcttcatcttctcaaatcatcagaggccgaagaaaaacactttggctgtgtctataacttgacacagtcaatagaatgaagaaaattagagtagttatgtgattatttcagctcttgacctgtcccctctggctgcctctgagtctgaatctcccaaagagagaaaccaatttctaagaggactggattgcagaagactcggggacaacatttgatccaagatcttaaatgttatattgataaccatgctcagcaatgagctattagattcattttgggaaatctccataatttcaatttgtaaactttgttaagacctgtctacattgttatatgtgtgtgacttgagtaatgttatcaacgtttttgtaaatatttactatgtttttctattagctaaattccaacaattttgtactttaataaaatgttctaaacattgaaa

SEQ ID NO: 385 - DNA, 2887 bp, Homo sapien
agatatctccggcgccgcccgccattttgactccagtgtctcgtttgcagtcggcgctttaggggaactgtcttcctccgcaggcgcgaggctgggtacagggtctattgtctgtggttgactccgtactttggtctgaggccttcgggagctttcccgaggcagttagcagaagccgcagcggccgcccccgcccgtctcctctgtccctgggcccgggagggaccaacttggcgtcacgcccctcagcggtcgccactctcttctctgttgttgggtccgcatcgtattcccggaatcagacggtgccccatagatggccagctttcccccgagggtcaacgagaaagagatcgtgagattacgtactataggtgaacttttagctcctgcagctccttttgacaagaaatgtggtcgtgaaaattggactgttgcttttgctccagatggttcatactttgcttggtcacaaggacatcgcacagtaaagcttgttccgtggtcccagtgccttcagaactttctcttgcatggcaccaagaatgttaccaattcaagcagtttaagattgccaagacaaaatagtgatggtggtcagaaaaataagcctcgtgaacatattatagactgtggagatatagtctggagtcttgcttttgggtcatcagttccagaaaaacagagtcgctgtgtaaatatagaatggcatcgcttcagatttggacaagatcagctacttcttgctacagggttgaacaatgggcgtatcaaaatatgggatgtatatacaggaaaactcctccttaacttggtagatcatactgaagtggtcagagatttaacttttgctccagatggaagcttgatcctggtgtcagcttcaagagacaaaactctcagagtatgggacctgaaagatgatggaaacatgatgaaagtattgagggggcatcagaattgggtgtacagctgtgcattctctcctgactcttctatgctgtgttcagtcggagccagtaaagcagttttcctttggaatatggataaatacaccatgatacggaaactagaaggacatcaccatgatgtggtagcttgtgacttttctcctgatggagcattactggctactgcatcttatgatactcgagtatatatctgggatccacataatggagacattctgatggaatttgggcacctgtttcccccacctactccaatatttgctggaggagcaaatgaccggtgggtacgatctgtatcttttagccatgatggactgcatgttgcaagccttgctgatgataaaatggtgaggttctggagaattgatgaggattatccagtgcaagttgcacctttgagcaatggtctttgctgtgccttctctactgatggcagtgttttagctgctgggacacatgacggaagtgtgtatttttgggccactccacggcaggtccctagcctgcaacatttatgtcgcatgtcaatccgaagagtgatgcccacccaagaagttcaggagctgccgattccttccaagcttttggagtttctctcgtatcgtatttagaagattctgccttccctagtagtagggactgacagaatacacttaacacaaacctcaagctttactgacttcaattatctgtttttaaagacgtagaagatttatttaatttgatatgttcttgtactgcattttgatcagttgagcttttaaaatattatttatagacaatagaagtatttctgaacatatcaaatataaatttttttaaagatctaactgtgaaaacatacatacctgtacatatttagatataagctgctatatgttgaatggacccttttgcttttctgatttttagttctgacatgtatatattgcttcagtagagccacaatatgtatctttgctgtaaagtgcaaggaaattttaaattctgggacactgagttagatggtaaatactgacttacgaaagttgaattgggtgaggcgggcaaatcacctgaggtcagcagtttgagactagcctggcaaacatgatgaaaccctgtctctactaaaaatacaaaaaaaaaaaaaattagccaggcgtggtggtgcacacctgtagtcctagctacttgggaggctgaggcaggagaattgcttgaacccaggaggtggaggttgcagtaagccaagatcacaccactgcactccaacctggacaacagagcgagactccatctcaaaaaaaaaaaaaaattgtgttgcctcatacgaaatgtatttggttttgttggagagtgtcagactgatctggaagtgaaacacagtttatgtacagggaaaaggattttattatccttaggaatgtcatccaagacgtagagcttgaatgtgacgttatttaaaaacaacaacaaagaaggcagagccaggatataactagaaaaaggatgtctttttttttttttttactccccctctaaacactgctgctgccttaattttagaaagcagcttactagtttacccttgtggtataaagtattataaattgttgtgaatttgaagaatccgtctactgtattattgctaaatattttgtttatactaagggacaattattttaagaccatggatttaaaaaaaaaaaaaaaaactctgtttctgcaggggatgatattggtgagttgccaaagaagcaatacagcatatctgcttttgccttctgttgtttatcttacctgcagatattaagaatgtatgcattatgtaaaatgctcaattatatatttttgttgagttttttaattaaagacttgtaaaaaaaaaaaaaaaaaaaaaaaaaaaaaaaaaaaaaaaaaaaaaaaaaaaaaaa

SEQ ID NO: 386 - protein, 421 aa, Homo sapien
MASFPPRVNEKEIVRLRTIGELLAPAAPFDKKCGRENWTVAFAPDGSYFAWSQGHRTVKLVPWSQCLQNFLLHGTKNVTNSSSLRLPRQNSDGGQKNKPREHIIDCGDIVWSLAFGSSVPEKQSRCVNIEWHRFRFGQDQLLLATGLNNGRIKIWDVYTGKLLLNLVDHTEVVRDLTFAPDGSLILVSASRDKTLRVWDLKDDGNMMKVLRGHQNWVYSCAFSPDSSMLCSVGASKAVFLWNMDKYTMIRKLEGHHHDVVACDFSPDGALLATASYDTRVYIWDPHNGDILMEFGHLFPPPTPIFAGGANDRWVRSVSFSHDGLHVASLADDKMVRFWRIDEDYPVQVAPLSNGLCCAFSTDGSVLAAGTHDGSVYFWATPRQVPSLQHLCRMSIRRVMPTQEVQELPIPSKLLEFLSYRI

SEQ ID NO: 387 - DNA, 4212 bp, Homo sapien
gggcagtgtctcgtttgcagtcggcgctttaggggaactgtcttcctccgcaggcgcgaggctgggtacagggtctattgtctgtggttgactccgtactttggtctgaggccttcgggagctttcccgaggcagttagcagaagccgcagcggccgcccccgcccgtctcctctgtccctgggcccgggagggaccaacttggcgtcacgcccctcagcggtcgccactctcttctctgttgttgggtccgcatcgtattcccggaatcagacggtgccccatagatggccagctttcccccgagggtcaacgagaaagagatcgtgagattacgtactataggtgaacttttagctcctgcagctccttttgacaagaaatgtggtcgtgaaaattggactgttgcttttgctccagatggttcatactttgcttggtcacaaggacatcgcacagtaaagcttgttccgtggtcccagtgccttcagaactttctcttgcatggcaccaagaatgttaccaattcaagcagtttaagattgccaagacaaaatagtgatggtggtcagaaaaataagcctcgtgaacatattatagactgtggagatatagtctggagtcttgcttttgggtcatcagttccagaaaaacagagtcgctgtgtaaatatagaatggcatcgcttcagatttggacaagatcagctacttcttgctacagggttgaacagtgggcgtatcaaaatatgggatgtatatacaggaaaactcctccttaacttggtagatcatactggagtggtcagagatttaacttttgctccagatggaagcttgatcctggtgtcagcttcaagagacaaaactctcagagtatgggacctgagagatgatggaaacatgatgaaagtattgagggggcatcagaattgggtgtacagctgtgcattctctcctgactcttctatgctgtgttcagtcggagccagtaaagcagtggtggcagcaatattggtgtgattgaggttatgctggcaccactcgcacacaggcgcacaatggtgttagctgggcagaaagagtggcatctctggctaccgggctgggggcgacctttaccataggatgaagtaaccttgcattcggctgcaaggtgtactgtacgtacacaggtgctggtcgatgtccactttctgcttttctttctttctttttttcttttttaaagtaatttcccccacagtaaaatacactgactcctgagtaaattgattttccagttttatggaattgggagtctgacaagtgaaaccaatttaatgtaaagtatttggctttcaaatggtttctctgtgctattttttggaattctttcagattccagagatatcttacgtctttgattcaatttaaaatttgtacttattttcttttagaaataatgtattgtgtctgtgcagaaaaaaaaaaaaccaaaaaggattgctttactccaagaggagagattgtcttaggataaacctccaagctcacatttaatataacagactgaagtaaacattagaatcctgtttagagctattctgcacagttaactactgatctttagaatctaaaattgtatatgaacttattcttaaataattgaactgttttatattcaaatgacttatgatcgtggttagtttgggaaaaataagatggttaaattttgatttattgaaatgtaattgtattattttcataaaatagcattttcattttgtaatgtggtttaacatccttgttgtttgccaaagaaatttcatttggctgtgaatattctatttgcttgcagtatctgtttctcttcctaggctcaagttggtgacccaagcctattgtaaacaagtgattatctcaaagggagatgccaatggagtaacaatttgttaaccttacgttttctgtctgtatattttttaaaaatctggtagtttctggaaaaaaaaagagaagggggtttgtagtacttaaccctatttatttccgtatattttagttaattagtttttggaataaatggatttcagtatagctttgtggttaaattgcattgcctttattttatgtttaggcttatttttaaattaacatttaacagaaacatttgaaatagaatttgcatgtctgccttaattaacttaaagactgattttaatctgactatgacactgagcatattctttaaattactcataatttataatgcttaatataatcttaattaaatttagcagttttagtataagatgtgccattttgtcctctgtatgtctgaatgaagctataacattcgcctttttattgcaggttttcctttggaatatggataaatacaccatgatgcggaaactagaaggacatcaccatgatgtggtagcttgtgacttttctcctgatggagcattactggctactgcatcttatgatacttgagtatatatctgggatccacataatggagacattctgatggaatttgggcacctgtttcccccacctactccaatatttgctggaggagcaaatgaccggtgggtacgatctgtatcttttagccatgatggactgcatgttgcaagccttgctgatgataaaatgggtgaggttctggagaattgatgaggattatccagtgcaagttgcacctgtgagcaatggtctttgctgtgccttctctactgatggcagtgttttagctgctgggacacatgacggaagtgtgtatttttgggccactccacggcaggtccctagcctgcaacatttatgtcgcatgtcaatccgaagagtgatgcccacccaagaagttcaggagctgccgattccttccaagcttttggagtttctctcgtatcgtatttagaagattctgccttccctagtagtagggactgacagaatacacttaacacaaacctcaagctttactgacttcaattatctgtttttaaagacgtagaagatttatttaatttgatatgttcttgtactgcattttgatcagttgagcttttaaaatattatttatagacaatagaagtatttctgaacatatcaaatataaatttttttaaagatctaactgtgaaaacatacatacctgtacatatttagatataagctgctatatgttgaatggacccttttgcttttctgatttttagttctgacatgtatatattgcttcagtagagccacaatatgtatctttgctgtaaagtgcaaggaaattttaaattctgggacactgagttagatggtaaatactgacttacgaaagttgaattgggtgaggcgggcaaatcacctgaggtcagcagtttgagactagcctggcaaacatgatgaaaccctgtctctactaaaaatacaaaaaaaaaaaaattagccaggcgtggtggtgcacacctgtagtcctagctacttgggaggctgaggcaggagaattgcttgaacccaggaggtggaggttgcagtaagccaagatcacaccactgcactccaacctggacaacagagcgagactccatctcaaaaaaaaaaaaaaattgtgttgcctcatacgaaatgtatttggttttgttggagagtgtcagactgatctggaagtgaaacacagtttatgtacagggaaaaggattttattatccttaggaatgtcatccaagacgtagagcttgaatgtgacgttatttaaaaacaacaacaaagaaggcagagccaggatataactagaaaaaggatgtcttttttttttttttactccccctctaaacactgctgctgccttaattttagaaagcagcttactagtttacccttgtggtataaagtattataaattgttgtgaatttgaagaatccgtctactgtattattgctaaatattttgtttatactaagggacaattattttaagaccatggatttaaagaaaaaaaaaaaaactctgtttctgcaggggatgatattggtgagttgccaaagaagcaatacagcatatctgcttttgccttctgttgtttatcttacctgcagatattaagaatgtatgcattatgtaaaatgctcaattatatatttttgttgagttttttaattaaagacttgtaaaaaaaaaaaaaaaaaaaaaaaaaaaaaaaaaaaaaaaaaaaaaaaaagaaaaa

SEQ ID NO: 388 - protein, 112 aa, Homo sapien
MTGGYDLYLLAMMDCMLQALLMIKWVRFWRIDEDYPVQVAPVSNGLCCAFSTDGSVLAAGTHDGSVYFWATPRQVPSLQHLCRMSIRRVMPTQEVQELPIPSKLLEFLSYRI

SEQ ID NO: 389 - DNA, 2543 bp, Homo sapien
gaggcgggcaaggcgggcgccgaggtttgcaaaggctcgcagcggccagaaacccggctccgagcggcggcggcccggcttccgctgcccgtgagctaaggacggtccgctccctctagccagctccgaatcctgatccaggcgggggccaggggcccctcgcctcccctctgaggaccgaagatgagcttcctcttcagcagccgctcttctaaaacattcaaaccaaagaagaatatccctgaaggatctcatcagtatgaactcttaaaacatgcagaagcaactctaggaagtgggaatctgagacaagctgttatgttgcctgagggagaggatctcaatgaatggattgctgtgaacactgtggatttctttaaccagatcaacatgttatatggaactattacagaattctgcactgaagcaagctgtccagtcatgtctgcaggtccgagatatgaatatcactgggcagatggtactaatattaaaaagccaatcaaatgttctgcaccaaaatacattgactatttgatgacttgggttcaagatcagcttgatgatgaaactctttttccttctaagattggtgtcccatttcccaaaaactttatgtctgtggcaaagactattctaaagcgtctgttcagggtttatgcccatatttatcaccagcactttgattctgtgatgcagctgcaagagggggcccacctcaacacctcctttaagcactttattttctttgttcaggagtttaatctgattgataggcgtgagctggcacctcttcaagaattaatagagaaacttggatcaaaagacagataaatgtttcttctagaacacagttacccccttgcttcatctattgctagaactatctcattgctatctgttatagactagtgatacaaactttaagaaaacaggataaaaagatacccattgcctgtgtctactgataaaattatcccaaaggtaggttggtgtgatagtttccgagtaagaccttaaggacacagccaaatcttaagtactgtgtgaccactcttgttgttatcacatagtcatacttggttgtaatatgtgatggttaacctgtagcttataaatttacttattattcttttactcatttactcagtcatttctttacaagaaaatgattgaatctgttttaggtgacagcacaatggacattaagaatttccatcaataatttatgaataagtttccagaacaaatttcctaataacacaatcagattggttttattcttttattttacgaataaaaaatgtatttttcagtatccttgagatttagaacatctgtgtcacttcagataacattttagtttcaagtttgtatggtagtgtttttatagataagatacgtctattttttcaaaattcatgattgcagtttaaatcatcatatgacgtgtgggtgggagcaaccaaagttatttttacagggactttattttttgatctttatttgagattgttttcatatctatctaaattattaggagtgtgtgtatcagaagtaattttttaatgtcttctaaggatggtcttccaggcttttaaactgaaaagcttaattcagatagtagcttttggctgagaaaaggaatccaaaatattaataaatttagatctcaaaaccactatttttattatttcattatttttcagaggccttaaaattctggataagagaatggaggaaaatactcagagtacttgattattttatttccttttattaaaaaattacttctatgtttttattgtctcttgagccttagttaagagtagtgtagaaatgcatgaacttcatcctaataaggataaaacttaaggaaaaccacaataaaccatgaaggtgtacacatcctataacacagataaagttttggtgtgctacctattcttgagagagtgagtgagtgtatgtgtttaaaggaaacaaaatgggagaaataagttttaaaaaaatcctcattttgttaatattcaaaagatggactgagcttccacttgggttttatcttgttttaattgtttttgtatcaaaacttgaaattcctctatttctattgggatataaaagccttccccttcagtgaagaaaacatttattttttatttgattcctaggatttagtaaactctagctgtctatttaaaatgtactgaggcacaacaagtattatactggaagacttgccaaactggcaaagctttaagttcatcagcattctatgtggttcagagctgtgatttttgcaaagtattttaccaacctcctcgatggctttgataaaggttagatttgatgttttttttttagatttatttttcttactccactaaactataaagaaaataattacttagaaactccattttaaataatcatttcctagaaattcttaaatatatacagaattttaaagaaaacatttcatctgatttagttagcatccacatatcattgaggaattaaagtgtgggacagtcattatt

SEQ ID NO: 390 - protein, 216 aa, Homo sapien
MSFLFSSRSSKTFKPKKNIPEGSHQYELLKHAEATLGSGNLRQAVMLPEGEDLNEWIAVNTVDFFNQINMLYGTITEFCTEASCPVMSAGPRYEYHWADGTNIKKPIKCSAPKYIDYLMTWVQDQLDDETLFPSKIGVPFPKNFMSVAKTILKRLFRVYAHIYHQHFDSVMQLQEGAHLNTSFKHFIFFVQEFNLIDRRELAPLQELIEKLGSKDR

SEQ ID NO: 391 - DNA, 1682 bp, Homo sapien
cagcggcacagcgaggtcggcagcggcacagcgaggtcggcagcggcacagcgaggtcggcagcggcacagcgaggtcggcagcggcacagcgaggtcggcagcggcacagcgaggtcggcagcggcagcgaggtcggcagcggcacagcgaggtcggcagcggcagcgaggtcggcagcggcgcgcgctgtgctcttccgcggactctgaatcatggcgaccacggccacgatggcgacctcgggctcggcgcgaaagcggctgctcaaagaggaagacatgactaaagtggaattcgagaccagcgaggaggtggatgtgacccccacgttcgacaccatgggcctgcgggaggacctgctgcggggcatctacgcttacggttttgaaaaaccatcagcaatccagcaacgagcaatcaagcagatcatcaaagggagagatgtcatcgcacagtctcagtccggcacaggaaaaacagccaccttcagtatctcagtcctccagtgtttggatattcaggttcgtgaaactcaagctttgatcttggctcccacaagagagttggctgtgcagatccagaaggggctgcttgctctcggtgactacatgaatgtccagtgccatgcctgcattggaggcaccaatgttggcgaggacatcaggaagctggattacggacagcatgttgtcgcgggcactccagggcgtgtttttgatatgattcgtcgcagaagcctaaggacacgtgctatcaaaatgttggttttggatgaagctgatgaaatgttgaataaaggtttcaaagagcagatttacgatgtatacaggtacctgcctccagccacacaggtggttctcatcagtgccacgctgccacacgagattctggagatgaccaacaagttcatgaccgacccaatccgcatcttggtgaaacgtgatgaattgactctggaaggcatcaagcaatttttcgtggcagtggagagggaagagtggaaatttgacactctgtgtgacctctacgacacactgaccatcactcaggcggtcatcttctgcaacaccaaaagaaaggtggactggctgacggagaaaatgagggaagccaacttcactgtatcctcaatgcatggagacatgccccagaaagagcgggagtccatcatgaaggagttccggtcgggcgccagccgagtgcttatttctacagatgtctgggccagggggttggatgtccctcaggtgtccctcatcattaactatgatctccctaataacagagaattgtacatacacagaattgggagatcaggtcgatacggccggaagggtgtggccattaactttgtaaagaatgacgacatccgcatcctcagagatatcgagcagtactattccactcagattgatgagatgccgatgaacgttgctgatcttatctgaagcagcagatcagtgggatgagggagactgttcacctgctgtgtactcctgtttggaagtatttagatccagattctacttaatggggtttatatggactttcttctcataaatggcctgccgtctcccttcctttgaagaggatatggggattctgctctcttttcttatttacatgtaaataatacattgttctaagtctttttcattaaaaatttaaaacttttcccat

SEQ ID NO: 392 - protein, 411 aa, Homo sapien
MATTATMATSGSARKRLLKEEDMTKVEFETSEEVDVTPTFDTMGLREDLLRGIYAYGFEKPSAIQQRAIKQIIKGRDVIAQSQSGTGKTATFSISVLQCLDIQVRETQALILAPTRELAVQIQKGLLALGDYMNVQCHACIGGTNVGEDIRKLDYGQHVVAGTPGRVFDMIRRRSLRTRAIKMLVLDEADEMLNKGFKEQIYDVYRYLPPATQVVLISATLPHEILEMTNKFMTDPIRILVKRDELTLEGIKQFFVAVEREEWKFDTLCDLYDTLTITQAVIFCNTKRKVDWLTEKMREANFTVSSMHGDMPQKERESIMKEFRSGASRVLISTDVWARGLDVPQVSLIINYDLPNNRELYIHRIGRSGRYGRKGVAINFVKNDDIRILRDIEQYYSTQIDEMPMNVADLI

SEQ ID NO: 393 - DNA, 2036 bp, Homo sapien
tttcctctttctctaagagtctctctctccctttccctctctctccccccaatctgtctttctagcatgttgccctttttcaaccacatttgtgtttcaggtgtagagaggagagagagtgaacagggagcggggcttttgtctgttggtctccctggactgaagagagggagaatagaagcccaagactaagattctcaaaatggtttattacccagaactctttgtctgggtcagtcaagaaccatttccaaacaaggacatggagggaaggcttcctaagggaagacttcctgtcccaaaggaagtgaaccgcaagaagaacgatgagacaaacgctgcctccctgactccactgggcagcagtgaactccgctccccaagaatcagttacctccactttttttaatcgtaacacctccatttgtattacatatggtgtatgggtattgatgaggtcatggtatcatatatgggatttttttctgtgtaaatcatcaagtataagaagaaactatgggactctgagccttgctttagagaatttacagtggacaaataggtgtcatcaaaccagtttttaatcattctgactcaagtgaaaacgctcagaatttcacactgtgaatccacgtttacaacccttacaggtgggccttcaggcctggttcgctacaacaatgtcttccacaactcaaactcccaccgcgctcacacaaccggtccactcctgccttttcactcacacagctcccgactgcttcttgcagaggctgagagtccccccccccacctttttttttcatttagatgtaacaaacctagtagtttatgttcatcaattgtctgtatatctctatattttatccatgtactcttttgatgtatagaagtagtttgaaactcattgtttccttgtggtaagtgaccgagatgctgccacaggacctgagacactgatgaatggtgctattttggactttcaacatgctccttggcgaggtagctctgatggagttattttttatttccatgttctaagaaggtgttggtactctgtttccctgaatgttgttctctagactggattgacttgttttccttgtgtcttcagtgtggctttcttcctcagtgttgtaggttgagcgaatgctaccagagtgtgagagaccattgtctcgttggctggcgctcacggacatgcagtcacggtagcgggagcaatcacaaaactgtaatttacttaccaaatctcttcctttccgtagcctcgcctgcctgacttagagaaagaaaagcaataattttacaggcattttgaggtgtctctttgggttctttctgtttgaaaggatatttgtcgaaaaaaagagcaaaaccgttttaaataaactccccctggaaaaaaacccaaaacactggcatctgagtaggaatatgaaaatgacaccttttccaaatattaaattggaaaacaaggtctacaaaatcatgatacttttttaaaaggcagagcattcttttttcggcaattttgataagcaaggtgtagatttacatttttgtccttgctcccaacgaaatggataaacaaaaataaattaccatctactcatggaatgttgttgtgttagccagtctgaaagcccaccttaatttttatataactgtctttagctcttcttttgacagggcaggccttgttctgaactgtttcgcttctgactgttaaacaccgatgacgcatgcactgcacttcttcgttttcttcttgctcccccattggcctgagtttcttgtgcattactcctctccctccttcgttagaataggtatatcagctgtgtaaatagagcaagaaaacagtattctgcatctgtggcatttatgtagagttgcagttgtgtactgctgaaaatgcaggcttttgtaacagtgtgatctttactgatgcactcatgacaagtacccaatgtattttagctattttagtagtatttgttcaataaatacgcaagctgtaaggtaactgtctg

SEQ ID NO: 394 - protein, 68 aa, Homo sapien
MVYYPELFVWVSQEPFPNKDMEGRLPKGRLPVPKEVNRKKNDETNAASLTPLGSSELRSPRISYLHFF

SEQ ID NO: 395 - DNA, 2423 bp, Homo sapien
acccgcgctcgtacgtgcgcctccgccggcagctcctgactcatcgggggctccgggtcacatgcgcccgcgcggccctataggcgcctcctccgcccgccgcccgggagccgcagccgccgccgccactgccactcccgctctctcagcgccgccgtcgccaccgccaccgccaccgccactaccaccgtctgagtctgcagtcccgagatcccagccatcatgtccatagagaagatctgggcccgggagatcctggactcccgcgggaaccccacagtggaggtggatctctatactgccaaaggtcttttccgggctgcagtgcccagtggagcctctacgggcatctatgaggccctggagctgagggatggagacaaacagcgttacttaggcaaaggtgtcctgaaggcagtggaccacatcaactccaccatcgcgccagccctcatcagctcaggtctctctgtggtggagcaagagaaactggacaacctgatgctggagttggatgggactgagaacaaatccaagtttggggccaatgccatcctgggtgtgtctctggccgtgtgtaaggcaggggcagctgagcgggaactgcccctgtatcgccacattgctcagctggccgggaactcagacctcatcctgcctgtgccggccttcaacgtgatcaatggtggctctcatgctggcaacaagctggccatgcaggagttcatgatcctcccagtgggagctgagagctttcgggatgccatgcgactaggtgcagaggtctaccatacactcaagggagtcatcaaggacaaatacggcaaggatgccaccaatgtgggggatgaaggtggctttgcccccaatatcctggagaacagtgaagccttggagctggtgaaggaagccatcgacaaggctggctacacggaaaagatcgttattggcatggatgttgctgcctcagagttttatcgtgatggcaaatatgacttggacttcaagtctcccactgatccttcccgatacatcactggggaccagctgggggcactctaccaggactttgtcagggactatcctgtggtctccattgaggacccatttgaccaggatgattgggctgcctggtccaagttcacagccaatgtagggatccagattgtgggtgatgacctgacagtgaccaacccaaaacgtattgagcgggcagtggaagaaaaggcctgcaactgtctgctgctcaaggtcaaccagatcggctcggtcactgaagccatccaagcgtgcaagctggcccaggagaatggctggggggtcatggtgagtcatcgctcaggagagactgaggacacattcattgctgacctggtggtggggctgtgcacaggccagatcaagactggtgccccgtgccgttctgaacgtctggctaaatacaaccagctcatgagaattgaggaagagctgggggatgaagctcgctttgccggacataacttccgtaatcccagtgtgctgtgattcctctgcttgcctggagacgtggaacctctgtctcatcctcctggaaccttgctgtcctgatctgtgatagttcaccccctgagatcccctgagccccagggtgcccagaacttccctgattgacctgctccgctgctccttggcttacctgacctcttgctgtctctgctcgccctcctttctgtgccctactcattggggttccgcactttccacttcttcctttctctttctctcttccctcagaaactagaaatgtgaatgaggattattataaaagggggtccgtggaagaatgatcagcatctgtgatgggagcgtcagggttggtgtgctgaggtgttagagagggaccatgtgtcacttgtgctttgctcttgtcccacgtgtcttccactttgcatatgagccgtgaactgtgcatagtgctgggatggaggggagtgttgggcatgtgatcacgcctggctaataaggctttagtgtatttatttatttatttattttatttgtttttcattcatcccattaatcatttccccataactcaatggcctaaaactggcctgacttgggggaacgatgtgtctgtatttcatgtggctgtagatcccaagatgactggggtgggaggtcttgctagaatgggaagggtcatagaaagggccttgacatcagttcctttgtgtgtactcactgaagcctgcgttggtccagagcggaggctgtgtgcctgggggagttttcctctatacatctctccccaaccctaggttccctgttcttcctccagctgcaccagagcaacctctcactccccatgccacgttccacagttgccaccacctctgtggcattgaaatgagcacctccattaaagtctgaatcagtgc

SEQ ID NO: 396 - protein, 434 aa, Homo sapien
MSIEKIWAREILDSRGNPTVEVDLYTAKGLFRAAVPSGASTGIYEALELRDGDKQRYLGKGVLKAVDHINSTIAPALISSGLSVVEQEKLDNLMLELDGTENKSKFGANAILGVSLAVCKAGAAERELPLYRHIAQLAGNSDLILPVPAFNVINGGSHAGNKLAMQEFMILPVGAESFRDAMRLGAEVYHTLKGVIKDKYGKDATNVGDEGGFAPNILENSEALELVKEAIDKAGYTEKIVIGMDVAASEFYRDGKYDLDFKSPTDPSRYITGDQLGALYQDFVRDYPVVSIEDPFDQDDWAAWSKFTANVGIQIVGDDLTVTNPKRIERAVEEKACNCLLLKVNQIGSVTEAIQACKLAQENGWGVMVSHRSGETEDTFIADLVVGLCTGQIKTGAPCRSERLAKYNQLMRIEEELGDEARFAGHNFRNPSVL

SEQ ID NO: 397 - DNA, 885 bp, Homo sapien
tttggctcttcgggtaaagatggcggagcgcgggtacagcttttcgctgactacattcagcccgtctggtaaacttgtccagattgaatatgctttggctgctgtagctggaggagccccgtccgtgggaattaaagctgcaaatggtgtggtattagcaactgagaaaaaacagaaatccattctgtatgatgagcgaagtgtacacaaagtagaaccaattaccaagcatataggtttggtgtacagtggcatgggccccgattacagagtgcttgtgcacagagctcgaaaactagctcaacaatactatcttgtgtaccaagaacccattcctacagctcagctggtacagagagtagcttctgtgatgcaagaatatactcagtcaggtggtgttcgtccatttggagtttctttacttatttgtggttggaatgagggacgaccatatttatttcagtcagatccatctggagcttactttgcctggaaagctacagcaatgggaaagaactatgtgaatgggaagactttccttgagaaaagatataatgaagatctggaacttgaagatgccattcatacagccatcttaaccctaaaggaaagctttgaagggcaaatgacagaggataacatagaagttggaatctgcaatgaagctggatttaggaggcttactccaactgaagttaaggattacttggctgccatagcataacaatgaagtgactgaaaaatccagaatttcagataatctatctacttaaacatgtttaaagtatgttttgttttgcagactttttgcatacttatttctacatggtttaaatcgactgtttttaaaatgacacttataaatcctaataaactgttaaaccc

SEQ ID NO: 398 - protein, 234 aa, Homo sapien
MAERGYSFSLTTFSPSGKLVQIEYALAAVAGGAPSVGIKAANGVVLATEKKQKSILYDERSVHKVEPITKHIGLVYSGMGPDYRVLVHRARKLAQQYYLVYQEPIPTAQLVQRVASVMQEYTQSGGVRPFGVSLLICGWNEGRPYLFQSDPSGAYFAWKATAMGKNYVNGKTFLEKRYNEDLELEDAIHTAILTLKESFEGQMTEDNIEVGICNEAGFRRLTPTEVKDYLAAIA

SEQ ID NO: 399 - DNA, 1325 bp, Homo sapien
gcgattcggtggcacgtggagccacggcgtgggagtagggggctgaaggcaggcagcagcggccagggccgccctctgctagccgcttgggtctcgggataccccgtttcttcctgtaggtgtgggacgtgcgtgcggcgagatggacactcccccgctctcggattcggagtcggaatccgatgaatcccttgtcacagacagagagttgcaggatgcgttttcccgagggcttctgaagccaggcctcaatgtcgtgctagaggggccgaagaaggccgtgaacgacgtgaatggcctgaagcaatgtttggcagaattcaagcgggatctggaatgggttgaaaggctcgatgtgacactgggtccggtaccggagatcggtggatctgaggcgccagcacctcagaacaaggaccagaaagctgttgatccagaagacgacttccagcgagagatgagtttctatcgccaagcccaggccgcagtgcttgcagtcttaccccgcctccatcagctcaaagtccctacgaagcgacccactgattattttgcggaaatggccaaatctgatctgcaggtgcagaagattcgacagaagctgcagactaaacaggctgccatggagaggtctgaaaaagctaagcaactgcgagcacttaggaaatacgggaagaaggtgcaaacggaggttcttcagaagaggcagcaggagaaagcccatatgatgaatgctattaagaaatatcagaaaggcttctctgataaactggatttccttgagggagatcagaaacctctggcacagcgcaagaaggcaggagccaaaggccagcagatgaggaaggggcccagtgctaaacgacggtataaaaaccagaagtttggttttggtggaaagaagaaaggctcaaagtggaacactcgggagagctatgatgatgtatctagcttccgggccaagacagctcatggcagaggcctcaagaggcctggcaagaaagggtcaaataagagacctggaaaacgaacaagagagaagatgaagaacagaacacactaaatagcatctttgaatacaaagaaccaagaaaaaggaatgaagactcgcaatttcacgacacactttgatcccttctgttggtgtcatgttgtaaacatttctttcaataaactaaagaaaaattattaaaggaacacatacctttggttaaatagtctagactaaaagattgagaagttactttccattgctatctattgataatttagacattgagttcaaattgccttcattttatgataaataatgatttaactgaaaa

SEQ ID NO: 400 - protein, 306 aa, Homo sapien
MDTPPLSDSESESDESLVTDRELQDAFSRGLLKPGLNVVLEGPKKAVNDVNGLKQCLAEFKRDLEWVERLDVTLGPVPEIGGSEAPAPQNKDQKAVDPEDDFQREMSFYRQAQAAVLAVLPRLHQLKVPTKRPTDYFAEMAKSDLQVQKIRQKLQTKQAAMERSEKAKQLRALRKYGKKVQTEVLQKRQQEKAHMMNAIKKYQKGFSDKLDFLEGDQKPLAQRKKAGAKGQQMRKGPSAKRRYKNQKFGFGGKKKGSKWNTRESYDDVSSFRAKTAHGRGLKRPGKKGSNKRPGKRTREKMKNRTH

SEQ ID NO: 401 - DNA, 2786 bp, Homo sapien
agcactctccagcctctcaccgcaaaattacacaccccagtacaccagcagaggaaacttataacctcgggaggcgggtccttcccctcagtgcggtcacatacttccagaagagcggaccagggctgctgccagcacctgccactcagagcgcctctgtcgctgggacccttcagaactctctttgctcacaagttaccaaaaaaaaaagagccaacatgttggtattgctggctggtatctttgtggtccacatcgctactgttattatgctatttgttagcaccattgccaatgtctggttggtttccaatacggtagatgcatcagtaggtctttggaaaaactgtaccaacattagctgcagtgacagcctgtcatatgccagtgaagatgccctcaagacagtgcaggccttcatgattctctctatcatcttctgtgtcattgccctcctggtcttcgtgttccagctcttcaccatggagaagggaaaccggttcttcctctcaggggccaccacactggtgtgctggctgtgcattcttgtgggggtgtccatctacactagtcattatgcgaatcgtgatggaacgcagtatcaccacggctattcctacatcctgggctggatctgcttctgcttcagcttcatcatcggcgttctctatctggtcctgagaaagaaataaggccggacgagttcatggggatctggggggtggggaggaggaagccgttgaatctgggagggaagtggaggttgctgtacaggaaaaaccgagataggggaggggggagggggaagcaaaggggggaggtcaaatcccaaaccattactgaggggattctctactgccaagcccctgccctggggagaaagtagttggctagtactttgatgctcccttgatggggtccagagagcctccctgcagccaccagacttggcctccagctgttcttagtgacacacactgtctggggccccatcagctgccacaacaccagccccacttctgggtcatgcactgaggtccacagacctactgcactgagttaaaatagcggtacaagttctggcaagagcagatactgtctttgtgctgaatacgctaagcctggaagccatcctgcccttctgacccaaagcaaaacatcacattccagtctgaagtgcctactggggggctttggcctgtgagccattgtccctctttggaacagatatttagctctgtggaattcagtgacaaaatgggaggaggaaagagagtttgtaaggtcatgctggtgggttagctaaaccaagaaggagaccttttcacaatggaaaacctgggggatggtcagagcccagtcgagacctcacacacggctgtccctcatggagacctcatgccatggtctttgctaggcctcttgctgaaagccaaggcagctcttctggagtttctctaaagtcactagtgaacaattcggtggtaaaagtaccacacaaactatgggatccaaggggcagtcttgcaacagtgccatgttagggttatgtttttaggattcccctcaatgcagtcagtgtttcttttaagtatacaacaggagagagatggacatggctcattgtagcacaatcctattactcttcctctaacatttttgaggaagttttgtctaattatcaatattgaggatcagggctcctaggctcagtggtagctctggcttagacaccacctggagtgatcacctcttggggaccctgcctatcccacttcacaggtgaggcatggcaattctggaagctgattaaaacacacataaaccaaaaccaaacaacaggcccttgggtgaaaggtgctatataattgtgaagtattaagcctaccgtatttcagccatgataagaacagagtgcctgcattcccaggaaaatacgaaaatcccatgagataaataaaaatataggtgatgggcagatcttttctttaaaataaaaaagcaaaaactcttgtggtacctagtcagatggtagacgagctgtctgctgccgcaggagcacctctatacaggacttagaagtagtatgttattcctggttaagcaggcattgctttgccctggagcagctattttaagccatctcagattctgtctaaaggggttttttgggaagacgttttctttatcgccctgagaagatctaccccagggagaatctgagacatcttgcctacttttctttattagctttctcctcatccatttcttttatacctttcctttttggggagttgttatgccatgatttttggtatttatgtaaaaggattattactaattctatttctctatgtttattctagttaaggaaatgttgagggcaagccaccaaattacctaggctgaggttagagagattggccagcaaaaactgtgggaagatgaactttgtcattatgatttcattatcacatgattatagaaggctgtcttagtgcaaaaaacatacttacatttcagacatatccaaagggaatactcacattttgttaagaagttgaactatgactggagtaaaccatgtattcccttatcttttactttttttctgtgacatttatgtctcatgtaatttgcattactctggtggattgttctagtactgtattgggcttcttcgttaatagattatttcatatactataattgtaaatattttgatacaaatgtttataactctagggatataaaaacagattctgattcccttcaaaaaaaaaaaa

SEQ ID NO: 402 - protein, 157 aa, Homo sapien
MLVLLAGIFVVHIATVIMLFVSTIANVWLVSNTVDASVGLWKNCTNISCSDSLSYASEDALKTVQAFMILSIIFCVIALLVFVFQLFTMEKGNRFFLSGATTLVCWLCILVGVSIYTSHYANRDGTQYHHGYSYILGWICFCFSFIIGVLYLVLRKK

SEQ ID NO: 403 - DNA, 2562 bp, Homo sapien
gccgcgccggctctgggcactcagcatcgtttccttttcctccgctggagcagctatggcggcggtgaagaccctgaaccccaaggccgaggtggcccgagcgcaggcggcgctggcggtcaacatcagcgcagcgcggggtctgcaggacgtgctaaggaccaacctggggcccaagggcaccatgaagatgctcgtttctggcgctggagacatcaaacttactaaagacggcaatgtgctgcttcacgaaatgcaaattcaacacccaacagcttccttaatagcaaaggtagcaacagcccaggatgatataactggtgatggtacgacttctaatgtcctaatcattggagagctgctgaaacaggcggatctctacatttctgaaggccttcatcctagaataatcactgaaggatttgaagctgcaaaggaaaaggcccttcagtttttggaagaagtcaaagtaagcagagagatggacagggaaacacttatagatgtggccagaacatctcttcgtactaaagttcatgctgaacttgcagatgtcttaacagaggctgtagtggactccattttggccattaaaaagcaagatgaacctattgatctcttcatgattgagatcatggagatgaaacataaatctgaaactgatacaagcttaatcagagggcttgttttggaccacggagcacggcatcctgatatgaagaaaagggtggaggatgcatacatcctcacttgtaacgtgtcattagagtatgagaaaacagaagtgaattctggctttttttacaagagtgcagaagagagagaaaaactcgtgaaagctgaaagaaaattcattgaagatagggttaaaaaaataatagaactgaaaaggaaagtctgtggcgattcagataaaggatttgttgttattaatcaaaagggaattgaccccttttccttagatgctctttcaaaagaaggcatagtcgctctgcgcagagctaaaaggagaaatatggagaggctgactcttgcttgtggtggggtagccctgaattcttttgacgacctaagtcctgactgcttgggacatgcaggacttgtatatgagtatacattgggagaagagaagtttacctttattgagaaatgtaacaaccctcgttctgtcacattattgatcaaaggaccaaataagcacacactcactcagatcaaagatgcagtgagggacggcttgagggctgtcaaaaatgctattgatgatggctgtgtggttccaggtgctggtgccgtggaagtggcaatggcagaagccctgattaaacataagcccagtgtaaagggcagggcacagcttggagtccaagcatttgctgatgcattgctcattattcccaaggttcttgctcagaactctggttttgaccttcaggaaacattagttaaaattcaagcagaacattcagaatcaggtcagcttgtgggtgtggacctgaacacaggtgagccaatggtggcagcagaagtaggcgtatgggataactattgtgtaaagaaacagcttcttcactcctgcactgtgattgccaccaacattctcttggttgatgagatcatgcgagctggaatgtcttctctgaaaggttgaattgaagcttcctctgtatctgaatcttgaagactgcaaagtgatcctgaggattacagctgtggaatttttgtccaagcttcaaataattttgaaagaaattttcccatatgaaaaaaggagagaacactggcatctgttgaaatttggaagttctgaaattatagtatttttaaaaattgcactgaagtgtatacacataaagcaggtcttttatccagtgaacaggatgttttgctttagcagcagtgacataaaattccatgttagataagcatatgttacttaccttgttattaaatatttcttgaaaagcaaattttaatggttaattttatgtggacgtatgttaaattatccaaactaccctattgttaagcatttggttttaaaatttttatgctaatataaatgctcaagtaatttaaaatattgaaagcatccctgttggtataaatttctgagtaaatgcattggatcagttggactttgaacgccctttgaaatggctttgctaaaatgctcccgccacaaagttgtaggaaatgggaagaggagtcaactagaggcaagggagttgagagagctgcaactgtaaagggcaagaacaggcagaggtaaaaagatgatggaaggtgtggtgactaagggccacggttattgggtgaaatttgagatgtaggccaactgtattttcaagcttctgaacttaaggcaaaatattcatcgcaaagtctctagcgtcatatttttctcacccaaattacgtttccacgagttattatatatagttggtctatctctgcagtccttgaaggtgaagttgtgtgttactaggctgtgttttgggatgtcagcagtggcctgaagtgagttgtgcaataaatgttaagttgaaacctcaaaaaaaa

SEQ ID NO: 404 - protein, 531 aa, Homo sapien
MAAVKTLNPKAEVARAQAALAVNISAARGLQDVLRTNLGPKGTMKMLVSGAGDIKLTKDGNVLLHEMQIQHPTASLIAKVATAQDDITGDGTTSNVLIIGELLKQADLYISEGLHPRIITEGFEAAKEKALQFLEEVKVSREMDRETLIDVARTSLRTKVHAELADVLTEAVVDSILAIKKQDEPIDLFMIEIMEMKHKSETDTSLIRGLVLDHGARHPDMKKRVEDAYILTCNVSLEYEKTEVNSGFFYKSAEEREKLVKAERKFIEDRVKKIIELKRKVCGDSDKGFVVINQKGIDPFSLDALSKEGIVALRRAKRRNMERLTLACGGVALNSFDDLSPDCLGHAGLVYEYTLGEEKFTFIEKCNNPRSVTLLIKGPNKHTLTQIKDAVRDGLRAVKNAIDDGCVVPGAGAVEVAMAEALIKHKPSVKGRAQLGVQAFADALLIIPKVLAQNSGFDLQETLVKIQAEHSESGQLVGVDLNTGEPMVAAEVGVWDNYCVKKQLLHSCTVIATNILLVDEIMRAGMSSLKG

SEQ ID NO: 405 - DNA, 2562 bp, Homo sapien; identical to SEQ ID NO: 403

SEQ ID NO: 406 - protein, 531 aa, Homo sapien; identical to SEQ ID NO: 404

SEQ ID NO: 407 - DNA, 2120 bp, Homo sapien
ggatccgcggccgccgctgatgggaggatggacgtactggtgtctgagtgctccgcgcggctgctgcagcaggaagaagagattaaatctctgactgctgaaattgaccggttgaaaaactgtggctgtttaggagcttcttcaaatttggagcagttacaagaagaaaatttaaaattaaagtatcgactgaatattcttcgaaagagtcttcaggcagaaaggaacaaaccaactaaaaatatgattaacattattagccgcctacaagaggtctttggtcatgcaattaaggctgcatatccagatttggaaaatcctcctctgctagtgacaccaagtcagcaggccaagtttggggactatcagtgtaatagtgctatgggtatttctcagatgcttaaaaccaaggaaccggaagttaatccaggggaatttgctgaaaacattaccaaacacctcccggccatggatgttttgaaaagagttgaatttgctggccctggctttattaatggccacttaagaaaggattttgtatcagaacaattgaccagtcttctagtgaatggagttcaactacctgctctgggagagaataaaaaggttatagttgacttttcctcccctaatatagctaaagagatgcatgtaggccacctgaggtcaactatcataggagagagtataagccgcctctttgaatttgcagggtatgacgtgctcaggttaaatcatgtaggagactgggggacccagtttggcatgctcatcgctcacctgcaagacaaatttccagattatctaacagtttcacctcctattggggatcttcaggtcttttataaggaatctaagaagaggtttgatactgaggaggaatttaagaagcgagcatatcagtgtgtagttctgctccagggtaaaaacccagatattacaaaagcttatctgctgatgtctgatgtctcccgccaagagttaaataaaatctatgatgcattggacgtctctttaatagagagaggggaatccttctatcaagataggatgaatgatattgtaaaggaatttgaagatagaggatttgtgcaggtggatgatggcagaaagattgtatttgtcccagggtgttccataccattaaccatagtaaaatcagatggaggttatacctatgatacatctgacctggctgctattaaacaaagactatttgaggaaaaagcagatatgattatctatgttgtggacaatggacaatctgtgcacttccagacaatatttgctgctgctcaaatgattggttggtatgaccctaaagtaactcgagtcttccatgctggatttggtgtggtgctaggggaagacaagaaaaagtttaaaacacgttcgggtgaaacagtgcgcctcatggatcttctgggagaaggactaaaacgatccatggacaagttgaaggaaaaagaaagagacaaggtcttaactgcagaggaattgaatgctgctcagacatccgttgcatatggctgcatcaaatatgctgacctttcccataaccggttgaatgactacatcttctcctttgacaaaatgctagatgacagaggaaatacagctgcttacttgttgtatgccttcactagaatcaggtctattgcacgtctggccaatattgatgaagaaatgctccaaaaagctgctcgagaaaccaagattcttttggttcatgagaaggaatggaaactaggccggtgcattttacggttccctgagattctgcaaaagattttagatgacttatttctccacactctctgtgattatatatatgagctggcaactgctttcacagagttctatgatagctgctactgtgtggagaaagatagacagactgggaaaatattgaaggtgaacatgtggcgtatcttgtgtgaaacagtagctgctgtcatggccaaggggtttgataccctggggataaaacctggcccaagggtgtaatccctcacaggtttgaaccctgtgtgttttttcccaagtggccattggccctgtttgctttttttcaatcttgtgggcacaagcataagttaaggaaatttttcacccaggca

SEQ ID NO: 408 - protein, 659 aa, Homo sapien [sequence omitted]

SEQ ID NO: 409 - DNA, 2000 bp, Homo sapien
cttggcacgagggattggtctgtgctcctctctcggctcctcgcggctcgcggcggccgacggttcctgggacacctgcttgcttggcccgtccggcggctcagggcttctctgctgcgctcccggttcgctggacgggaagaagggctgggccgtcccgtcccgtccccatcggaaccccaagtcgcgccgctgacccgtcgcagggcgagatgagcgcggacgcagcggccggggcgcccctgccccggctctgctgcctggagaagggtccgaacggctacggcttccacctgcacggggagaagggcaagttgggccagtacatccggctggtggagcccggctcgccggccgagaaggcggggctgctggcgggggaccggctggtggaggtgaacggcgaaaacgtggagaaggagacccaccagcaggtggtgagccgcatccgcgccgcactcaacgccgtgcgcctgctggtggtcgaccccgagacggacgagcagctgcagaagctcggcgtccaggtccgagaggagctgctgcgcgcccaggaagcgccggggcaggccgagccgccggccgccgccgaggtgcagggggctggcaacgaaaatgagcctcgcgaggccgacaagagccacccggagcagcgcgagcttcggcctcggctctgtaccatgaagaagggccccagtggctatggcttcaacctgcacagcgacaagtccaagccaggccagttcatccggtcagtggacccagactccccggctgaggcttcagggctccgggcccaggatcgcattgtggaggtgaacggggtctgcatggaggggaagcagcatggggacgtggtgtccgccatcagggctggcggggacgagaccaagctgctggtggtggacagggaaactgacgagttcttcaagaaatgcagagtgatcccatctcaggagcacctgaatggtcccctgcctgtgcccttcaccaatggggagatacagaaggagaacagtcgtgaagccctggcagaggcagccttggagagccccaggccagccctggtgagatccgcctccagtgacaccagcgaggagctgaattcccaagacagccccccaaaacaggactccacagcgccctcgtctacctcctcctccgaccccatcctagacttcaacatctccctggccatggccaaagagagggcccaccagaaacgcagcagcaaacgggccccgcagatggactggagcaagaaaaacgaactcttcagcaacctctgagcgccctgctgccacccagtgactggcagggccgagccagcattccaccccacctttttccttctccccaattactcccctgaatcaatgtacaaatcagcacccacatcccctttcttgacaaatgatttttctagagaactatgttcttccctgactttagggaaggtgaatgtgttcccgtcctcccgcagtcagaaaggagactctgcctccctcctcctcactgagtgcctcatcctaccgggtgtccctttgccaccctgcctgggacatcgctggaacctgcaccatgccaggatcatgggaccaggcgagagggcaccctcccttcctcccccatgtgataaatgggtccagggctgatcaaagaactctgactgcagaactgccgctctcagtggacagggcatctgttatcctgaaccttggcagacacgtcttgttttcatttgattttgttaagagtgcagtattgcagagtctagaggaatttttgtttccttgattaacatgattttcctggttgttaatccagggcatggcagtggcctcagccttaaacttttgttcctactcccaccctcagcgaactgggcagcacggggagggtttggctacccctgcccatccctgagccaggtaccaccattgtaaggaaacactttcagaaattcagctggttcctccaaaccaaaaaaaaaaaaaaaa

SEQ ID NO: 410 - protein, 358 aa, Homo sapien
MSADAAAGAPLPRLCCLEKGPNGYGFHLHGEKGKLGQYIRLVEPGSPAEKAGLLAGDRLVEVNGENVEKETHQQVVSRIRAALNAVRLLVVDPETDEQLQKLGVQVREELLRAQEAPGQAEPPAAAEVQGAGNENEPREADKSHPEQRELRPRLCTMKKGPSGYGFNLHSDKSKPGQFIRSVDPDSPAEASGLRAQDRIVEVNGVCMEGKQHGDVVSAIRAGGDETKLLVVDRETDEFFKKCRVIPSQEHLNGPLPVPFTNGEIQKENSREALAEAALESPRPALVRSASSDTSEELNSQDSPPKQDSTAPSSTSSSDPILDFNISLAMAKERAHQKRSSKRAPQMDWSKKNELFSNL

SEQ ID NO: 411 - DNA, 2488 bp, Homo sapien
cggcccaacgaggcgctggtggtttcagggggctgttgtggttccgactataaacagtacgtgtttggcggctgggcctgggcctggtggtgtatctccgacactcagaggatttccctagagattatgacgttgcagccccgctgcgaggacgtagagacggccgagggggtagctttaactgtgacgggtgtcgcccaggtgaagatcatgacggagaaggaactcctggccgtggcttgtgagcagtttctgggtaagaatgtgcaggacatcaaaaacgtcgtcctgcagaccctggagggacatctgcgctccatcctcgggaccctgacagtggagcagatttatcaggaccgggaccagtttgccaagctggtgcgggaggtggcagcccctgatgttggccgcatgggcattgagatcctcagcttcaccatcaaggacgtgtatgacaaagtggactatctgagctccctgggcaagacgcagactgccgtggtgcagagagatgctgacattggcgtggccgaggctgaacgggacgcaggcatccgggaagctgagtgcaagaaggagatgctggatgtgaagttcatggcagacaccaagattgctgactctaagcgagccttcgagctgcaaaagtcagccttcagtgaggaggttaacatcaagacagctgaggcccagttggcctatgagctgcagggggcccgtgaacagcagaagatccggcaggaagagattgagattgaggttgtgcagcgcaagaaacagattgccgtggaggcacaggagatcctgcgtacggacaaggagctcatcgctacagtgcgccggcctgccgaggccgaggcccaccgcatccagcagattgccgagggtgaaaaggtgaagcaggtcctcttggcacaggcagaggctgagaagatccgcaaaatcggggaggcggaagcggcagtcatcgaggcgatgggcaaggcagaggctgagcggatgaagctcaaggcagaagcctaccagaaatacggggatgcagccaagatggccttggtgctagaggccctgccccagattgctgccaaaatcgctgccccacttaccaaggtcgatgagattgtggtcctcagtggagacaacagtaaggtcacatcagaagtgaaccgactgctggccgagctgcctgcctctgtgcatgccctcacaggcgtggacctgtctaagatacccctgatcaagaaggccactggtgtgcaggtgtgaggctcctacaggcccactctcttcagcagccacccggccctccctccagcacccgttttaatcccacagaacaacgggaacgttactgactctggtgccttatctcgaagggaccagaagtgctgcgtgttcaggccatctctggctgtcttcctgtctctcctgtctgtccacctcctcctcttcctctcctttaccccactttcactgccactttcatcaggtttgtgtctcatctccctgcgtgtcttttcctttgtctgtctttttctttcccccatgcacatcatgtagattaagctgaagatgtttattacaatcactctctgtggggggtggccctgctgctcctcagaatcctggtgccttgaagttctctgtgcatctgtccatcctccctatggccctggccagagctcagcatgggcaggggttctgggtaggacggtcactgtcctctctcctggactggtcttcccagccctaaaccctgccccaggaagcccacagcctcacctgctgctgcccctctaggtctgggcagccatgacctgcagggcccagagacactgtccttcccctcatccacccaaggccccagccagcgctcataccctgtcctttctccctgaccccaagggcacagaggcaaggcctcctgtctacagcagcttcctcagtttcctactgccttaggaggcccctgcttgtgctcagggaaggcctcttcatgggcatgttcctgctggggcggtgcggtttggtcccaactctgctaagttttctgagatgagggtctagccctgttggggacagaaaagtgtgtagaccttcttcctgctagggctgcactgtcctgggtgttgggcccttctggtggacaaggctgtgccaaccctgtacagaatcgagtgctgtagcctggccagaccccagagcccttgtgccatctttcttcctggccagagtgatggggttccagccatggggaagcaacccaatcctctgtctccttgctccaatggaggcagaagagcccaggacccaagcgtcttggcaggggtgctgtgaatgtccagtggtcccagctccccaccctggccctgccccagcctgtgtagctcttcctgcatgtggatgctgcatgtctggtctggggcttggatgttgcactgccccactgcctgtcccttctggtaaaataaagaactcttaatgcccg

SEQ ID NO: 412 - protein, 379 aa, Homo sapien
MTLQPRCEDVETAEGVALTVTGVAQVKIMTEKELLAVACEQFLGKNVQDIKNVVLQTLEGHLRSILGTLTVEQIYQDRDQFAKLVREVAAPDVGRMGIEILSFTIKDVYDKVDYLSSLGKTQTAVVQRDADIGVAEAERDAGIREAECKKEMLDVKFMADTKIADSKRAFELQKSAFSEEVNIKTAEAQLAYELQGAREQQKIRQEEIEIEVVQRKKQIAVEAQEILRTDKELIATVRRPAEAEAHRIQQIAEGEKVKQVLLAQAEAEKIRKIGEAEAAVIEAMGKAEAERMKLKAEAYQKYGDAAKMALVLEALPQIAAKIAAPLTKVDEIVVLSGDNSKVTSEVNRLLAELPASVHALTGVDLSKIPLIKKATGVQV

SEQ ID NO: 413 - DNA, 818 bp, Homo sapien
cgcagcgggtcctctctatctagctccagcctctcgcctgcgccccactccccgcgtcccgcgtcctagccgaccatggccgggcccctgcgcgccccgctgctcctgctggccatcctggccgtggccctggccgtgagccccgcggccggctccagtcccggcaagccgccgcgcctggtgggaggccccatggacgccagcgtggaggaggagggtgtgcggcgtgcactggactttgccgtcggcgagtacaacaaagccagcaacgacatgtaccacagccgcgcgctgcaggtggtgcgcgcccgcaagcagatcgtagctggggtgaactacttcttggacgtggagctgggccgaaccacgtgtaccaagacccagcccaacttggacaactgccccttccatgaccagccacatctgaaaaggaaagcattctgctctttccagatctacgctgtgccttggcagggcacaatgaccttgtcgaaatccacctgtcaggacgcctaggggtctgtaccgggctggcctgtgcctatcacctcttatgcacacctcccaccccctgtattcccacccctggactggtggcccctgccttggggaaggtctccccatgtgcctgcaccaggagacagacagagaaggcagcaggcggcctttgttgctcagcaaggggctctgccctccctccttccttcttgcttctcatagccccggtgtgcggtgcatacacccccacctcctgcaataaaatagtagcatcggcaaaaaaaaaaaaaaaaaaaaaaaaaaaaaaaaaaaaaaaaaaa

SEQ ID NO: 414 - protein, 146 aa, Homo sapien
MAGPLRAPLLLLAILAVALAVSPAAGSSPGKPPRLVGGPMDASVEEEGVRRALDFAVGEYNKASNDMYHSRALQVVRARKQIVAGVNYFLDVELGRTTCTKTQPNLDNCPFHDQPHLKRKAFCSFQIYAVPWQGTMTLSKSTCQDA

SEQ ID NO: 415 - DNA, 2528 bp, Homo sapien
gagttccagcagtccgcgagctgccgtcggctccgcggggggggcgggccgggcaccccggggcgcggaggagcgctcctcgcttctctccttcccccctgccgcactccgccggaccctcccgccggcccgcgccgctgcactcgccctctcctctcgccccccggcaaactttcggcccctccccgcccctcgcccgttattcgtcgtggctcaagcccggccacgccgccccaagggctcctcccgacctcccggcctgccgctccggccactgcgggatccagaaacatgtcgaccacacttctgtccgccttctacgatgtcgacttcttgtgcaagacagagaaatccctggccaacctcaacctgaacaacatgctggacaagaaggcggtggggacgcctgtggccgccgcccccagctcgggcttcgcgccgggattcctccgacggcactcggccagcaacctgcatgcactcgcccaccccgcgcccagccccggcagctgctcgcccaagttcccgggcgccgctaacggcagcagctgcggcagcgcggcggccggcggtccgacctcctacggcacccttaaggagccgtcggggggcggcggcacagccctgctcaacaaggagaacaaattccgggaccgctcgtttagcgagaacggcgatcgcagccagcacctcctgcacctgcagcagcagcagaaggggggcggcggctcccagatcaactccacgcgctacaagaccgagctgtgccggcccttcgaggagagcggcacgtgcaagtacggcgaaaagtgccagttcgcgcatggcttccacgagctgcgcagcctgactcgccatccgaagtacaagaccgagctgtgccgcacctttcataccatcggcttctgcccctatgggccgcgctgccacttcatccacaacgcggacgagcggcggcccgcgccgtcggggggcgcctccggggacctgcgtgcctttggcacgcgcgatgcgttgcacctgggcttcccgcgggagccgcggcccaagttgcaccacagcctcagcttctcgggcttcccgtcgggccaccatcagcccccgggcggcctcgagtcgccgctgctgctcgacagccccacgtcgcgcacgccgccgccgccctcctgctcttcggcctcgtcctgctcctcctccgcctcctcctgttcctcggcctccgcggcctccacgccctcgggcgccccgacatgctgcgcctccgcggcggccgcggctgcggccgctctgctgtacggcaccgggggcgccgaggacctgctggcgccgggggccccgtgcgcggcctgctcgtcggcctcgtgcgccaacaacgccttcgccttcggtccggagctcagcagcctcatcacgccgctcgccatccagacccacaactttgccgccgtggccgccgccgcctactaccgcagtcagcagcagcagcagcagcagggcctggcgccccccgcgcagccgccggcgccgcccagcgcgaccctccccgccggggccgccgcacctccctcgccgcccttcagcttccagctgccgcgccgcctgtccgactcgcccgtgttcgacgcgccccccagccccccggactcgctgtcggaccgcgacagctacctaagcggctccctgagctccggcagcctcagcggctctgagtctcccagcctcgaccctggccgccgcctgccaatcttcagccgcctctccatctccgacgactgaggcaagagggcgccagtgaggaggaagggaaggcggttcagagatgttggaggacacccctcgccatctcgcccttgctgggggcacgggagtggggggggtgacatgggccctaggcagactgcaagcccgaccgagcacttggactcgaactctgtgccgggaggggcccccacccctcctttttcggtttcctcttgtctttttttttttatttttattacgaagtttcattctttttgagcaaaaaagtcgaactttttctgttgaacaaaatattcacaacagggcagttgtgatacgaatagaacaaaaaaaaaaaaaaaacacttaaactttgttaggactccgatgagtttgggacttcaggaaaaatcaacccagcaccagcagctaccaaccaccattccatctcttcacttgaacagcattagttaagtccagatgtgggaacccttctcttggaagaagttcctaattgtgtctcagaccggtgtaaacaaaccagccagccgccaccttgctaaacctataagctttttaaaatccaatatattctgccaagaatatgccttgatagttagccctcagcccataggtgttttttgttttttaacagaattatatatgtctgggggtgaaaaaacccttgcattccaaaggtccatactggttacttggtttcattgccaccacttagtggatgttcagtttagaaccattttgtctgctccctctggaagccttgcgca

SEQ ID NO: 416 - protein, 494 aa, Homo sapien
MSTTLLSAFYDVDFLCKTEKSLANLNLNNMLDKKAVGTPVAAAPSSGFAPGFLRRHSASNLHALAHPAPSPGSCSPKFPGAANGSSCGSAAAGGPTSYGTLKEPSGGGGTALLNKENKFRDRSFSENGDRSQHLLHLQQQQKGGGGSQINSTRYKTELCRPFEESGTCKYGEKCQFAHGFHELRSLTRHPKYKTELCRTFHTIGFCPYGPRCHFIHNADERRPAPSGGASGDLRAFGTRDALHLGFPREPRPKLHHSLSFSGFPSGHHQPPGGLESPLLLDSPTSRTPPPPSCSSASSCSSSASSCSSASAASTPSGAPTCCASAAAAAAAALLYGTGGAEDLLAPGAPCAACSSASCANNAFAFGPELSSLITPLAIQTHNFAAVAAAAYYRSQQQQQQQGLAPPAQPPAPPSATLPAGAAAPPSPPFSFQLPRRLSDSPVFDAPPSPPDSLSDRDSYLSGSLSSGSLSGSESPSLDPGRRLPIFSRLSISDD

SEQ ID NO: 417 - DNA, 5533 bp, Homo sapien
  Unsure 95: Unknown base
  Unsure 99: Unknown base
  Unsure 108: Unknown base
cagatttacgaggttctgttctagtgccaaaggctcttggtagtaaatagtgagcaaaatagatacctgtctcctgatggatcttgccagccccntccntattttttnttaagttatttattaaaaccacacacaccttgcaaagaaaaagggaaactggcagtctctgtagaggaagccggtggcatcgctcagagccacaaactgtatttctaaacagccctttccctggttccctctctcctgccccactttttttaaaatccagactgtaaaaaacacatctactgacactcactttactttaaaaaaagaagagaaaaagtaaagcgttacaagactttcctcctggaaactataaactgaaaaaaaaatccataaaagattaaatcctggcgggttgtggggtggcgggggccggcggggagggggcgcggagtggagattggctctctgaggtggtcaggggccctgtgacagcttgggactttcagcacctggtttggggtcatttatctgctcaactgtcaggaccccccacccccaaaccccagccaccaacacaaccatcgtagaagggaacacaacacagagggtcttttttcatttttttaaaaaatcggtttggttgtgtttttgttttccatgggggagctttaaaactcattattgcaacactagttccatttttcgccagggttccaataacacggcatcataaaggcaacgcaacccacagttctcaagacatttaccacggtcactacatccggcagcggggtggcccctagctcctgctgcccccccgccctttctccccgcccgcccccggagctcagccgatttctgaggctccaactctacccactccctccccgggccgccgccgccgcgccttcccccattcttactccctcgaggagagccacaggttgcaaatccaaccaacctcgcaatctatttttgcaaaatcactcacaaagatctccctttcgcgcccgcgcccgctcctcccgcgccgggtcccctcagccacggccacaaagtgcccttctctcctcctgagtcttgcacataaggaacgcgggctggggctctgttcgtctttctcctcgcccaaggtaaggacctcgggaatctgaagcctggcgtccactacgctcaggcccgcagttccctttttacagagcttgcaccatgggaaaaaataaaataaaatttaggaaagggaggcaacagccattgggagccaacacagagtcacgcagcgcccaaaatacaaacaccgcagcggccagaaatcccgccacctttctcgttctcccaggctgtcctgtcgaggttccctgagtccccccgcacactgaaaggcatcgcaggtgcagtgcgcacccctttcccacccaccccaagaagccctgtcccgccatcagtctctctcctcgggatgagcagggagagcgcgcggaggttcccgactccctcgactacaaccaagaaagaataattttcaaagtgttcaacatccccgcccccaagctccccaaaacacaggggcagggaacaccaaaacactcggctctcgttaggaagatcacggctctgaaaggaaatagtagacacgatacttcatctcatctggatttatgaccaaaaaaacaaaaacaaaaacccaaagagttcgcttgcattttttccttccaaatctcggttcggctcgaaggcagggaatctaaaagaccgaggccgatggaagagagccagcggggcgagcgagcgggcagcctccctttttgcctcccggagtcacccgttattcgtcgtggctcaagcccggccacgccgccccaagggctcctcccgacctcccggcctgccgctccggccactgcgggatccagaaacatgtcgaccacacttctgtccgccttctacgatgtcgacttcttgtgcaagacagagaaatccctggccaacctcaacctgaacaacatgctggacaagaaggcggtggggacgcctgtggccgccgcccccagctcgggcttcgcgccgggattcctccgacggcactcggccagcaacctgcatgcactcgcccaccccgcgcccagccccggcagctgctcgcccaagttcccgggcgccgctaacggcagcagctgcggcagcgcggcggccggcggtccgacctcctacggcacccttaaggagccgtcggggggcggcggcacagccctgctcaacaaggagaacaaattccgggaccgctcgtttagcgagaacggcgatcgcagccagcacctcctgcacctgcagcagcagcagaaggggggcggcggctcccagatcaactccacgcgctacaagaccgagctgtgccggcccttcgaggagagcggcacgtgcaagtacggcgaaaagtgccagttcgcgcatggcttccacgagctgcgcagcctgactcgccatccgaagtacaagaccgagctgtgccgcacctttcataccatcggcttctgcccctatgggccgcgctgccacttcatccacaacgcggacgagcggcggcccgcgccgtcggggggcgcctccggggacctgcgtgcctttggcacgcgcgatgcgttgcacctgggcttcccgcgggagccgcggcccaagttgcaccacagcctcagcttctcgggcttcccgtcgggccaccatcagcccccgggcggcctcgagtcgccgctgctgctcgacagccccacgtcgcgcacgccgccgccgccctcctgctcttcggcctcgtcctgctcctcctccgcctcctcctgttcctcggcctccgcggcctccacgccctcgggcgccccgacatgctgcgcctccgcggcggccgcggctgcggccgctctgctgtacggcaccgggggcgccgaggacctgctggcgccgggggccccgtgcgcggcctgctcgtcggcctcgtgcgccaacaacgccttcgccttcggtccggagctcagcagcctcatcacgccgctcgccatccagacccacaactttgccgccgtggccgccgccgcctactaccgcagtcagcagcagcagcagcagcagggcctggcgccccccgcgcagccgccggcgccgcccagcgcgaccctccccgccggggccgccgcacctccctcgccgcccttcagcttccagctgccgcgccgcctgtccgactcgcccgtgttcgacgcgccccccagccccccggactcgctgtcggaccgcgacagctacctaagcggctccctgagctccggcagcctcagcggctctgagtctcccagcctcgaccctggccgccgcctgccaatcttcagccgcctctccatctccgacgactgaggcaagagggcgccagtgaggaggaagggaaggcggttcagagatgttggaggacacccctcgccatctcgcccttgctgggggcacgggagtggggggggtgacatgggccctaggcagactgcaagcccgaccgagcacttggactcgaactctgtgccgggaggggcccccacccctcctttttcggtttcctcttgtctctttttttttatttttattacgaagtttcattctttttgagcaaaaaagtcgaactttttctgttgaacaaaatattcacaacagggcagttgtgatacgaatagaacaaaaaagaaaaaaaaaacacttaaactttgttaggactccgatgagtttgggacttcaggaaaaatcaacccagcaccagcagctaccaaccaccattccatctcttcacttgaacagcattagttaagtccagatgtgggaacccttctcttggaagaagttcctaattgtgtctcagaccggtgtaaacaaaccagccagccgccaccttgctaaacctataagctttttaaaatccaatatattctgccaagaatatgccttgatagttagccctcagcccataggtgttttttgttttttaacagaattatatatgtctgggggtgaaaaaacccttgcattccaaaggtccatactggttacttggtttcattgccaccacttagtggatgttcagtttagaaccattttgtctgctccctctggaagccttgcgcagagcttactttgtaattgttggagaataactgctgaatttttagctgttttgagttgattcgcaccactgcaccacaactcaatatgaaaactatttaacttatttattatcttgtgaaaagtatacaatgaaaattttgttcatactgtatttatcaagtatgatgaaaagcaatagatatatattcttttattatgttaaattatgattgccattattaatcggcaaaatgtggagtgtatgttcttttcacagtaatatatgccttttgtaacttcacttggttattttattgtaaatgagtacaaaattcttaatttaagagattgtatgtaatatttatttcattaatttctttccttgtttacgtaaattttgaaagattgcatgatttcttgacagaaatcgatcttgatgctgtggaagtagtttgaggaacatcctatgagttttcttagaatgtataaaggttgtagcccatccaacttcaaagaaaaaaatgaccacatactttgcaatcaggctgaaatgtggcatgcttttctaattccaactttataaactagcaaaaaagtgtttgcttattccaccagttctactgtgacatactcgagtataaagacatgtagcaataacggggagtggggggggagtctcacagtgcctttggaagggcccgaacttgccttaaatcttcctcaaccaaataagtattttattagtgcttgagagaatctgaatgtaggatgggttcaactgcacaaaaggaaaagatttttaccactttttttatatagatataaagtgaagcaaccgccttagtgctgaaatatgtagtacatgaatatgccttgtttaattacagaaaattccaaaacttgtactattttttttttccatgtagaaaggcaggaatgtctcctaagctttcctggacagcagatgaatgagcggtagctttagtttgtacgtaggtacagttggagcactatatgtactctctggactactttggacagaagtaggtttttgaatgtaacaagataagtcaacttgagttgtaatatattttggggaatcagctcactacaaattgtgactgtaaacattgtactgtaaatgttttgtagttttcccccaataaaatttttgggaaaaaaaggtattaacatgtaagagctttctttttaaacaggaatgtcttagctttctagcttcccagctaaccatgtctgccattccccaggtcttggcatggtgggggaggacttggagagctggcagagccagagttcagaagagcctgcgtcctctcagcccgtatatattttataagcaagttcttctaatgaaagaaagtaattatttggactgtcaagggcattagtt

SEQ ID NO: 418 - protein, 546 aa, Homo sapien
MEESQRGERAGSLPFCLPESPVIRRGSSPATPPQGLLPTSRPAAPATAGSRNMSTTLLSAFYDVDFLCKTEKSLANLNLNNMLDKKAVGTPVAAAPSSGFAPGFLRRHSASNLHALAHPAPSPGSCSPKFPGAANGSSCGSAAAGGPTSYGTLKEPSGGGGTALLNKENKFRDRSFSENGDRSQHLLHLQQQQKGGGGSQINSTRYKTELCRPFEESGTCKYGEKCQFAHGFHELRSLTRHPKYKTELCRTFHTIGFCPYGPRCHFIHNADERRPAPSGGASGDLRAFGTRDALHLGFPREPRPKLHHSLSFSGFPSGHHQPPGGLESPLLLDSPTSRTPPPPSCSSASSCSSSASSCSSASAASTPSGAPTCCASAAAAAAAALLYGTGGAEDLLAPGAPCAACSSASCANNAFAFGPELSSLITPLAIQTHNFAAVAAAAYYRSQQQQQQQGLAPPAQPPAPPSATLPAGAAAPPSPPFSFQLPRRLSDSPVFDAPPSPPDSLSDRDSYLSGSLSSGSLSGSESPSLDPGRRLPIFSRLSISDD

SEQ ID NO: 419 - DNA, 2528 bp, Homo sapien; identical to SEQ ID NO: 415

SEQ ID NO: 420 - protein, 494 aa, Homo sapien; identical to SEQ ID NO: 416

SEQ ID NO: 421 - DNA, 14800 bp, Homo sapien
cgcccgggcaggtggcggcagagctgaagtgagcggagccaccaggaggccatgtcgggtgaggacgctgaggtccgggcagtctctgaagatgtctccaatggaagcagtggctcgcccagccctggggacacactgccctggaaccttgggaaaacgcagcggagccggcgcagcgggggtggcgctgggagcaacgggagtgtcctggacccagctgagcgggcggtcattcgcatcgcagatgagcgggatcgtgtgcagaagaaaaccttcaccaagtgggtcaacaagcacctcatcaaggcccagaggcacatcagtgacctgtatgaagacctccgcgatggccacaacctcatctccctgctggaggtcctctcgggggacagcctgccccgggagaaggggaggatgcgtttccacaagctgcagaatgtccagattgccctggactacctccggcaccgccaggtgaagctggtgaacatcagggatgatgacatcgctgacggcaaccccaagctgacccttggcctcatctggacaatcattctgcacttccagatctcagatatccaggtgagtgggcagtcggaggacatgacggccaaggagaagctgctgctgtggtcgcagcgaatggtggaggggtaccagggcctgcgatgcgacaacttcacctccagctggagagacggccgcctcttcaatgccatcatccaccggcacaagcccctgctcatcgacatgaacaaggtgtaccggcagaccaacctggagaacctggaccaggccttctctgtggcggagcgggacctgggagtgacgcggctcctggaccctgaggacgtggatgtccctcagcccgacgagaagtccatcatcacctacgtctcgtcgctgtatgacgccatgccccgcgtgccggacgtgcaggatggggtgagggccaacgagctgcagctgcgctggcaggagtaccgggagctggtgctgctgctgcttcagtggatgcgacaccacacggccgcctttgaggaacgcaggttcccctccagcttcgaggagattgagatcctgtggtctcagttcctgaagtttaaggagatggagctaccagccaaggaggccgacaagaacaggtccaagggcatctaccaatccctggagggagcggtgcaagcaggccagctcaaggtgccccctggctaccacccgctggatgtggagaaggagtggggcaagctgcacgtggccatcctggagcgggagaagcagctccgcagcgagtttgagaggctggagtgtcttcagcgcatcgtgaccaagctgcagatggaggcggggctgtgtgaggagcagctgaaccaggccgacgccctgctgcagtcggatgtccggctgctggctgcaggcaaagtgccacagcgggcgggggaggtggaacgggacttggacaaggcggatagcatgatccggctgctcttcaacgacgtgcagaccctcaaggatggacggcacccgcagggcgagcagatgtaccgcagggtgtaccgtctgcacgagcgcctggtagccatccgcaccgagtacaacctacggctgaaggcaggcgtggcggcccctgcaacccaggtggcccaggtgactctgcagagtgtgcagaggcgccccgagctggaggactccactctgcgctacctgcaggacctgctggcctgggtggaggagaaccagcaccgtgtggatggcgctgagtggggtgtggacctgcccagcgtggaggcgcagctgggcagccaccgaggcctgcaccagtccatcgaagaattccgggccaagatcgagcgggcacggagtgacgagggccagctctcccccgccacccggggtgcctaccgtgactgcctgggtcggctggacctgcagtacgccaagctgctgaactcctccaaggcccgcctcaggtccctggagagcttgcacagctttgtggcagccgccactaaggagctaatgtggctgaatgagaaggaggaggaggaggtgggcttcgactggagcgaccgcaacaccaacatgaccgccaagaaggagagctactcggcgctgatgcgggagctggagctgaaggagaagaagatcaaggagctccaaaatgctggggaccggctgctgcgggaggaccacccggcccggcccacggtggagtccttccaggcggccctgcagacgcagtggagctggatgctacagctgtgctgctgtatcgaggcacacctgaaggagaacgctgcctactttcagttcttctcagatgtgcgggaggccgaggggcagttgcagaagctgcaggaggcactgcgtaggaaatacagttgtgatcgctccgccaccgtcacccggctggaggacctgctgcaggatgcccaggacgagaaggaacagctgaacgagtacaagggccacctctcaggcctggccaagcgggccaaggccgtcgtgcagctgaagccccgccacccagcccaccccatgcggggccgcctgcccctgctggccgtgtgcgactataagcaggtggaggtgactgtgcacaagggtgacgagtgccagctggtgggccctgcacagccgtcccactggaaggtgctcagcagctccggcagcgaggccgccgtgccctccgtgtgcttcctggtgcccccgcccaaccaggaggcccaggaggccgtcaccaggctggaggcccagcaccaggccctggtcacgctgtggcaccagttgcacgtggacatgaagagccttctggcctggcagagccttcgccgcgacgtgcagctcatccgctcgtggtccctggccacgttccgcaccctgaagccagaggagcagcgccaagccctgcacagcctggagctgcactaccaggccttcctgcgggacagccaggacgcgggcggcttcggacccgaggaccggctgatggctgagcgcgagtacggctcctgcagccaccactaccagcagctgctgcagagcctggaacagggtgcacaggaagagtctcgctgccagcgctgcatctccgagctcaaagacatccggctgcagctggaggcctgtgagacgcgcaccgtgcaccgcctgcggctgccgctggacaaagagccggcacgggagtgtgcccagcgcatcgccgagcagcagaaggcacaggcagaggtggaggggctgggcaagggggtcgcccggctctctgccgaggccgagaaggtcttggccctaccagagccatcgcctgcggcccccacgctgcgctcggagctggagctgacgctgggcaagctggagcaggtccgcagcctgtctgccatctacctggagaagctcaagaccatcagcctggtgatccgcggcacgcagggggccgaggaggtgctcagggcccacgaggagcagctcaaggaggcccaggccgtgccggccaccctcccggagctcgaggccaccaaggcctctctgaagaagctgcgggcccaggccgaggcacagcagcccacgttcgacgccctgcgggatgagctgcggggggcacaggaggtgggggagcgactgcagcagcggcacggggagcgggacttggaggtggagcgctggcgggagcgggtcgcccaggtgcttgagcgctggcaggctgtgctggcccagaccgacttgcggcagcgcgagctcgagcaactgggccgccagctgcgttactaccgcgagagtgcagaccccttgggcgcctggctgcaggacgccaggcggcggcaggagcagatccaggccatgccgctggccgacagccaggctgtgcgggagcagctgcggcaggagcaggccctgctggaggagatcgagcgccacggcgagaaggtcgaggagtgccagaggtttgcgaaacagtacatcaacgccatcaaggactatgaactccagctggtgacgtacaaggcgcagcttgagccggtggcctccccggccaagaagcccaaggtccagtcgggatcagagagtgtcatccaggagtacgtggacctgcgtacgcactacagcgagctgaccacactgacgagccagtacatcaagttcatcagcgagactctgcggcgcatggaggaggaggagaggctggctgagcagcagcgggcagaggagcgcgagcggctggccgaggtggaggccgcgctggagaagcagcggcagctggccgaggcgcacgcccaggcaaaggcacaggcggagcgggaggcgaaggagctgcagcagcgcatgcaggaggaggtggtgcggcgggaggaggcggcggtggacgcgcagcagcagaagcgcagcattcaggaggagctgcagcagctgcggcagagctcggaggcggagatccaggccaaggcccggcaggcagaggcggctgagcgcagccggctgcgcatcgaggaggagatccgcgtggtgcgcctgcagttggaggccaccgagcgccagcgtggcggggctgagggggagctgcaggcactgcgtgcacgggcggaggaggctgaggcacaaaagcgacaggcgcaggaggaggccgagcgcttgcggaggcaggtgcaggacgagagccagcgtaagcggcaggcggaggtggagctggcctcgcgcgtgaaggccgagaccgaggcggcgcgcgagaagcagcgggccctgcaggccctggaggagctgcggctgcaggcggaggaggcggagcggcgcctgcggcaggccgaggtggagcgagcgcggcaggtacaggtggccctggagacggcgcagcgcagtgcagaggcggagctgcagagcaaacgcgcctccttcgccgagaagacggcacagctggagcgctccctgcaggaggaacacgtggctgtggcacagctgcgggaggaggctgagcggcgggcacagcagcaggccgaggccgagcgggcgcgcgaggaggcagagcgggagctggagcgctggcagctcaaggccaacgaggcgctacggctgcggctgcaggcggaggaggtggcgcagcagaagagcctggcgcaggccgaggctgagaagcagaaggaggaggcggagcgcgaggcgcggcggcgcggcaaggcggaggagcaggccgtccggcagcgggagctggctgaacaagagctggagaagcagcggcagctggcggaaggcaccgcgcagcagcgcctggccgcggagcaggagttgatccggctgcgggccgagacggagcagggggagcagcagcggcagctgctggaggaggagctggcccggctgcagcgtgaggcggctgcagccacgcagaaacggcaggagctggaagccgagctggccaaggtgcgggccgagatggaggtgctgctggccagcaaggcgagggctgaggaggagtcgcgctccaccagcgagaagtccaagcagaggctggaggccgaggccggccggttccgcgagctggccgaggaggccgcccgcctgcgtgccctggcggaagaggccaagcggcagcggcagctggccgaggaagacgcggcgcggcagcgggccgaggcggagcgggtgcttgcggagaagctggccgccatcggcgaggccacgcggctcaagacggaggcggagatcgcgctcaaggagaaggaggcggagaacgagcgcctgcggcggctggcggaggacgaggccttccagcggcggcggctggaggagcaggccgcgcaacacaaggctgacatcgaggagcgcctggcccagctgcgcaaggcatcggacagcgagctggagcggcagaaggggctggtggaggacacgctgaggcagcggcggcaggtggaggaagagatcctggcgctgaaggcgagcttcgagaaggcggccgctggcaaggcggagctggagctggagctgggacgcatccgcagcaacgcggaggacacgctgcgcagcaaggagcaggccgagctggaggccgcgaggcagcggcagctggcggcggaggaggagcggcggcgccgtgaggctgaggagcgcgtgcagaagagcctggcggccgaggaggaggccgcacggcagcggaaggcggcgctggaggaagtcgagcggctgaaagccaacgtggaggaggcgcggcgcctgcgggagcgagcggagcaggagtcggcgcggcagctgcagctggcccaggaggccgcccagaagcggctgcaggcggaagagaaggcacacgccttcgcggtgcagcagaaggagcaggagctacagcagacgctgcagcaggagcagagcgtgctggaccagctgcgcggcgaggcggaggcggcccggcgggcggctgaggaggcggaggaggcccgggtgcaggcggagcgtgaggcggcgcaggcccggcggcaggtggaagaggccgagcggctgaagcagtcggcagaggagcaggcacaggcccgggctcaggcacaggcggctgcagagaagctgcgcaaggaggccgagcaagaggcggcgcggcgggcacaggcggagcaggcggccctgcggcagaagcaggcagctgacgcggagatggagaagcataagaaattcgccgagcagacgctgcggcagaaggcgcaggtggagcaggagctgacaacactgcggctgcagctggaggagaccgaccaccagaagaacctgctggacgaggagctgcagcggctgaaggcggaggccacggaggccgcacgccagcgcagccaggtggaggaggagctcttctcggtgcgcgtgcagatggaggagctgagcaagctcaaggcacgcatcgaggctgagaaccgcgcactcatcttgcgtgacaaggacaatacgcagcgcttcctgcaggaggaggctgagaagatgaagcaggtggcggaggaggccgcgcggctgagtgtggcggcccaagaggctgcgcgactgcggcagctggcagaggaggacctggcacagcagcgggccttggcagagaagatgctcaaggagaagatgcaggcggtgcaggaggccacgcgactcaaggctgaggcggaactgctgcagcagcagaaggagcttgcgcaggagcaggcgcggcggctgcaggaggacaaggagcagatggcgcagcagctggcggaggagacgcagggcttccagcggacgctggaggccgagcggcagcggcagctggagatgagcgctgaggctgagcgcctcaagctgcgtgtggccgagatgagccgagcccaggcccgcgctgaggaggacgcccagcgcttccggaagcaggcggaggagatcggtgagaagctgcaccgcacggagctcgccacccaggagaaggtgaccctggtgcagacactggagatccagcgacagcagagtgaccatgatgccgagcgcctgcgggaggccatcgctgagctggagcgtgagaaggagaagctccaacaggaggccaaactgctgcagctcaagtctgaggagatgcagacggtgcagcaggagcagctgctgcaggagacgcaggccctgcagcaaagcttcctctctgaaaaggacagcctgctacagcgggagcgcttcatcgagcaggagaaggccaagctggagcagctcttccaggacgaggtggccaaggcacagcagctgcgtgaggagcagcagcggcagcagcagcagatggagcaggaacggcagcggctggtggccagcatggaggaggcgcggcggcggcagcatgaggccgaggagggcgtgcggcgcaagcaggaggagctgcagcagctggagcagcagcggcggcagcaggaggagctgctggctgaggagaaccagaggctgcgtgagcagctgcagctcctggaggagcagcaccgggccgcgctggcgcactcagaggaggtcactgcctcgcaggtggctgccacaaagaccctgcccaatggccgggatgcacttgatggccccgcggcagaggcagagccggagcacagcttcgatggcctgcggcggaaggtgtcagctcagaggctgcaggaggccggcatcctgagtgcggaggagctgcagcggttggcgcagggccacaccacggtggacgagctcgcacggcgggaagacgtgcgccactacctgcagggccgcagcagtatcgcagggctgttgctgaaggccaccaatgagaagctgagtgtttacgccgccctgcagaggcagctgctgagtcccggcacggccctcatcctgctggaggcgcaggcggcctcaggcttcctgctggaccctgtgcggaaccggcggctgaccgtcaacgaggctgtgaaggagggtgtggtgggccccgagctgcaccacaagctgctgtcggccgagcgcgccgtcactggctacaaggacccctacactggccagcagatctctctcttccaagccatgcagaagggcctcatcgtccgggagcacggcatccgcctgctggaggcccagatcgccacgggcggcgttatcgaccccgtgcacagccaccgcgtgcccgtggacgtggcctaccggcgcggctacttcgacgaggagatgaaccgcgtcctggcggaccccagcgacgacaccaagggcttctttgaccccaacacgcacgagaacctcacgtacctgcagctactggagcgctgcgtggaggaccccgagacgggcctgtgccttctgccactcacggataaggctgccgagggcggggagctggtctacactgactccgaggcccgggacgtctttgagaaggccaccgtgtctgcgccgttcggcaagttccagggcaagacggtgaccatttgggagatcatcaactcggaatacttcacggcagagcagcggcgggacctgctgcggcagttccgcacgggccggatcacagtggagaagatcatcaagatcatcatcacggtggtggaggagcaggagcagaagggccggctttgctttgagggcctgcgcagcctggtgccagccgccgagctgctggagagcagggtcatcgaccgcgagctctaccagcagctgcagcgaggtgagcgctctgtgcgagacgtagccgaggtggacactgtgcggcgggctctccggggtgccaacgtcatcgcgggtgtatggctggaggaggcggggcagaagctgagtatctacaatgccctgaagaaagacctgctgccatccgacatggccgtggccctgttggaagcccaggccggcaccgggcacatcatcgaccccgccaccagcgcccggctgaccgtggacgaggcagtgcgtgctggcctggtgggccccgagtttcatgagaagctgctatcagccgagaaggctgtgacagggtacagggacccctacacagggcagagcgtctccctgttccaggccctgaagaagggcctcattccccgggagcagggcctgcgcctgttggacgcccagctgtccacgggcggcatcgtggaccccagcaagagccaccgcgtgcccctggatgtcgcctgcgcccgaggctgcctggatgaggagaccagcagggccctgtcggcaccaagggccgacgccaaggcctacagtgaccccagcacaggggagccggccacctacggcgagctccagcagcggtgccggcccgaccagctgaccgggctgagcctgctgccgctctcagaaaaggctgctcgggcccggcaggaggagctctactcagagctgcaggcccgtgagacctttgaaaagaccccggttgaggtccccgtgggtggcttcaagggcaggacggtgacggtgtgggagctcatcagctctgagtacttcactgcggagcagcggcaggagctgttgcgtcagttccgcacgggcaaggtcaccgtggagaaggtcatcaagattctcattaccatcgtggaggaggtggagaccctgcggcaggagaggctgtccttcagcggcctccgtgcccctgtgccagccagcgagctcctggcttccggggtcctcagcagagcccagtttgagcagctcaaggacggcaagacgacggtcaaggacctttcggagctgggctccgtgcggacgctgctgcagggcagtggctgcctcgccggcatctacctggaggacaccaaggagaaggtgtccatctacgaggccatgcgccggggcctgctgagagccacaacggctgcgctcctgctggaggcgcaggcggccactggcttcctggtggaccccgtgcggaaccagcgcctgtatgtccacgaggccgtgaaggcgggcgtggtgggccccgagcttcacgagcagctgctgtctgccgagaaggccgtcaccggctacagagacccctactcgggcagcaccatctccctcttccaggccatgcagaagggcctggttctccggcagcacggcatccgcctgctggaggcccagatcgccacgggcggcatcatcgaccccgtgcacagccaccgcgtgcctgtggacgtggcctaccagcgcggctacttcagtgaggagatgaaccgcgtcctggcggaccccagcgacgacaccaagggcttctttgaccccaacacgcatgagaacctcacgtacaggcagctgctggagcggtgcgtggaggaccccgagacgggcttgcgccttctgccactgaaaggggcggagaaggctgaggtggtggagaccacgcaggtgtacactgaggaggagacaagaagggcatttgaagagacacagatcgacattcccggcggcggcagccacggcggctccaccatgtccctgtgggaggtgatgcagtcggacctgatccccgaggagcagcgggcccagctgatggctgacttccaggccggccgggtgaccaaggaacgcatgatcatcatcatcatcgagatcattgagaagacagagatcatccgccagcagggtctggcctcctatgactacgtgcgccgccgcctcacggctgaggacctgttcgaggctcggatcatctctctcgagacctacaacctgctccgggagggcaccaggagcctccgtgaggctctcgaggcggagtccgcctggtgctacctctatggcacgggctccgtggctggtgtctacctgcccggttccaggcagacactgagcatctaccaggctctcaagaaagggctgctgagtgccgaggtggcccgcctgctgctggaggcacaggcagccacaggcttcctgctggacccggtgaagggggagcggctgactgtggatgaggctgtgcggaagggcctcgtggggcccgagctgcacgaccgcctgctctcggctgagcgggcggtcaccggctaccgtgacccctacaccgagcagaccatctcgctcttccaggccatgaagaaggagctgatccctactgaggaggccctgcggctgctggatgcccagctggccaccggcggcatcgtggacccccgcctgggcttccaccttcccctggaggtggcttaccagcgtggctacctcaacaaggacacgcacgaccagctgtcagagcccagcgaggtgcgcagctacgtggacccgtccaccgacgagcgcctcagctacacgcagctgctcaggcggtgccgtcgtgacgacggcaccggccagctgctcctgccactgtcggacgcccgcaagctgaccttccgtggcctgcggaagcagatcaccatggaggagctggtgcgctcgcaggtcatggacgaggccacggcgctgcagctgcgggagggcctgacctccatcgaggaggtcaccaagaacttgcagaagttcctggaaggcaccagctgcatcgctggtgtcttcgtggacgccaccaaggaacggctctcggtgtaccaggccatgaagaaaggcatcatccgccccggcacagcctttgagctcctggaggcgcaggcggccaccggttacgtcatcgaccccatcaagggactgaagctgacggtggaggaggctgtgcgtatgggcattgtgggccccgagttcaaggacaagctgctgtcggccgagcgcgccgtcactgggtacaaggacccctactctgggaagctcatctccctcttccaggccatgaagaagggcctgatcctgaaggaccatggcatccgcctgctggaggcccagatcgccacgggcggcatcatcgaccctgaggagagccaccggctgcccgtggaggtggcctacaagcgcggcctcttcgatgaggagatgaacgagatcctgaccgacccctcggacgacaccaagggcttctttgaccctaacacggaggagaacctcacctacctgcagctgatggagcgttgtatcactgacccccagacgggcctgtgtctcttgccgctgaaggagaagaagcgggagcggaagacgtcctccaagtcctccgtgcgcaagcgccgagtggtcatcgtggaccccgagacgggcaaggagatgtcagtgtacgaggcctaccgcaagggcctgattgaccaccagacgtacctggagctgtccgagcaggagtgcgagtgggaggagatcaccatctcctcctcggacggcgtggtcaagtccatgatcatcgaccgccgctccgggcgccagtacgacatcgatgatgccatcgccaagaacctcatcgaccgctcggcactggaccagtaccgcgccggcacgctctccatcaccgagttcgccgacatgctctcgggcaacgccggtggtttccgctcccgttcctcctcggtgggatcctcctcctcctaccccatcagccccgccgtctccaggacccagctggcctcctggtcagaccccactgaggagacgggccccgtggctggcatcctggacacggagacgctggagaaggtgtccatcaccgaggccatgcaccggaacctggtggataacatcacggggcagcggctgctggaggcgcaggcctgcaccgggggcatcatcgaccccagcaccggtgagcgcttccctgtcaccgacgccgtcaacaagggcctggtggacaagatcatggtggaccgcatcaacctggcccagaaggccttttgcggcttcgaggacccacgcaccaagaccaagatgtcggccgcccaggccctgaagaagggctggctctactacgaggccggccagcgcttcctggaggtgcagtacctgaccggcggcttgatcgagcccgacacgccgggccgcgtgcccctggacgaggccctgcagcgcggcacggtggacgcccgcaccgcacagaagctgcgtgacgtgggcgcctactccaagtacctcacctgccctaagaccaagctcaagatctcctataaggacgcgctggaccgcagcatggtggaggagggcacggggctgcggctgctggaggctgccgcgcagtccaccaagggctactacagcccctacagcgtcagcggctccggctctaccgctggctcccgcaccggctcgcgcaccggctcccgggccggctcccgccgcggcagctttgacgccaccggctccggcttctccatgaccttctcttcatcctcctactcctcctcgggctacggccgccgctacgcctcggggtcctcggcctccctggggggccctgagtctgccgtggcctgaggctgcctgcgcccaccccgctctgcatgcggcccagcccggctcccaccgaggcgcgggggccgttttcaacgcttaaaggtgtcttcctcccaagtggtgcctaaagtttaaccaaaaagaccagactaatatattaatatatatctgctgtccagacagcctgtatcttgggggacagggctggcccagccctgctggccgcctcaccccctcgggtctcctcactcccttctacctgccactcacacagccaggtgccttggagggtcccaagctgggccccagcccaccctcctgtcttcccagggtagcccgcctgccagtcctagctgcacagggcagctgggcccaaccctgtctgtagagggccctggtgtttctagcactggcctgcacggtgggccttgctggggacggggggccccagtcagcctctctcccagtctacccagagaagccccttccccatgggaagacgaggccctcgggcccagcccccacagtgctgtctgatctgtgctttccagctcaccccccacactcactcctgagacccctggcctccggcgtcagcctccagcctctgttcccctagtaagtgccttccatgtcggcctctaaccccaggccccgaggacccagacccagtggggaggcggacgttccagccggcatggctgggaactgcagacctgtcctcctggtgggtccaggggcccctccagcttgtggagccccacactggggtgccgcctgcccgtctctctcccatggagccccagccccctttgggcccagggacaccagccaggctctgtgctgaccctcctgttgcgcccagccctggtctcagcagcgaccacccctgcctccaccctctgagctttgcatgttccactaaccccgggcgggtggcaggtggaggtgtcaggctgctggcgcctctgcaagggcagaacactaacctgaccgtgggcggggccttgcggtatccgcccccaataaaagcaattccaacctt

SEQ ID NO: 422 - protein, 2000 aa, Homo sapien
MSGEDAEVRAVSEDVSNGSSGSPSPGDTLPWNLGKTQRSRRSGGGAGSNGSVLDPAERAVIRIADERDRVQKKTFTKWVNKHLIKAQRHISDLYEDLRDGHNLISLLEVLSGDSLPREKGRMRFHKLQNVQIALDYLRHRQVKLVNIRDDDIADGNPKLTLGLIWTIILHFQISDIQVSGQSEDMTAKEKLLLWSQRMVEGYQGLRCDNFTSSWRDGRLFNAIIHRHKPLLIDMNKVYRQTNLENLDQAFSVAERDLGVTRLLDPEDVDVPQPDEKSIITYVSSLYDAMPRVPDVQDGVRANELQLRWQEYRELVLLLLQWMRHHTAAFEERRFPSSFEEIEILWSQFLKFKEMELPAKEADKNRSKGIYQSLEGAVQAGQLKVPPGYHPLDVEKEWGKLHVAILEREKQLRSEFERLECLQRIVTKLQMEAGLCEEQLNQADALLQSDVRLLAAGKVPQRAGEVERDLDKADSMIRLLFNDVQTLKDGRHPQGEQMYRRVYRLHERLVAIRTEYNLRLKAGVAAPATQVAQVTLQSVQRRPELEDSTLRYLQDLLAWVEENQHRVDGAEWGVDLPSVEAQLGSHRGLHQSIEEFRAKIERARSDEGQLSPATRGAYRDCLGRLDLQYAKLLNSSKARLRSLESLHSFVAAATKELMWLNEKEEEEVGFDWSDRNTNMTAKKESYSALMRELELKEKKIKELQNAGDRLLREDHPARPTVESFQAALQTQWSWMLQLCCCIEAHLKENAAYFQFFSDVREAEGQLQKLQEALRRKYSCDRSATVTRLEDLLQDAQDEKEQLNEYKGHLSGLAKRAKAVVQLKPRHPAHPMRGRLPLLAVCDYKQVEVTVHKGDECQLVGPAQPSHWKVLSSSGSEAAVPSVCFLVPPPNQEAQEAVTRLEAQHQALVTLWHQLHVDMKSLLAWQSLRRDVQLIRSWSLATFRTLKPEEQRQALHSLELHYQAFLRDSQDAGGFGPEDRLMAEREYGSCSHHYQQLLQSLEQGAQEESRCQRCISELKDIRLQLEACETRTVHRLRLPLDKEPARECAQRIAEQQKAQAEVEGLGKGVARLSAEAEKVLALPEPSPAAPTLRSELELTLGKLEQVRSLSAIYLEKLKTISLVIRGTQGAEEVLRAHEEQLKEAQAVPATLPELEATKASLKKLRAQAEAQQPTFDALRDELRGAQEVGERLQQRHGERDLEVERWRERVAQVLERWQAVLAQTDLRQRELEQLGRQLRYYRESADPLGAWLQDARRRQEQIQAMPLADSQAVREQLRQEQALLEEIERHGEKVEECQRFAKQYINAIKDYELQLVTYKAQLEPVASPAKKPKVQSGSESVIQEYVDLRTHYSELTTLTSQYIKFISETLRRMEEEERLAEQQRAEERERLAEVEAALEKQRQLAEAHAQAKAQAEREAKELQQRMQEEVVRREEAAVDAQQQKRSIQEELQQLRQSSEAEIQAKARQAEAAERSRLRIEEEIRVVRLQLEATERQRGGAEGELQALRARAEEAEAQKRQAQEEAERLRRQVQDESQRKRQAEVELASRVKAETEAAREKQRALQALEELRLQAEEAERRLRQAEVERARQVQVALETAQRSAEAELQSKRASFAEKTAQLERSLQEEHVAVAQLREEAERRAQQQAEAERAREEAERELERWQLKANEALRLRLQAEEVAQQKSLAQAEAEKQKEEAEREARRRGKAEEQAVRQRELAEQELEKQRQLAEGTAQQRLAAEQELIRLRAETEQGEQQRQLLEEELARLQREAAAATQKRQELEAELAKVRAEMEVLLASKARAEEESRSTSEKSKQRLEAEAGRFRELAEEAARLRALAEEAKRQRQLAEEDAARQRAEAERVLAEKLAAIGEATRLKTEAEIALKEKEAENERLRRLAEDEAFQRRRLEEQAAQHKADIEERLAQLRKASDSELERQKGLVEDTLRQRRQVEEEILALKASFEKAAAGKAELELELGRIRSNAEDTLRSKEQAELEAARQR

SEQ ID NO: 423 - DNA, 2591 bp, Homo sapien
gtcgtggaagcaggactgcgccgcgtcttcctcaaggtggggttcggggggccaccgaatcgctgtcacgccggcaggttgagaacaaaaacatgcacctggagtttccccggagccctctgcgtggttgagcttcggtggaatttcggggctcttggctgccagccgcgcttgcctggtagcaacagaaaccagtcctgctctcctccgtggacatttcattaccatccagaagtgtctcccactgaaggcatccgtggttgtttttaagccacaaaaaagccacacccaagatcacctgacacccaccctgacaagtgtccatgatgctgggccctgagggaggtgaaggctttgtggtcaagctccgtggcctgccctggtcctgctctgttgaggacgtgcagaacttcctctctgactgcacgattcatgatggggccgcaggtgtccatttcatctacactagagagggcaggcagagtggtgaggcttttgttgaacttggatcagaagatgatgtaaaaatggccctgaaaaaagacagggaaagcatgggacaccggtacattgaggtgttcaagtcccacagaaccgagatggattgggtgttgaagcacagtggtcccaacagtgccgacagcgccaacgatggcttcgtgcggcttcgaggactcccatttggatgcacaaaggaagaaattgttcagttcttctcagggttggaaattgtgccaaacgggatcacattgcctgtggaccccgaaggcaagattacaggggaagcgttcgtgcagtttgcctcgcaggagttagctgagaaggctctagggaaacacaaggagaggatagggcacaggtacattgaggtgtttaagagcagccaggaggaagttaggtcatactcagatccccctctgaagttcatgtccgtgcagcggccagggccctatgaccggcccgggactgccaggaggtacattggcatcgtgaagcaggcaggcctggaaaggatgaggcctggtgcctacagcacaggctacgggggctacgaggagtacagtggcctcagtgatggctacggcttcaccaccgacctgttcgggagagacctcagctactgtctctccgggatgtatgaccacagatacggcgacagtgagttcacagtgcagagcaccacaggccactgtgtccacatgaggggcctgccgtacaaagcgaccgagaacgacatttacaacttcttctctcctctcaaccctgtgagagtccatattgagattggcccagatggaagagtgacgggtgaagcagatgttgagtttgctactcatgaagaagctgtggcagctatgtccaaagacagggccaatatgcagcacagatatatagaactcttcttgaattcaacaacaggggccagcaatggggcgtatagcagccaggtgatgcaaggcatgggggtgtctgctgcccaggccacttacagtggcctggagagccagtcagtgagtggctgttacggggccggctacagtgggcagaacagcatgggtggctatgactagttttgttaggaacatttgagttacttcaatcattttcacaggcagccaacaagcaattaagagcagttataatagaggaagctgggggacccattttgcaccatgagtttgtgaaaaatctggattaaaaaattacctcttcagtgttttctcatgcaaaattttcttctagcatgtgataatgagtaaactaaaactattttcagcttttctcaattaacattttggtagtatacttcagagtgatgttatctaagtttaagtagtttaagtatgttaaatgtggatcttttacaccacatcacagtgaacacactggggagacgtgcttttttggaaaactcaaaggtgctagctccctgattcaaagaaatatttctcatgtttgttcattctagtttatattttcatttaaaatcctttaggttaagtttaagctttttaaaagttagttttgagaattgagacacaatactaatactgtaggaattggtgaggccttgacttaaaactttctttgtactgtgatttccttttgggtgtattttgctaagtgaaacttgttaaattttttgttaactaaatttttttcttaaaataaagactttttcacaatgactggcacagattactcagcaaaagatagcaaaacgggtggttgaagataattcattttaatcgtaatgtattttagtgtgaatttaaaaatttcatacatcaaatctatgatctcccttatattcttatgatgaggctaaataaaagtctaataaaaatgttaaatatgtgaatggtggaaatggtgactagcagcacacattctgggaagcatcaaatagacacacggccccagccacctgcaacttatgtgcactgttgtaaaccattcagaattttcctgctaggcccttgatgctggagtcacatctgttgatagctggagaactttagtttcaagtactacattgtgaaagcaattattttgtttctcgtttttataaaatgctgacttaaactttt

SEQ ID NO: 424 - protein, 415 aa, Homo sapien
MMLGPEGGEGFVVKLRGLPWSCSVEDVQNFLSDCTIHDGAAGVHFIYTREGRQSGEAFVELGSEDDVKMALKKDRESMGHRYIEVFKSHRTEMDWVLKHSGPNSADSANDGFVRLRGLPFGCTKEEIVQFFSGLEIVPNGITLPVDPEGKITGEAFVQFASQELAEKALGKHKERIGHRYIEVFKSSQEEVRSYSDPPLKFMSVQRPGPYDRPGTARRYIGIVKQAGLERMRPGAYSTGYGGYEEYSGLSDGYGFTTDLFGRDLSYCLSGMYDHRYGDSEFTVQSTTGHCVHMRGLPYKATENDIYNFFSPLNPVRVHIEIGPDGRVTGEADVEFATHEEAVAAMSKDRANMQHRYIELFLNSTTGASNGAYSSQVMQGMGVSAAQATYSGLESQSVSGCYGAGYSGQNSMGGYD

SEQ ID NO: 425 - DNA, 3028 bp, Homo sapien
ctcgtcgccgccgccattttagctgttggttccggccgcaccgtgtgggctgtagtagcgggaggggtgggggtcctccagagttaagtggctgtcctcgactgtgcccatacagcagccagctttcttccttaataactgcccgttcgaagagtgcgaggatgtccaagcggcaccggttggacctaggggaggattacccctctggcaagaagcgtgcggggaccgatgggaaggatcgagatcgagaccgggatcgtgaagatcggtctaaagatcgagaccgagaacgtgatagaggagatagagagcgagagagggagaaagaaaaggagaaggagttgcgagcttcaacaaatgctatgcttatcagtgctggattaccacccctgaaagcttcccattcagctcactcaacccactcagcacattcaacgcattctacacattctgctcattcaacgcatgccggacatgcaggtcacacgtcacttccacagtgcattaatccgttcaccaacttaccccatactcctcgatactatgatattctaaagaaacgtcttcagctccctgtttgggaatacaaggataggtttacagatattctgggtagacatcagtcctttgtactggttggtgagactgggtctggtaaaacaacacaaattccacaccggtgtgtggagtacatgcgatcattaccaggacccaagagaggagttgcctgtacccaacccaggagagtggctgcaatgagtgtggctcagagagttgctgatgagatggatgtgatgttgggccaggaagttggttactccattcgatttgaagactgcagtagtgcaaaaacattttttatgtatatgactgatgggatgttacttcgtgaagctatgaatgatcccctcctggagcgttatggtgtaataattcttgatgaggctcatgagaggacactggctacagatattctaatgggtgttctgaaggaagttgtaagacagagatcagatttaaaggttatagttatgagcgctactctagatgcaggaaaattccagatttactttgataactgtcctctcctaactattcctgggcgtacacatcctgttgagatcttctatactccagaaccagagagagattatcttgaagcagcaattcgaacagttatccagattcatatgtgtgaagaggaagagggagatcttcttcttttcttaactggtcaagaggaaattgatgaagcctgtaagagaataaagcgtgaagttgatgatttgggccctgaagttggtgacattaaaatcattccattgtattctacacttccacctcagcagcagcaacgcatttttgagcctccacctcccaaaaaacagaatggagcaattggaagaaaggtagttgtgtcaactaacatagcagagacgtctttgacaatagatggtgtggtgtttgtgattgatcctggatttgcgaaacagaaggtctacaatcctcgaatcagagttgagtcccttttggtgacagctattagtaaagcttcagctcagcaaagggctggtcgagctggacgtaccagacctggaaaatgcttcagactttacacagagaaagcttataaaacagaaatgcaggataacacctatcctgagattttgcgttctaatttaggatcagttgtgttacaattgaagaaacttggtattgatgacttggtacattttgattttatggatccaccagctcctgaaactctgatgagagccctggaacttttgaattacctggctgctttaaatgatgatggagatctgactgaattgggatccatgatggcagagtttcctctagatccacagctcgcaaaaatggttattgcaagttgtgactacaactgttctaatgaggtcctatctattactgctatgttgtcagtcccacagtgttttgttcgccccacggaggccaagaaagccgcagatgaggccaagatgagatttgcccacatagatggagatcatctgacactgctgaacgtctaccatgcttttaaacaaaatcatgaatcggttcagtggtgttatgacaacttcattaactacaggtccctgatgtccgcggacaatgtacgccagcagctatctcgaattatggacagatttaatttgcctcgtcgaagtactgactttacaagcagggactattatattaatataagaaaagctttggttactgggtattttatgcaggtggcacatttagaacgaacagggcattacttaactgtgaaagataaccaggtggttcagttgcatccctctactgttcttgaccacaaacctgaatgggtgctttataatgagtttgttctaacaacaaagaattacatccggacatgtacagacatcaagccagaatggttggtgaaaattgcccctcaatattatgacatgagcaatttcccacagtgtgaagcaaagagacagttggaccgcatcattgcccaaacttcaatccaaggaatattcacagtactgaattcagtgcttagaactgaagttattgagaggacagctttaaaagatgaatgaactcaaaagttcgagttgtgctcttcacgttggttcgataatggcctttatttgaaagctttttaatttttctttacagtaaatattccattctgatttcataaattaaacatttatgcctcccttttgtgttgacactgtagctcatactggaaaagtcgatcaatgttttgcagtttattgaaagtagttctatatataacaatgttataagcatttctttagaaatggttgaaaatgcttctaaaatgtgattatcgaccatggtatgcatgatcgttgtaattgttgacattccttttagaagttgtgaaatgttacaacttgtgcttatgtagacacaattttttgtttcagtaccagaggcactgacttcaataaagtttatttatacggaaaaaaaaaaaaaaaaaaaaaaaaaaaaa

SEQ ID NO: 426 - protein, 813 aa, Homo sapien
MSKRHRLDLGEDYPSGKKRAGTDGKDRDRDRDREDRSKDRDRERDRGDREREREKEKEKELRASTNAMLISAGLPPLKASHSAHSTHSAHSTHSTHSAHSTHAGHAGHTSLPQCINPFTNLPHTPRYYDILKKRLQLPVWEYKDRFTDILGRHQSFVLVGETGSGKTTQIPHRCVEYMRSLPGPKRGVACTQPRRVAAMSVAQRVADEMDVMLGQEVGYSIRFEDCSSAKTFFMYMTDGMLLREAMNDPLLERYGVIILDEAHERTLATDILMGVLKEVVRQRSDLKVIVMSATLDAGKFQIYFDNCPLLTIPGRTHPVEIFYTPEPERDYLEAAIRTVIQIHMCEEEEGDLLLFLTGQEEIDEACKRIKREVDDLGPEVGDIKIIPLYSTLPPQQQQRIFEPPPPKKQNGAIGRKVVVSTNIAETSLTIDGVVFVIDPGFAKQKVYNPRIRVESLLVTAISKASAQQRAGRAGRTRPGKCFRLYTEKAYKTEMQDNTYPEILRSNLGSVVLQLKKLGIDDLVHFDFMDPPAPETLMRALELLNYLAALNDDGDLTELGSMMAEFPLDPQLAKMVIASCDYNCSNEVLSITAMLSVPQCFVRPTEAKKAADEAKMRFAHIDGDHLTLLNVYHAFKQNHESVQWCYDNFINYRSLMSADNVRQQLSRIMDRFNLPRRSTDFTSRDYYINIRKALVTGYFMQVAHLERTGHYLTVKDNQVVQLHPSTVLDHKPEWVLYNEFVLTTKNYIRTCTDIKPEWLVKIAPQYYDMSNFPQCEAKRQLDRIIAQTSIQGIFTVLNSVLRTEVIERTALKDE

SEQ ID NO: 427 - DNA, 2177 bp, Homo sapien
gaattcgcggccgctggtttgcagctgctccgtcatcgtgcggcccgacgctatctcgcgctcgtgtgcaggcccggctcggctcctggtccccggtgcgagggttaacgcgaggccccggcctcggtccccggactaggccgtgaccccgggtgccatgaagcaggagggctcggcgcggcgccgcggcgcggacaaggcgaaaccgccgcccggcggaggagaacaagaacccccaccgccgccggccccccaggatgtggagatgaaagaggaggcagcgacgggtggcgggtcaacgggggaggcagacggcaagacggcggcggcagcggttgagcactcccagcgagagctggacacagtcaccttggaggacatcaaggagcacgtgaaacagctagagaaagcggtttcaggcaaggagccgagattcgtgctgcgggccctgcggatgctgccttccacatcacgccgcctcaaccactatgttctgtataaggctgtgcagggcttcttcacttcaaataatgccactcgagactttttgctccccttcctggaagagcccatggacacagaggctgatttacagttccgtccccgcacgggaaaagctgcgtcgacacccctcctgcctgaagtggaagcctatctccaactcctcgtggtcatcttcatgatgaacagcaagcgctacaaagaggcacagaagatctctgatgatctgatgcagaagatcagtactcagaaccgccgggccctagaccttgtagccgcaaagtgttactattatcacgcccgggtctatgagttcctggacaagctggatgtggtgcgcagcttcttgcatgctcggctccggacagctacgcttcggcatgacgcagacgggcaggccaccctgttgaacctcctgctgcggaattacctacactacagcttgtacgaccaggctgagaagctggtgtccaagtctgtgttcccagagcaggccaacaacaatgagtgggccaggtacctctactacacagggcgaatcaaagccatccagctggagtactcagaggcccggagaacgatgaccaacgcccttcgcaaggcccctcagcacacagctgtcggcttcaaacagacggtgcacaagcttctcatcgtggtggagctgttgctgggggagatccctgaccggctgcagttccgccagccctccctcaagcgctcactcatgccctatttccttctgactcaagctgtcaggacaggaaacctagccaagttcaaccaggtcctggatcagtttggggagaagtttcaagcagatgggacctacaccctaattatccggctgcggcacaacgtgattaagacaggtgtacgcatgatcagcctctcctattcccgaatctccttggctgacatcgcccagaagctgcagttggatagccccgaagatgcagagttcattgttgccaaggccatccgggatggtgtcattgaggccagcatcaaccacgagaagggctatgtccaatccaaggagatgattgacatctattccacccgagagccccagctagccttccaccagcgcatctccttctgcctagatatccacaacatgtctgtcaaggccatgaggtttcctcccaaatcgtacaacaaggacttggagtctgcagaggaacggcgtgagcgagaacagcaggacttggagtttgccaaggagatggcagaagatgatgatgacagcttcccttgagctggggggctggggaggggtagggggaatggggacaggctctttcccccttgggggtcccctgcccagggcactgtccccattttcccacacacagctcatatgctgcattcgtgcagggggtgggggtgctgggagccagccaccctgacctcccccagggctcctccccagccggtgacttactgtacagcaggcaggagggtgggcaggcaacctccccgggcagggtcctggccagcagtgtgggagcaggaggggaaggatagttctgtgtactcctttagggagtgggggactagaactgggatgtcttggcttgtatgttttttgaagcttcgattatgatttttaaacaataaaaagttctcccaaaaaaaaaaaaaaaaaaaaaaaaaaaagcggccgcgaattc

SEQ ID NO: 428 - protein, 534 aa, Homo sapien [sequence omitted]

SEQ ID NO: 429 - DNA, 1968 bp, Homo sapien
gaggaggaggaggagatgactggggagcgggagctcgagaatactgcccagttactctagcgcgccaggccgaaccgcagcttcttggcttaggtacttctactcacagcggccgattccgaggccaactccagcaatggcttttgcaaatctgcggaaagtgctcatcagtgacagcctggacccttgctgccggaagatcttgcaagatggagggctgcaggtggtggaaaagcagaaccttagcaaagaggagctgatagcggagctgcaggactgtgaaggccttattgttcgctctgccaccaaggtgaccgctgatgtcatcaacgcagctgagaaactccaggtggtgggcagggctggcacaggtgtggacaatgtggatctggaggccgcaacaaggaagggcatcttggttatgaacacccccaatgggaacagcctcagtgccgcagaactcacttgtggaatgatcatgtgcctggccaggcagattccccaggcgacggcttcgatgaaggacggcaaatgggagcggaagaagttcatgggaacagagctgaatggaaagaccctgggaattcttggcctgggcaggattgggagagaggtagctacccggatgcagtcctttgggatgaagactatagggtatgaccccatcatttccccagaggtctcggcctcctttggtgttcagcagctgcccctggaggagatctggcctctctgtgatttcatcactgtgcacactcctctcctgccctccacgacaggcttgctgaatgacaacacctttgcccagtgcaagaagggggtgcgtgtggtgaactgtgcccgtggagggatcgtggacgaaggcgccctgctccgggccctgcagtctggccagtgtgccggggctgcactggacgtgtttacggaagagccgccacgggaccgggccttggtggaccatgagaatgtcatcagctgtccccacctgggtgccagcaccaaggaggctcagagccgctgtggggaggaaattgctgttcagttcgtggacatggtgaaggggaaatctctcacgggggttgtgaatgcccaggcccttaccagtgccttctctccacacaccaagccttggattggtctggcagaagctctggggacactgatgcgagcctgggctgggtcccccaaagggaccatccaggtgataacacagggaacatccctgaagaatgctgggaactgcctaagccccgcagtcattgtcggcctcctgaaagaggcttccaagcaggcggatgtgaacttggtgaacgctaagctgctggtgaaagaggctggcctcaatgtcaccacctcccacagccctgctgcaccaggggagcaaggcttcggggaatgcctcctggccgtggccctggcaggcgccccttaccaggctgtgggcttggtccaaggcactacacctgtactgcaggggctcaatggagctgtcttcaggccagaagtgcctctccgcagggacctgcccctgctcctattccggactcagacctctgaccctgcaatgctgcctaccatgattggcctcctggcagaggcaggcgtgcggctgctgtcctaccagacttcactggtgtcagatggggagacctggcacgtcatgggcatctcctccttgctgcccagcctggaagcgtggaagcagcatgtgactgaagccttccagttccacttctaaccttggagctcactggtccctgcctctggggcttttctgaagaaacccacccactgtgatcaatagggagagaaaatccacattcttgggctgaacgcgggcctctgacactgcttacactgcactctgaccctgtagtacagcaataaccgtctaataaagagcctacccccaaaaaaaaaaaaaaaaaaaaaaaaaaaaaaaaaaaaaaaaaaaaaaaaaaaaaaaaa

SEQ ID NO: 430 - protein, 533 aa, Homo sapien
MAFANLRKVLISDSLDPCCRKILQEGGLQVVEKQNLSKEELIAELQDCEGLIVRSATKVTADVINAAEKLQVVGRAGTGVDNVDLEAATRKGILVMNTPNGNSLSAAELTCGMIMCLARQIPQATASMKDGKWERKKFMGTELNGKTLGILGLGRIGREVATRMQSFGMKTIGYDPIISPEVSASFGVQQLPLEEIWPLCDFITVHTPLLPSTTGLLNDNTFAQCKKGVRVVNCARGGIVDEGALLRALQSGQCAGAALDVFTEEPPRDRALVDHENVISCPHLGASTKEAQSRCGEEIAVQFVDMVKGKSLTGVVNAQALTSAFSPHTKPWIGLAEALGTLMRAWAGSPKGTIQVITQGTSLKNAGNCLSPAVIVGLLKEASKQADVNLVNAKLLVKEAGLNVTTSHSPAAPGEQGFGECLLAVALAGAPYQAVGLVQGTTPVLQGLNGAVFRPEVPLRRDLPLLLFRTQTSDPAMLPTMIGLLAEAGVRLLSYQTSLVSDGETWHVMGISSLLPSLEAWKQHVTEAFQFHF

SEQ ID NO: 431 - DNA, 784 bp, Homo sapien
gagcggttgcgcagtgaaggctagacccggtttactggaattgctctggcgatcgaggggtcctagtacaccgcaatcatgtctattatgtcctataacggaggggccgtcatggccatgaaggggaagaactgtgtggccatcgctgcagacaggcgcttcgggatccaggcccagatggtgaccacggacttccagaagatctttcccatgggtgaccggctgtacatcggtctggccgggctcgccactgacgtccagacagttgcccagcgcctcaagttccggctgaacctgtatgagttgaaggaaggtcggcagatcaaaccttataccctcatgagcatggtggccaacctcttgtatgagaaacggtttggcccttactacactgagccagtcattgccgggttggacccgaagacctttaagcccttcatttgctctctagacctcatcggctgccccatggtgactgatgactttgtggtcagtggcacctgcgccgaacaaatgtacggaatgtgtgagtccctctgggagcccaacatggatccggatcacctgtttgaaaccatctcccaagccatgctgaatgctgtggaccgggatgcagtgtcaggcatgggagtcattgtccacatcatcgagaaggacaaaatcaccaccaggacactgaaggcccgaatggactaaccctgttcccagagcccacttttttttctttttttgaaataaaatagcctgtctttcaaaaaaaaaaaaaaaaaaaaaaaaaaaaaaa

SEQ ID NO: 432 - protein, 205 aa, Homo sapien
MSIMSYNGGAVMAMKGKNCVAIAADRRFGIQAQMVTTDFQKIFPMGDRLYIGLAGLATDVQTVAQRLKFRLNLYELKEGRQIKPYTLMSMVANLLYEKRFGPYYTEPVIAGLDPKTFKPFICSLDLIGCPMVTDDFVVSGTCAEQMYGMCESLWEPNMDPDHLFETISQAMLNAVDRDAVSGMGVIVHIIEKDKITTRTLKARMD

SEQ ID NO: 433 - DNA, 1778 bp, Homo sapien
agttgcaggcgagcaggcgaggaatcgccgtggcgtcttggtgttctccacgctggttcgcaggtgaagagatggcgtttgtgaagagtggctggttgctgcgacagagtactattttgaagcgctggaagaagaactggtttgatctgtggtcggatggtcacctgatctattatgatgaccagactcggcagaatatcgaggataaggtccacatgccaatggactgcatcaacatccgcacggggcaggaatgtcgggatactcagcccccggatggaaagtcaaaagactgcatgctccagattgtttgtcgagatgggaaaacaattagtctttgtgcagaaagcacagatgattgcttggcctggaaatttacactccaagattctaggacaaacacagcgtatgtgggctctgcagtcatgaccgatgagacatccgtggtttcctcacctccaccatacacggcctatgctgcaccggcccctgaggcttatggctatgggccatacggtggtgcgtacccgccaggaactcaagttgtctacgctgcgaatgggcaggcgtatgccgtgccccaccagtacccatatgcaggactttatggacagcagcctgctaaccaagtcatcattcgagagcgctatcgagacaacgacagcgacctggcactgggcatgctggcaggagcagccacgggcatggccttagggtctctattttgggtcttctaggggcctcaaggtcttgatgtgcatagcttctgataaccctgtgtgcaataatatgatttgcagggcatttctgtttgtgacaaaagtttttaataatagttttaatcattcctttgaaagtagtgatgtcataattgtactaatccacataagtaccacagagaagggtttgaactgtgctattttgttcaaatgttgactctccgggggcactggctcattccaagactgttcttgtgcaactctcagaataccttatttgagcatacctgttttgaaaggcattttctttttagagttaggtgtagtgcttaagggttaatttattttcatgttatgccagtaatatagtgttgtatgcctattgagtgattgtggcaagaaaagctacagcttctttgcgtttaactttttcaaaccacagaccagaactggttgcatgttactttaggagttgtgggttggtaagctcccaggtacttcccgaggctatggtgtgagagcccccgtcctgccctctggggctccacaggcccctggcaaggccgatggctcaggatgatggggcacagcccgcctttgaacaatcatgcttcagaaatctgcctgaccctagctgctgctgctgctcactttattcttgtatggctttggtaggcatacttggagaacatatcccacattaggaattgatttaagcctgagagtttgagggctttaatcctttaaaacttggagaagctggctgggcgcggtggctcacgcctgtaatcccagcactttgagagaccgaggcgggcggatcacgaggtcaggagatcgagaccatcctggctaacacggtgaaaccccatctctactaaaaatacaaaaaattagctgggcgtggtggcaggcgcctgtggtcccagctactcgggaggctgaggcaggagaatagtgtgaacccaggaggcggagcttgcagtgagccaagatagtgccactgcacttcagcctgggtgacagagtgagactctgtctcaaaaaaaaaaaaaaaaa

SEQ ID NO: 434 - protein, 221 aa, Homo sapien
MAFVKSGWLLRQSTILKRWKKNWFDLWSDGHLIYYDDQTRQNIEDKVHMPMDCINIRTGQECRDTQPPDGKSKDCMLQIVCRDGKTISLCAESTDDCLAWKFTLQDSRTNTAYVGSAVMTDETSVVSSPPPYTAYAAPAPEAYGYGPYGGAYPPGTQVVYAANGQAYAVPHQYPYAGLYGQQPANQVIIRERYRDNDSDLALGMLAGAATGMALGSLFWVF

SEQ ID NO: 435 - DNA, 3345 bp, Homo sapien
aagaggcgcgaggcggaattggggtctgctctaagctgcagcaagagaaactgtgtgtgaggggaagaggcctgtttcgctgtcgggtctctagttcttgcacgctctttaagagtctgcactggaggaactcctgccattaccagctcccttcttgcagaagggagggggaaacatacatttattcatgccagtctgttgcatgcaggctttttggcttcctaccttgcaacaaaataattgcaccaactccttagtgccgattccgcccacagagagtcctggagccacagtcttttttgctttgcattgtaggagagggactaagtgctagagactatgtcgctttcctgagctaccgagagcgctcgtgaactggaatcaactgcttcagggaaaaagaaaaaaaaaaaaaaaaagacttgcctgggaggccgcgagaaacttgcattggaagcttcagcaaccagcattcgagaaactcctctctactttagcacggtctccagactcagccgagagacagcaaactgcagcgcggtgagagagcgagagagagggagagagagactctccagcctgggaactataactcctctgcgagaggcggagaactccttccccaaatcttttggggacttttctctctttacccacctccgcccctgcgaggagttgaggggccagttcggccgccgcgcgcgtcttcccgttcggcgtgtgcttggcccggggaaccgggagggcccggcgatcgcgcggcggccgccgcgagggtgtgagcgcgcgtgggcgcccgccgagccgaggccatggtgcagcaaaccaacaatgccgagaacacggaagcgctgctggccggcgagagctcggactcgggcgccggcctcgagctgggaatcgcctcctcccccacgcccggctccaccgcctccacgggcggcaaggccgacgacccgagctggtgcaagaccccgagtgggcacatcaagcgacccatgaacgccttcatggtgtggtcgcagatcgagcggcgcaagatcatggagcagtcgcccgacatgcacaacgccgagatctccaagcggctgggcaaacgctggaagctgctcaaagacagcgacaagatccctttcattcgagaggcggagcggctgcgcctcaagcacatggctgactaccccgactacaagtaccggcccaggaagaaggtgaagtccggcaacgccaactccagctcctcggccgccgcctcctccaagccgggggagaagggagacaaggtcggtggcagtggcgggggcggccatgggggcggcggcggcggcgggagcagcaacgcggggggaggaggcggcggtgcgagtggcggcggcgccaactccaaaccggcgcagaaaaagagctgcggctccaaagtggcgggcggcgcgggcggtggggttagcaaaccgcacgccaagctcatcctggcaggcggcggcggcggcgggaaagcagcggctgccgccgccgcctccttcgccgccgaacaggcgggggccgccgccctgctgcccctgggcgccgccgccgaccaccactcgctgtacaaggcgcggactcccagcgcctcggcctccgcctcctcggcagcctcggcctccgcagcgctcgcggccccgggcaagcacctggcggagaagaaggtgaagcgcgtctacctgttcggcggcctgggcacgtcgtcgtcgcccgtgggcggcgtgggcgcgggagccgaccccagcgaccccctgggcctgtacgaggaggagggcgcgggctgctcgcccgacgcgcccagcctgagcggccgcagcagcgccgcctcgtcccccgccgccggccgctcgcccgccgaccaccgcggctacgccagcctgcgcgccgcctcgcccgccccgtccagcgcgccctcgcacgcgtcctcctcggcctcgtcccactcctcctcttcctcctcctcgggctcctcgtcctccgacgacgagttcgaagacgacctgctcgacctgaaccccagctcaaactttgagagcatgtccctgggcagcttcagttcgtcgtcggcgctcgaccgggacctggattttaacttcgagcccggctccggctcgcacttcgagttcccggactactgcacgcccgaggtgagcgagatgatctcgggagactggctcgagtccagcatctccaacctggttttcacctactgaagggcgcgcaggcagggagaagggccggggggggtaggagaggagaaaaaaaaagtgaaaaaaagaaacgaaaaggacagacgaagagtttaaagagaaaagggaaaaaagaaagaaaaagtaagcagggctggcttcgcccgcgttctcgtcgtcggatcaaggagcgcggcggcgttttggacccgcgctcccatcccccaccttcccgggccggggacccactctgcccagccggagggacgcggaggaggaagagggtagacaggggcgacctgtgattgttgttattgatgttgttgttgatggcaaaaaaaaaaaagcgacttcgagtttgctcccctttgcttgaagagaccccctcccccttccaacgagcttccggacttgtctgcacccccagcaagaaggcgagttagttttctagagacttgaaggagtctcccccttcctgcatcaccaccttggttttgttttattttgcttcttggtcaagaaaggaggggagaacccagcgcacccctccccccctttttttaaacgcgtgatgaagacagaaggctccggggtgacgaatttggccgatggcagatgttttgggggaacgccgggactgagagactccacgcaggcgaattcccgtttggggcttttttttcctccctcttttccccttgccccctctgcagccggaggaggagatgttgaggggaggaggccagccagtgtgaccggcgctaggaaatgacccgagaaccccgttggaagcgcagcagcgggagctaggggcgggggcggaggaggacacgaactggaagggggttcacggtcaaactgaaatggatttgcacgttggggagctggcggcggcggctgctgggcctccgccttcttttctacgtgaaatcagtgaggtgagacttcccagaccccggaggcgtggaggagaggagactgtttgatgtggtacaggggcagtcagtggagggcgagtggtttcggaaaaaaaaacaagaaaacaagacaaaaaacagaacacaaaagcgatttttttcttctcttaatcggaatcgtgagggcgtgggatattccaagggggggatcgcgg

SEQ ID NO: 436 - protein, 474 aa, Homo sapien
MVQQTNNAENTEALLAGESSDSGAGLELGIASSPTPGSTASTGGKADDPSWCKTPSGHIKRPMNAFMVWSQIERRKIMEQSPDMHNAEISKRLGKRWKLLKDSDKIPFIREAERLRLKHMADYPDYKYRPRKKVKSGNANSSSSAAASSKPGEKGDKVGGSGGGGHGGGGGGGSSNAGGGGGGASGGGANSKPAQKKSCGSKVAGGAGGGVSKPHAKLILAGGGGGGKAAAAAAASFAAEQAGAAALLPLGAAADHHSLYKARTPSASASASSAASASAALAAPGKHLAEKKVKRVYLFGGLGTSSSPVGGVGAGADPSDPLGLYEEEGAGCSPDAPSLSGRSSAASSPAAGRSPADHRGYASLRAASPAPSSAPSHASSSASSHSSSSSSSGSSSSDDEFEDDLLDLNPSSNFESMSLGSFSSSSALDRDLDFNFEPGSGSHFEFPDYCTPEVSEMISGDWLESSISNLVFTY

SEQ ID NO: 437 - DNA, 1674 bp, Homo sapien
  Unsure 515: Unknown base
  Unsure 521-553: Unknown base
aaaagaaaaaaaaaagatttttttcttctcttaatcggaatcgtgatggtgttggattatttcaatggtggggttaatatagcatgttatcctgtctatcttttaaagatttctgtataagactgttgagcagtttttaaaatagtgtaggataatataaaaagcagatagatggcgctatgtttgattcctacaacgaaattatcaccagctttttttcattcttaactctttaaaggattcaaacgcaactcaaatctgtgctggactttaaaaaaacaattcaggaccaaattttttctcagtgtgtgtgtttattccttataggtgtaaatgagaagacgtgtttttttccttcaccgatgctccatcctcgtatttctttttccttgtaaatgtaatcagatgccattttatatgtggacgtatttatactggccaaacatattttttcttttgtccctttttttctttcctttctttttacttcctttatttcttattcctcctttccntttttnnnnnnnnnnnnnnnnnnnnnnnnnnnnnnnnnggtagttgttgttacccacgccattttacgtctccttcactgaagggctagagttttaacttttaattttttatatttaaatgtagacttttgacacttttaaaaaacaaaaaaagacaagagagatgaaaacgtttgattattttctcagtgtatttttgtaaaaaatatataaagggggtgttaatcggtgtaaatcgctgtttggatttcctgattttataacagggcggctggttaatatctcacacagtttaaaaaatcagcccctaatttctccatgtttacacttcaatctgcaggcttcttaaagtgacagtatcccttaacctgccaccagtgtccaccctccggcccccgtcttgtaaaaaggggaggagaattagccaaacactgtaagcttttaagaaaaacaaagttttaaacgaaatactgctctgtccagaggctttaaaactggtgcaattacagcaaaaagggattctgtagctttaacttgtaaaccacatcttttttgcactttttttataagcaaaaacgtgccgtttaaaccactggatctatctaaatgccgatttgagttcgcgacactatgtactgcgtttttcattcttgtatttgactatttaatcctttctacttgtcgctaaatataattgttttagtcttatggcatgatgatagcatatgtgttcaggtttatagctgttgtgtttaaaaattgaaaaaagtggaaaacatctttgtacatttaagtctgtattataataagcaaaaagattgtgtgtatgtatgtttaatataacatgacaggcactaggacgtctgcctttttaaggcagttccgttaagggtttttgtttttaaacttttttttgccatccatcctgtgcaatatgccgtgtagaatatttgtcttaaaattcaaggccacaaaaacaatgtttgggggaaaaaaaagaaaaaatcatgccagctaatcatgtcaagttcactgcctgtcagattgttgatatataccttctgtaaataactttttttgagaaggaaataaaatcagctggaactgaaccctaaaaaaaatctatgtcgggtgcggagaaagaggtaatgaaatggca

SEQ ID NO: 438 - protein, 74 aa, Homo sapien
  unsure 61: unknown amino acid
  unsure 63: unknown amino acid
  unsure 64: unknown amino acid
  unsure 65: unknown amino acid
  unsure 66: unknown amino acid
  unsure 67: unknown amino acid
  unsure 68: unknown amino acid
  unsure 69: unknown amino acid
  unsure 70: unknown amino acid
  unsure 71: unknown amino acid
  unsure 72: unknown amino acid
  unsure 73: unknown amino acid
  unsure 74: unknown amino acid
MRRRVFFLHRCSILVFLFPCKCNQMPFYMWTYLYWPNIFFLLSLFFFPFFLLPLFLIPPFXFXXXXXXXXXXXX

SEQ ID NO: 439 - DNA, 1032 bp, Homo sapien
ggagggtgggcagcactcgctttattgtccagcattccacatggatagtcgccacacctttgcccctgctgcgatgaccctgtcgccacttctgctgttcctgccaccgctgctgctgctgctggacgtccccacggcggcggtgcaggcgtcccctctgcaagcgttagacttctttgggaatgggccaccagttaactacaagacaggcaatctatacctgcgggggcccctgaagaagtccaatgcaccgcttgtcaatgtgaccctctactatgaagcactgtgcggtggctgccgagccttcctgatccgggagctcttcccaacatggctgttggtcatggagatcctcaatgtcacgtcggtgccctacggaaacgcacaggaacaaaatgtcagtggcaggtgggagttcaagtgccagcttggagaagaggagtgcaaattcaacaaggtggaggcctgcgtgttggatgaacttgacatggagctagccttcctgaccatgtctggcatggcatggaagagtttgaggacatggagagaagtctgccactatgcctgcagctctacgccccagggctgtcgccagaactatcatggagtgtgcaatgggggaccgcggcatgcagctcatgcacgccaacgcccagcggacagatgctctccagccaccgcacgagtatgtgccctgggtcaccgtcaatgggaaacccttggaagatcagacccagctccttacccttgtctgccagttgtaccagggcaagaagccggatgtctgcccttcctcaaccagctccctccggagtgtttgcttcgagtgttggccggtgggctgcggagagctcatggaaggcgagtgggaactcggctgcctgcctttttttctgatccagaccctcggcacctgctacttaccaactggaaaattttatgcatcccatgaagcccagatacacaaaattccacccctagatcaagaatcctgctccactaagaatggtgctaaagtaaaactagtttaat

SEQ ID NO: 440 - protein, 303 aa, Homo sapien
MDSRHTFAPAAMTLSPLLLFLPPLLLLLDVPTAAVQASPLQALDFFGNGPPVNYKTGNLYLRGPLKKSNAPLVNVTLYYEALCGGCRAFLIRELFPTWLLVMEILNVTSVPYGNAQEQNVSGRWEFKCQLGEEECKFNKVEACVLDELDMELAFLTMSGMAWKSLRTWREVCHYACSSTPQGCRQNYHGVCNGGPRHAAHARQRPADRCSPATARVCALGHRQWETLGRSDPAPYPCLPVVPGQEAGCLPFLNQLPPECLLRVLAGGLRRAHGRRVGTRLPAFFSDPDPRHLLLTNWKILCIP

SEQ ID NO: 441 - DNA, 1851 bp, Homo sapien
gggcgcgccagagacgcagccgcgctcccaccacccacacccaccgcgccctcgttcgcctcttctccgggagccagtccgcgccaccgccgccgcccaggccatcgccaccctccgcagccatgtccaccaggtccgtgtcctcgtcctcctaccgcaggatgttcggcggcccgggcaccgcgagccggccgagctccagccggagctacgtgactacgtccacccgcacctacagcctgggcagcgcgctgcgccccagcaccagccgcagcctctacgcctcgtccccgggcggcgtgtatgccacgcgctcctctgccgtgcgcctgcggagcagcgtgcccggggtgcggctcctgcaggactcggtggacttctcgctggccgacgccatcaacaccgagttcaagaacacccgcaccaacgagaaggtggagctgcaggagctgaatgaccgcttcgccaactacatcgacaaggtgcgcttcctggagcagcagaataagatcctgctggccgagctcgagcagctcaagggccaaggcaagtcgcgcctaggggacctctacgaggaggagatgcgggagctgcgccggcaggtggaccagctaaccaacgacaaagcccgcgtcgaggtggagcgcgacaacctggccgaggacatcatgcgcctccgggagaaattgcaggaggagatgcttcagagagaggaagccgaaaacaccctgcaatctttcagacaggatgttgacaatgcgtctctggcacgtcttgaccttgaacgcaaagtggaatctttgcaagaagagattgcctttttgaagaaactccacgaagaggaaatccaggagctgcaggctcagattcaggaacagcatgtccaaatcgatgtggatgtttccaagcctgacctcacggctgccctgcgtgacgtacgtcagcaatatgaaagtgtggctgccaagaacctgcaggaggcagaagaatggtacaaatccaagtttgctgacctctctgaggctgccaaccggaacaatgacgccctgcgccaggcaaagcaggagtccactgagtaccggagacaggtgcagtccctcacctgtgaagtggatgcccttaaaggaaccaatgagtccctggaacgccagatgcgtgaaatggaagagaactttgccgttgaagctgctaactaccaagacactattggccgcctgcaggatgagattcagaatatgaaggaggaaatggctcgtcaccttcgtgaataccaagacctgctcaatgttaagatggcccttgacattgagattgccacctacaggaagctgctggaaggcgaggagagcaggatttctctgcctcttccaaacttttcctccctgaacctgagggaaactaatctggattcactccctctggttgatacccactcaaaaaggacattcctgattaagacggttgaaactagagatggacaggttatcaacgaaacttctcagcatcacgatgaccttgaataaaaattgcacacactcagtggcaggcgatatattacccaggcaagaataaaaaagaaatcccatatcttaaagaaacagctttcaagtgcctttctgcagtttttcaggagcgcaagatagatttggaataggaataagctctagttcttaacaaccgacactcctacaagatttagaaaaaagtttacaacataatctagtttacagaaaaatcttgtgctagaatactttttaaaaggtattttgaataccattaaaactgcttttttttttccagcaagtatccaaccaacttggttctgcttcaataaatctttggaaaactcca

SEQ ID NO: 442 - protein, 466 aa, Homo sapien
MSTRSVSSSSYRRMFGGPGTASRPSSSRSYVTTSTRTYSLGSALRPSTSRSLYASSPGGVYATRSSAVRLRSSVPGVRLLQDSVDFSLADAINTEFKNTRTNEKVELQELNDRFANYIDKVRFLEQQNKILLAELEQLKGQGKSRLGDLYEEEMRELRRQVDQLTNDKARVEVERDNLAEDIMRLREKLQEEMLQREEAENTLQSFRQDVDNASLARLDLERKVESLQEEIAFLKKLHEEEIQELQAQIQEQHVQIDVDVSKPDLTAALRDVRQQYESVAAKNLQEAEEWYKSKFADLSEAANRNNDALRQAKQESTEYRRQVQSLTCEVDALKGTNESLERQMREMEENFAVEAANYQDTIGRLQDEIQNMKEEMARHLREYQDLLNVKMALDIEIATYRKLLEGEESRISLPLPNFSSLNLRETNLDSLPLVDTHSKRTFLIKTVETRDGQVINETSQHHDDLE

SEQ ID NO: 443 - DNA, 2279 bp, Homo sapien
tgcctgctgagggtggagacccacgagccgaggcctcctgcagtgttctgcacagcaaaccgcacgctatggctgacagccgggatcccgccagcgaccagatgcagcactggaaggagcagcgggccgcgcagaaagctgatgtcctgaccactggagctggtaacccagtaggagacaaacttaatgttattacagtagggccccgtgggccccttcttgttcaggatgtggttttcactgatgaaatggctcattttgaccgagagagaattcctgagagagttgtgcatgctaaaggagcaggggcctttggctactttgaggtcacacatgacattaccaaatactccaaggcaaaggtatttgagcatattggaaagaagactcccatcgcagttcggttctccactgttgctggagaatcgggttcagctgacacagttcgggaccctcgtgggtttgcagtgaaattttacacagaagatggtaactgggatctcgttggaaataacacccccattttcttcatcagggatcccatattgtttccatcttttatccacagccaaaagagaaatcctcagacacatctgaaggatccggacatggtctgggacttctggagcctacgtcctgagtctctgcatcaggtttctttcttgttcagtgatcgggggattccagatggacatcgccacatgaatggatatggatcacatactttcaagctggttaatgcaaatggggaggcagtttattgcaaattccattataagactgaccagggcatcaaaaacctttctgttgaagatgcggcgagactttcccaggaagatcctgactatggcatccgggatctttttaacgccattgccacaggaaagtacccctcctggactttttacatccaggtcatgacatttaatcaggcagaaacttttccatttaatccattcgatctcaccaaggtttggcctcacaaggactaccctctcatcccagttggtaaactggtcttaaaccggaatccagttaattactttgctgaggttgaacagatagccttcgacccaagcaacatgccacctggcattgaggccagtcctgacaaaatgcttcagggccgcctttttgcctatcctgacactcaccgccatcgcctgggacccaattatcttcatatacctgtgaactgtccctaccgtgctcgagtggccaactaccagcgtgatggcccgatgtgcatgcaggacaatcagggtggtgctccaaattactaccccaacagctttggtgctccggaacaacagccttctgccctggagcacagcatccaatattctggagaagtgcggagattcaacactgccaatgatgataacgttactcaggtgcgggcattctatgtgaacgtgctgaatgaggaacagaggaaacgtctgtgtgagaacattgccggccacctgaaggatgcacaaattttcatccagaagaaagcggtcaagaacttcactgaggtccaccctgactacgggagccacatccaggctcttctggacaagtacaatgctgagaagcctaagaatgcgattcacacctttgtgcagtccggatctcacttggcggcaagggagaaggcaaatctgtgaggccggggccctgcacctgtgcagcgaagcttagcgttcatccgtgtaacccgctcatcactggatgaagattctcctgtgctagatgtgcaaatgcaagctagtggcttcaaaatagagaatcccactttctatagcagattgtgtaacaattttaatgctatttccccaggggaaaatgaaggttaggatttaacagtcatttaaaaaaaaaatttgttttgacggatgattggattattcatttaaaatgattagaaggcaagtttctagctagaaatatgattttatttgacaaaatttgttgaaattatgtatgtttacatatcacctcatggcctattatattaaaatatggctataaatatataaaaagaaaagataaagatgatctactcagaaatttttatttttctaaggttctcataggaaaagtacatttaatacagcagtgtcatcagaagataacttgagcaccgtcatggcttaatgtttattcctgataataattgatcaaattcatttttttcactggagttacattaatgttaattcagcactgatttcacaacagatcaatttgtaattgcttacatttttacaataaataatctgtacgtaagaaca

SEQ ID NO: 444 - protein, 527 aa, Homo sapien
MADSRDPASDQMQHWKEQRAAQKADVLTTGAGNPVGDKLNVITVGPRGPLLVQDVVFTDEMAHFDRERIPERVVHAKGAGAFGYFEVTHDITKYSKAKVFEHIGKKTPIAVRFSTVAGESGSADTVRDPRGFAVKFYTEDGNWDLVGNNTPIFFIRDPILFPSFIHSQKRNPQTHLKDPDMVWDFWSLRPESLHQVSFLFSDRGIPDGHRHMNGYGSHTFKLVNANGEAVYCKFHYKTDQGIKNLSVEDAARLSQEDPDYGIRDLFNAIATGKYPSWTFYIQVMTFNQAETFPFNPFDLTKVWPHKDYPLIPVGKLVLNRNPVNYFAEVEQIAFDPSNMPPGIEASPDKMLQGRLFAYPDTHRHRLGPNYLHIPVNCPYRARVANYQRDGPMCMQDNQGGAPNYYPNSFGAPEQQPSALEHSIQYSGEVRRFNTANDDNVTQVRAFYVNVLNEEQRKRLCENIAGHLKDAQIFIQKKAVKNFTEVHPDYGSHIQALLDKYNAEKPKNAIHTFVQSGSHLAAREKANL

SEQ ID NO: 445 - DNA, 1842 bp, Homo sapien
cgatcagatcgatctaagatggcgactgtcgaaccggaaaccacccctactcctaatcccccgactacagaagaggagaaaacggaatctaatcaggaggttgctaacccagaacactatattaaacatcccctacagaacagatgggcactctggttttttaaaaatgataaaagcaaaacttggcaagcaaacctgcggctgatctccaagtttgatactgttgaagacttttgggctctgtacaaccatatccagttgtctagtaatttaatgcctggctgtgactactcactttttaaggatggtattgagcctatgtgggaagatgagaaaaacaaacggggaggacgatggctaattacattgaacaaacagcagagacgaagtgacctcgatcgcttttggctagagacacttctgtgccttattggagaatcttttgatgactacagtgatgatgtatgtggcgctgttgttaatgttagagctaaaggtgataagatagcaatatggactactgaatgtgaaaacagagaagctgttacacatatagggagggtatacaaggaaaggttaggacttcctccaaagatagtgattggttatcagtcccacgcagacacagctactaagagcggctccaccactaaaaataggtttgttgtttaagaagacaccttctgagtattctcataggagactgcgtcaagcaatcgagatttgggagctgaaccaaagcctcttcaaaaagcagagtggactgcatttaaatttgatttccatcttaatgttactcagatataagagaagtctcattcgcctttgtcttgtacttctgtgttcattttttttttttttttttggctagagtttccactatcccaatcaaagaattacagtacacatccccagaatccataaatgtgttcctggcccactctgtaatagttcagtagaattaccattaattacatacagattttacctatccacaatagtcagaaaacaacttggcatttctatactttacaggaaaaaaaattctgttgttccattttatgcagaagcatattttgctggtttgaaagattatgatgcatacagttttctagcaattttctttgtttctttttacagcattgtctttgctgtactcttgctgatggctgctagattttaatttatttgtttccctacttgataatattagtgattctgatttcagtttttcatttgttttgcttaaattttttttttttttttcctcatgtaacattggtgaaggatccaggaatatgacacaaaggtggaataaacattaattttgtgcattctttggtaattttttttgttttttgtaactacaaagctttgctacaaatttatgcatttcattcaaatcagtgatctatgtttgtgtgatttcctaaacataattgtggattataaaaaatgtaacatcataattacattcctaactagaattagtatgtctgtttttgtatctttatgctgtattttaacactttgtattacttaggttattttgctttggttaaaaatggctcaagtagaaaagcagtcccattcatattaagacagtgtacaaaactgtaaataaaatgtgtacagtgaattgtcttttagacaactagatttgtccttttatttctccatctttatagaaggaatttgtacttcttattgcaggcaagtctctatattatgtcctcttttgtggtgtcttccatgtgaacagcataagtttggagcactagtttgattattatgtttattacaatttttaataaattgaataggtagtatcatatatatgga

SEQ ID NO: 446 - protein, 217 aa, Homo sapien [sequence omitted]

SEQ ID NO: 447 - DNA, 10558 bp, Homo sapien
cagtttggagctcagtcttccaccaaaggccgttcagttctcctgggctccagcctcctgcaaggactgcaagagttttcctccgcagctctgagtctccacttttttggtggagaaaggctgcaaaaagaaaaagagacgcagtgagtgggaaaagtatgcatcctattcaaacctaattgaatcgaggagcccagggacacacgccttcaggtttgctcaggggttcatatttggtgcttagacaaattcaaaatgaggaaacatcggcacttgcccttagtggccgtcttttgcctctttctctcaggctttcctacaactcatgcccagcagcagcaagcagatgtcaaaaatggtgcggctgctgatataatatttctagtggattcctcttggaccattggagaggaacatttccaacttgttcgagagtttctatatgatgttgtaaaatccttagctgtgggagaaaatgatttccattttgctctggtccagttcaacggaaacccacataccgagttcctgttaaatacgtatcgtactaaacaagaagtcctttctcatatttccaacatgtcttatattgggggaaccaatcagactggaaaaggattagaatacataatgcaaagccacctcaccaaggctgctggaagccgggccggtgacggagtccctcaggttatcgtagtgttaactgatggacactcgaaggatggccttgctctgccctcagcggaacttaagtctgctgatgttaacgtgtttgcaattggagttgaggatgcagatgaaggagcgttaaaagaaatagcaagtgaaccgctcaatatgcatatgttcaacctagagaattttacctcacttcatgacatagtaggaaacttagtgtcctgtgtgcattcatccgtgagtccagaaagggctggggacacggaaacccttaaagacatcacagcacaagactctgctgacattattttccttattgatggatcaaacaacaccggaagtgtcaatttcgcagtcattctcgacttccttgtaaatctccttgagaaactcccaattggaactcagcagatccgagtgggggtggtccagtttagcgatgagcccagaaccatgttttccttggacacctactccaccaaggcccaggttctgggtgcagtgaaagccctcgggtttgctggtggggagttggccaatatcggcctcgcccttgatttcgtggtggagaaccacttcacccgggcagggggcagccgcgtggaggaaggggttccccaggtgctggtcctcataagtgccgggccttctagtgacgagattcgctacggggtggtagcactgaagcaggctagcgtgttctcattcggccttggagcccaggccgcctccagggcagagcttcagcacatagctaccgatgacaacttggtgtttactgtcccggaattccgtagctttggggacctccaggagaaattactgccgtacattgttggcgtggcccaaaggcacattgtcttgaaaccgccaaccattgtcacacaagtcattgaagtcaacaagagagacatagtcttcctggtggatggctcatctgcactgggactggccaacttcaatgccatccgagacttcattgctaaagtcatccagaggctggaaatcggacaggatcttatccaggtggcagtggcccagtatgcagacactgtgaggcctgaattttatttcaatacccatccaacaaaaagggaagtcataaccgctgtgcggaaaatgaagcccctggacggctcggccctgtacacgggctctgctctagactttgttcgtaacaacctattcacgagttcagccggctaccgggctgccgaggggattcctaagcttttggtgctgatcacaggtggtaagtccctagatgaaatcagccagcctgcccaggagctgaagagaagcagcataatggcctttgccattgggaacaagggtgccgatcaggctgagctggaagagatcgctttcgactcctccctggtgttcatcccagctgagttccgagccgccccattgcaaggcatgctgcctggcttgctggcacctctcaggaccctctctggaacccctgaagttcactcaaacaaaagagatatcatctttcttttggatggatcagccaacgttggaaaaaccaatttcccttatgtgcgcgactttgtaatgaacctagttaacagccttgatattggaaatgacaatattcgtgttggtttagtgcaatttagtgacactcctgtaacggagttctctttaaacacataccagaccaagtcagatatccttggtcatctgaggcagctgcagctccagggaggttcgggcctgaacacaggctcagccctaagctatgtctatgccaaccacttcacggaagctggcggcagcaggatccgtgaacacgtgccgcagctcctgcttctgctcacagctgggcagtctgaggactcctatttgcaagctgccaacgccttgacacgcgcgggcatcctgactttttgtgtgggagctagccaggcgaataaggcagagcttgagcagattgcttttaacccaagcctggtgtatctcatggatgatttcagctccctgccagctttgcctcagcagctgattcagcccctaaccacatatgttagtggaggtgtggaggaagtaccactcgctcagccagagagcaagcgagacattctgttcctctttgacggctcagccaatcttgtgggccagttccctgttgtccgtgactttctctacaagattatcgatgagctcaatgtgaagccagaggggacccgaattgcggtggctcagtacagcgatgatgtcaaggtggagtcccgttttgatgagcaccagagtaagcctgagatcctgaatcttgtgaagagaatgaagatcaagacgggcaaagccctcaacctgggctacgcgctggactatgcacagaggtacatttttgtgaagtctgctggcagccggatcgaggatggagtgcttcagttcctggtgctgctggtcgcaggaaggtcatctgaccgtgtggatgggccagcaagtaacctgaagcagagtggggttgtgcctttcatcttccaagccaagaacgcagaccctgctgagttagagcagatcgtgctgtctccagcgtttatcctggctgcagagtcgcttcccaagattggagatcttcatccacagatagtgaatctcttaaaatcagtgcacaacggagcaccagcaccagtttcaggtgaaaaggacgtggtgtttctgcttgatggctctgagggcgtcaggagcggcttccctctgttgaaagagtttgtccagagagtggtggaaagcctggatgtgggccaggaccgggtccgcgtggccgtggtgcagtacagcgaccggaccaggcccgagttctacctgaattcatacatgaacaagcaggacgtcgtcaacgctgtccgccagctgaccctgctgggagggccgacccccaacaccggggccgccctggagtttgtcctgaggaacatcctggtcagctctgcgggaagcaggataacagaaggtgtgccccagctgctgatcgtcctcacggccgacaggtctggggatgatgtgcggaacccctccgtggtcgtgaagaggggtggggctgtgcccattggcattggcatcgggaacgctgacatcacagagatgcagaccatctccttcatcccggactttgccgtggccattcccacctttcgccagctggggaccgtccaacaggtcatctctgagagggtgacccagctcacccgcgaggagctgagcaggctgcagccggtgttgcagcctctaccgagcccaggtgttggtggcaagagggacgtggtctttctcatcgatgggtcccaaagtgccgggcctgagttccagtacgttcgcaccctcatagagaggctggttgactacctggacgtgggctttgacaccacccgggtggctgtcatccagttcagcgatgaccccaaggcggagttcctgctgaacgcccattccagcaaggatgaagtgcagaacgcggtgcagcggctgaggcccaagggagggcggcagatcaacgtgggcaatgccctggagtacgtgtccaggaacatcttcaagaggcccctggggagccgcattgaagagggcgtcccacagttcctggtcctcatctcgtctggaaagtctgacgatgaggtggtcgtcccggcggtggagctcaagcagtttggcgtggcccctttcacgatcgccaggaacgcagaccaggaggagctggtgaagatctcgctgagccccgaatatgtgttctcggtgagcaccttccgggagctgcccagcctggagcagaaactgctgacgcccatcacgaccctgacctcagagcagatccagaagctcttagccagcactcgctatccacctccagcagttgagagtgatgctgcagacattgtctttctgatcgacagctctgagggagttaggccagatggctttgcacatattcgagattttgttagcaggattgttcgaagactcaacatcggccccagtaaagtgagagttggggtcgtgcagttcagcaatgatgtcttcccagaattctatctgaaaacctacagatcccaggccccggtgctggacgccatacggcgcctgaggctcagaggggggtccccactgaacactggcaaggctctcgaatttgtggcaagaaacctctttgttaagtctgcggggagtcgcatagaagacggggtgccccaacacctggtcctggtcctgggtggaaaatcccaggacgatgtgtccaggttcgcccaggtgatccgttcctcgggcattgtgagtttaggggtaggagaccggaacatcgacagaacagagctgcagaccatcaccaatgaccccagactggtcttcacagtgcgagagttcagagagcttcccaacatagaagaaagaatcatgaactcgtttggaccctccgcagccactcctgcacctccaggggtggacacccctcctccttcacggccagagaagaagaaagcagacattgtgttcctgttggatggttccatcaacttcaggagggacagtttccaggaagtgcttcgttttgtgtctgaaatagtggacacagtttatgaagatggcgactccatccaagtggggcttgtccagtacaactctgaccccactgacgaattcttcctgaaggacttctctaccaagaggcagattattgacgccatcaacaaagtggtctacaaagggggaagacacgccaacactaaggtgggccttgagcacctgcgggtaaaccactttgtgcctgaggcaggcagccgcctggaccagcgggtccctcagattgcctttgtgatcacgggaggaaagtcggtggaagatgcacaggatgtgagcctggccctcacccagaggggggtcaaagtgtttgctgttggagtgaggaatatcgactcggaggaggttggaaagatagcgtccaacagcgccacagcgttccgcgtgggcaacgtccaggagctgtccgaactgagcgagcaagttttggaaactttgcatgatgcgatgcatgaaaccctttgccctggtgtaactgatgctgccaaagcttgtaatctggatgtgattctggggtttgatggttctagagaccagaatgtttttgtggcccagaagggcttcgagtccaaggtggacgccatcttgaacagaatcagccagatgcacagggtcagctgcagcggtggccgctcgcccaccgtgcgtgtgtcagtggtggccaacacgccctcgggcccggtggaggcctttgactttgacgagtaccagccagagatgctcgagaagttccggaacatgcgcagccagcacccctacgtcctcacggaggacaccctgaaggtctacctgaacaagttcagacagtcctcgccggacagcgtgaaggtggtcattcattttactgatggagcagacggagatctggctgatttacacagagcatctgagaacctccgccaagaaggagtccgtgccttgatcctggtgggccttgaacgagtggtcaacttggagcggctaatgcatctggagtttgggcgagggtttatgtatgacaggcccctgaggcttaacttgctggacttggattatgaactagcggagcagcttgacaacattgccgagaaagcttgctgtggggttccctgcaagtgctctgggcagaggggagaccgcgggcccatcggcagcatcgggccaaagggtattcctggagaagacggctaccgaggctatcctggtgatgagggtggacccggtgagcgtggtccgcctggtgtgaacggcactcaaggtttccagggctgcccgggccagagaggagtaaagggctctcggggattcccaggagagaagggcgaagtaggagaaattggactggatggtctggatggtgaagatggagacaaaggattgcctggttcttctggagagaaagggaatcctggaagaaggggtgataaaggacctcgaggagagaaaggagaaagaggagatgttgggattcgaggggacccgggtaacccaggacaagacagccaggagagaggacccaaaggagaaaccggtgacctcggccccatgggtgtcccagggagagatggagtacctggaggacctggagaaactgggaagaatggtggctttggccgaaggggaccccccggagctaagggcaacaagggcggtcctggccagccgggctttgagggagagcaggggaccagaggtgcacagggcccagctggtcctgctggtcctccagggctgataggagaacaaggcatttctggacctaggggaagcggaggtgcccgtggcgctcctggagaacgaggcagaaccggtccactgggaagaaagggtgagcccggagagccaggaccaaaaggaggaatcgggaacccgggccctcgtggggagacgggagatgacgggagagacggagttggcagtgaaggacgcagaggcaaaaaaggagaaagaggatttcctggatacccaggaccaaagggtaacccaggtgaacctgggctaaatggaacaacaggacccaaaggcatcagaggccgaaggggaaattcgggacctccagggatagttggacagaaggggagacctggctacccaggaccagctggtccaaggggcaacaggggcgactccatcgatcaatgtgccctcatccaaagcatcaaagataaatgcccttgctgttacgggcccctggagtgccccgtcttcccaacagaactagcctttgctttagacacctctgagggagtcaaccaagacactttcggccggatgcgagatgtggtcttgagtattgtgaatgtcctgaccattgctgagagcaactgcccgacgggggcccgggtggctgtggtcacctacaacaacgaggtgaccacggagatccggtttgctgactccaagaggaagtcggtcctcctggacaagattaagaaccttcaggtggctctgacatccaaacagcagagtctggagactgccatgtcgtttgtggccaggaacacatttaagcgtgtgaggaacggattcctaatgaggaaagtggctgttttcttcagcaacacacccacaagagcatccccacagctcagagaggctgtgctcaaactctcagatgcggggatcacccccttgttccttacaaggcaggaagaccggcagctcatcaacgctttgcagatcaataacacagcagtggggcatgcgcttgtcctgcctgcagggagagacctcacagacttcctggagaatgtcctcacgtgtcatgtttgcttggacatctgcaacatcgacccatcctgtggatttggcagttggaggccttccttcagggacaggagagcggcagggagtgatgtggacatcgacatggctttcatcttagacagcgctgagaccaccaccctgttccagttcaatgagatgaagaagtacatagcgtacctggtcagacaactggacatgagcccagatcccaaggcctcccagcacttcgccagagtggcagttgtgcagcacgcgccctctgagtccgtggacaatgccagcatgccacctgtgaaggtggaattctccctgactgactatggctccaaggagaagctggtggacttcctcagcaggggaatgacacagttgcagggaaccagggccttaggcagtgccattgaatacaccatagagaatgtctttgaaagtgccccaaacccacgggacctgaaaattgtggtcctgatgctgacgggcgaggtgccggagcagcagctggaggaggcccagagagtcatcctgcaggccaaatgcaagggctacttcttcgtggtcctgggcattggcaggaaggtgaacatcaaggaggtatacaccttcgccagtgagccaaacgacgtcttcttcaaattagtggacaagtccaccgagctcaacgaggagcctttgatgcgcttcgggaggctgttgccgtccttcgtcagcagtgaaaatgctttttacttgtccccagatatcaggaaacagtgtgattggttccaaggggaccaacccacaaagaaccttgtgaagtttggtcacaaacaagtaaatgttccgaataacgttacttcaagtcctacatccaacccagtgacgacaacgaagccggtgactacgacgaagccggtgaccaccacaacaaagcctgtaaccaccacaacaaagcctgtgactattataaatcagccatctgtgaagccagccgctgcaaagccggcccctgcgaaacctgtggctgccaagcctgtggccacaaagacggccactgttagacccccagtggcggtgaagccagcaacagcagcgaagcctgtagcagcaaagccagcagctgtaagaccccccgctgctgctgcaaaaccagtggcgaccaagcctgaggtccctaggccacaggcagccaaaccagctgccaccaagccagccaccactaagcccgtggttaagatgctccgtgaagtccaggtgtttgagataacagagaacagcgccaaactccactgggagaggcctgagccccccggtccttatttttatgacctcaccgtcacctcagcccatgatcagtccctggttctgaagcagaacctcacggtcacggaccgcgtcattggaggcctgctcgctgggcagacataccatgtggctgtggtctgctacctgaggtctcaggtcagagccacctaccacggaagtttcagtacaaagaaatctcagcccccacctccacagccagcaaggtcagcttctagttcaaccatcaatctaatggtgagcacagaaccattggctctcactgaaacagatatatgcaagttgccgaaagacgaaggaacttgcagggatttcatattaaaatggtactatgatccaaacaccaaaagctgtgcaagattctggtatggaggttgtggtggaaacgaaaacaaatttggatcacagaaagaatgtgaaaaggtttgcgctcctgtgctcgccaaacccggagtcatcagtgtgatgggaacctaagcgtgggtggccaacatcatatacctcttgaagaagaaggagtcagccatcgccaacttgtctctgtagaagctccgggtgtagattcccttgcactgtatcatttcatgctttgatttacactcgaactcgggagggaacatcctgctgcatgacctatcagtatggtgctaatgtgtctgtggaccctcgctctctgtctccagcagttctctcgaatactttgaatgttgtgtaacagttagccactgctggtgtttatgtgaacattcctatcaatccaaattccctctggagtttcatgttatgcctgttgcaggcaaatgtaaagtctagaaaataatgcaaatgtcacggctactctatatacttttgcttggttcattttttttcccttttagttaagcatgactttagatgggaagcctgtgtatcgtggagaaacaagagaccaactttttcattccctgcccccaatttcccagactagatttcaagctaattttctttttctgaagcctctaacaaatgatctagttcagaaggaagcaaaatcccttaatctatgtgcaccgttgggaccaatgccttaattaaagaatttaaaaaagttgtaatagagaatatttttggcattcctctcaatgttgtgtgttttttttttttgtgtgctggagggaggggatttaattttaattttaaaatgtttaggaaatttatacaaagaaactttttaataaagtatattgaaagtttaaaaaaaaaaaaaaaa

SEQ ID NO: 448 - protein, 3176 aa, Homo sapien
MRKHRHLPLVAVFCLFLSGFPTTHAQQQQADVKNGAAADIIFLVDSSWTIGEEHFQLVREFLYDVVKSLAVGENDFHFALVQFNGNPHTEFLLNTYRTKQEVLSHISNMSYIGGTNQTGKGLEYIMQSHLTKAAGSRAGDGVPQVIVVLTDGHSKDGLALPSAELKSADVNVFAIGVEDADEGALKEIASEPLNMHMFNLENFTSLHDIVGNLVSCVHSSVSPERAGDTETLKDITAQDSADIIFLIDGSNNTGSVNFAVILDFLVNLLEKLPIGTQQIRVGVVQFSDEPRTMFSLDTYSTKAQVLGAVKALGFAGGELANIGLALDFVVENHFTRAGGSRVEEGVPQVLVLISAGPSSDEIRYGVVALKQASVFSFGLGAQAASRAELQHIATDDNLVFTVPEFRSFGDLQEKLLPYIVGVAQRHIVLKPPTIVTQVIEVNKRDIVFLVDGSSALGLANFNAIRDFIAKVIQRLEIGQDLIQVAVAQYADTVRPEFYFNTHPTKREVITAVRKMKPLDGSALYTGSALDFVRNNLFTSSAGYRAAEGIPKLLVLITGGKSLDEISQPAQELKRSSIMAFAIGNKGADQAELEEIAFDSSLVFIPAEFRAAPLQGMLPGLLAPLRTLSGTPEVHSNKRDIIFLLDGSANVGKTNFPYVRDFVMNLVNSLDIGNDNIRVGLVQFSDTPVTEFSLNTYQTKSDILGHLRQLQLQGGSGLNTGSALSYVYANHFTEAGGSRIREHVPQLLLLLTAGQSEDSYLQAANALTRAGILTFCVGASQANKAELEQIAFNPSLVYLMDDFSSLPALPQQLIQPLTTYVSGGVEEVPLAQPESKRDILFLFDGSANLVGQFPVVRDFLYKIIDELNVKPEGTRIAVAQYSDDVKVESRFDEHQSKPEILNLVKRMKIKTGKALNLGYALDYAQRYIFVKSAGSRIEDGVLQFLVLLVAGRSSDRVDGPASNLKQSGVVPFIFQAKNADPAELEQIVLSPAFILAAESLPKIGDLHPQIVNLLKSVHNGAPAPVSGEKDVVFLLDGSEGVRSGFPLLKEFVQRVVESLDVGQDRVRVAVVQYSDRTRPEFYLNSYMNKQDVVNAVRQLTLLGGPTPNTGAALEFVLRNILVSSAGSRITEGVPQLLIVLTADRSGDDVRNPSVVVKRGGAVPIGIGIGNADITEMQTISFIPDFAVAIPTFRQLGTVQQVISERVTQLTREELSRLQPVLQPLPSPGVGGKRDVVFLIDGSQSAGPEFQYVRTLIERLVDYLDVGFDTTRVAVIQFSDDPKAEFLLNAHSSKDEVQNAVQRLRPKGGRQINVGNALEYVSRNIFKRPLGSRIEEGVPQFLVLISSGKSDDEVVVPAVELKQFGVAPFTIARNADQEELVKISLSPEYVFSVSTFRELPSLEQKLLTPITTLTSEQIQKLLASTRYPPPAVESDAADIVFLIDSSEGVRPDGFAHIRDFVSRIVRRLNIGPSKVRVGVVQFSNDVFPEFYLKTYRSQAPVLDAIRRLRLRGGSPLNTGKALEFVARNLFVKSAGSRIEDGVPQHLVLVLGGKSQDDVSRFAQVIRSSGIVSLGVGDRNIDRTELQTITNDPRLVFTVREFRELPNIEERIMNSFGPSAATPAPPGVDTPPPSRPEKKKADIVFLLDGSINFRRDSFQEVLRFVSEIVDTVYEDGDSIQVGLVQYNSDPTDEFFLKDFSTKRQIIDAINKVVYKGGRHANTKVGLEHLRVNHFVPEAGSRLDQRVPQIAFVITGGKSVEDAQDVSLALTQRGVKVFAVGVRNIDSEEVGKIASNSATAFRVGNVQELSELSEQVLETLHDAMHETLCPGVTDAAKACNLDVILGFDGSRDQNVFVAQKGFESKVDAILNRISQMHRVSCSGGRSPTVRVSVVANTPSGPVEAFDFDEYQPEMLEKFRNMRSQHPYVLTEDTLKVYLNKFRQSSPDSVKVVIHFTDGADGDLADLHRASENLRQEGVRALILVGLERVVNLERLMHLEFGRGFMYDRPLRLNLLDLDYELAEQLDNIAEKACCGVPCKCSGQRGDRGPIGSIGPKGIPGEDGYRGYPGDEGGPGERGPPGVNGTQGFQGCPGQRGVKGSRGFPGEKGEVGEIGLDGLDGEDGDKGLPGSSGEKGNPGRRGDKGPRGEKGERGDVGIRGDPGNPGQDSQERGPKGETGDLGPMGVPGRDGVPGGPGETGKNGGFGRRGPPGAKGNKGGPGQPGFEGEQGTRGAQGPAGPAGPPGLIGEQGISGPRGSGGARGAPGERGRTGPLGRKGEPGEPGPKGGIGNPGPRGETGDDGRDGVGSEGRRGKKGERGFPGYPGPKGNPGEPGLNGTTGPKGIRGRRGNSGPPGIVGQKGRPGYPGPAGPRGNRGDSIDQCALIQSIKDKCPCCYGPLECPVFPTELAFALDTSEGVNQDTFGRMRDVVLSIVNVLTIAESNCPTGARVAVVTYNNEVTTEIRFADSKRKSVLLDKIKNLQVALTSKQQSLETAMSFVARNTFKRVRNGFLMRKVAVFFSNTPTRASPQLREAVLKLSDAGITPLFLTRQEDRQLINALQINNTAVGHALVLPAGRDLTDFLENVLTCHVCLDICNIDPSCGFGSWRPSFRDRRAAGSDVDIDMAFILDSAETTTLFQFNEMKKYIAYLVRQLDMSPDPKASQHFARVAVVQHAPSESVDNASMPPVKVEFSLTDYGSKEKLVDFLSRGMTQLQGTRALGSAIEYTIENVFESAPNPRDLKIVVLMLTGEVPEQQLEEAQRVILQAKCKGYFFVVLGIGRKVNIKEVYTFASEPNDVFFKLVDKSTELNEEPLMRFGRLLPSFVSSENAFYLSPDIRKQCDWFQGDQPTKNLVKFGHKQVNVPNNVTSSPTSNPVTTTKPVTTTKPVTTTTKPVTTTTKPVTIINQPSVKPAAAKPAPAKPVAAKPVATKTATVRPPVAVKPATAAKPVAAKPAAVRPPAAAAKPVATKPEVPRPQAAKPAATKPATTKPVVKMLREVQVFEITENSAKLHWERPEPPGPYFYDLTVTSAHDQSLVLKQNLTVTDRVIGGLLAGQTYHVAVVCYLRSQVRATYHGSFSTKKSQPPPPQPARSASSSTINLMVSTEPLALTETDICKLPKDEGTCRDFILKWYYDPNTKSCARFWYGGCGGNENKFGSQKECEKVCAPVLAKPGVISVMGT

SEQ ID NO: 449 - DNA, 3237 bp, Homo sapien
cgacgttgaggccgcgttgggcggttcagactcagggtgatggcaggagagctggctgacaaaaaggaccgtgatgcatcaccttccaaggaggaaaggaagcgatcacggactcctgacagagagcgggatagagaccgggaccggaagtcttccccatctaaagatagaaagcggcatcgttcaagggatagacgtcgaggaggcagccgttctcgctctcgttcccgttccaaatctgcagaaagagaacgacggcacaaagaacgagaacgagataaggagcgggatcggaataagaaggaccgagatcgagacaaggatgggcacagacgggacaaggaccgtaaacgatccagcttatctcctggtcgaggaaaagactttaaatctcggaaggacagagactctaagaaggatgaagaggatgaacatggtgataagaagcttaaggcccagccattatccctggaggagcttctggccaagaaaaaggctgaggaagaagctgaggctaagcccaagttcctctctaaagcagaacgagaggctgaagctctaaagcgacggcagcaggaggtggaagagcggcagaggatgcttgaagaagagaggaagaaaaggaaacagttccaagacttgggcaggaagatgttggaagatcctcaggaacgggaacgtcgggaacgcagggagaggatggaacgggagaccaatggaaatgaggatgaggaagggcggcagaagatccgggaagagaaggataagagcaaggaactgcatgccattaaggagcgttacctgggtggcatcaaaaagcggcgccgaacgagacatctcaatgaccggaaatttgtttttgagtgggatgcatctgaggagacatccattgactacaaccccctgtacaaagaacggcaccaggtgcagttgttagggcgaggcttcattgcaggcattgacttcaagcagcagaagcgagagcagtcacgtttctatggagacctaatggagaagaggcgaaccctggaagaaaaggagcaggaggaggcaagactccgcaaacttcgtaagaaggaagccaagcagcgctgggatgatcgtcattggtctcagaaaaagttagatgagatgacggacagggactggcggatcttccgtgaggactacagcatcaccaccaaaggtggcaagatccccaatcccatccgatcctggaaagactcttctctgcccccacacatcttggaggtcattgataagtgtggctacaaggaaccaacacctatccagcgtcaggcaattcccattgggctacagaatcgtgacatcattggtgtggctgagactggcagtggcaagacagcagccttcctcatccctctgctggtctggatcaccacacttcccaaaattgacaggatcgaagagtcagaccaaggcccttatgccatcatcctggctcccacccgtgagttggctcaacagattgaggaagagaccatcaagtttgggaaaccgctaggtatccgcactgtggctgtcattggtggcatctccagagaagaccagggcttcaggctgcgcatgggttgtgagattgtgattgctacccctgggcgtttgattgatgtgctggagaaccgctacctggtgctgagccgctgtacctatgtggttctggatgaggcagataggatgattgacatgggctttgagccagatgtccagaagatcctggagcacatgcctgtcagcaaccagaagccagacacggatgaggctgaggaccctgagaagatgctggccaactttgagtcgggaaaacataagtaccgccaaacagtcatgttcacggccaccatgcccccagcggtggagcgtctggccaggagctatcttcggcgacctgctgtggtgtacattggctccgcaggcaagccccatgagcgtgtggaacagaaggtcttcctcatgtcagagtcagaaaagaggaaaaagctgctggcaatcttggagcaaggctttgacccacccatcattatttttgtcaaccagaagaagggctgcgacgtgttggccaaatccctggagaagatggggtacaatgcttgcacactgcacggtggaaaaggccaggagcagcgagagtttgcgttgtccaacctcaaggctggggccaaggatattttggtggctacagatgtggctggtcgtggtattgacatccaagatgtgtctatggttgtcaactatgatatggccaaaaatattgaagattacatccaccgcattggccgcacgggacgagcaggcaagagtggggtggccatcaccttcctcacaaaagaggactctgctgtgttctacgagctgaagcaagctatcctggaaagcccagtgtcttcctgtccccccgaactagccaaccacccagatgcccagcataagccaggcaccatcctcaccaagaagcgccgggaagagaccatctttgcctgacacagcactcttcctgtgggctgagggcatctccaaagctggcctgatgcctgtttttcagaaccctcacatccctctttccaggtcctcactcttgggatatgggggcttaggaaaacaatccaactccctagcccagaccctcaggtcaggaggcctgcgtgtggggctgcaaaaggagaggacgacgctgtcggaggcagggagagcaaattaccacagcttcttggcccagttctgcccttctttgctttgggattgcactgggccatcagctcatgccaggctatgggggcagccagttggcattgctccccagactgaacagaaacctggccgccggatgggacctcctttggcacagacttgactgtgtaactgcataaactgcagtagcatcattgccctagatgccccaggagacctggcaccatgaggattacagacagtggaatcttactgtcatctggacagctgttttcctgtttggatggtaaaggaagttgagagtctttagacctgtgcacagccccgcaccaaggggtgctgtatgctctaggcatcccctcccccaggggattttttaagtagatggggggacacggtgaactggctgtgtccatctttgtcactgagtgaaatctctgttttctattttctgagaagataagtttgtatgttctgagaataaatacatgaatattaagactgttaaaaaaaaaaaaaaaaaaaaaa

SEQ ID NO: 450 - protein, 820 aa, Homo sapien
MAGELADKKDRDASPSKEERKRSRTPDRERDRDRDRKSSPSKDRKRHRSRDRRRGGSRSRSRSRSKSAERERRHKERERDKERDRNKKDRDRDKDGHRRDKDRKRSSLSPGRGKDFKSRKDRDSKKDEEDEHGDKKLKAQPLSLEELLAKKKAEEEAEAKPKFLSKAEREAEALKRRQQEVEERQRMLEEERKKRKQFQDLGRKMLEDPQERERRERRERMERETNGNEDEEGRQKIREEKDKSKELHAIKERYLGGIKKRRRTRHLNDRKFVFEWDASEETSIDYNPLYKERHQVQLLGRGFIAGIDFKQQKREQSRFYGDLMEKRRTLEEKEQEEARLRKLRKKEAKQRWDDRHWSQKKLDEMTDRDWRIFREDYSITTKGGKIPNPIRSWKDSSLPPHILEVIDKCGYKEPTPIQRQAIPIGLQNRDIIGVAETGSGKTAAFLIPLLVWITTLPKIDRIEESDQGPYAIILAPTRELAQQIEEETIKFGKPLGIRTVAVIGGISREDQGFRLRMGCEIVIATPGRLIDVLENRYLVLSRCTYVVLDEADRMIDMGFEPDVQKILEHMPVSNQKPDTDEAEDPEKMLANFESGKHKYRQTVMFTATMPPAVERLARSYLRRPAVVYIGSAGKPHERVEQKVFLMSESEKRKKLLAILEQGFDPPIIIFVNQKKGCDVLAKSLEKMGYNACTLHGGKGQEQREFALSNLKAGAKDILVATDVAGRGIDIQDVSMVVNYDMAKNIEDYIHRIGRTGRAGKSGVAITFLTKEDSAVFYELKQAILESPVSSCPPELANHPDAQHKPGTILTKKRREETIFA

SEQ ID NO: 451 - DNA, 1396 bp, Homo sapien
gcgtaattaaaaggcggcggaagaaggtgggagggtcatgacgcagcgagtttcagtcgtgacttttctgggggcatcgcggcgtccccttttttttgcctttaaagtaaaacgtcgccccgacgcaccccccgcgtatttcggggggcggaggcggcgggccacggcgcgaagaggggcggtgctgacgccggccggtcacgtgggcgtgttgtgggggggaggggcgccgccgcgcggtcggttccgggcggttgggagcgcgcgagctagcgagcgagaggcagccgcgcccgccgccgcccctgctctgtatgccgctctctcccggcgcggccgccgccgatcacagcagcaggagccaccgccgccgcggttgatgtggttgggccggggctgaggaggccgccaagatgccgcagtccaagtcccggaagatcgcgatcctgggctaccggtctgtggggaaatcctcattgacgattcaatttgttgaaggccaatttgtggactcctacgatccaaccatagaaaacacttttacaaagttgatcacagtaaatggacaagaatatcatcttcaacttgtagacacagccgggcaagatgaatattctatctttcctcagacatactccatagatattaatggctatattcttgtgtattctgttacatcaatcaaaagttttgaagtgattaaagttatccatggcaaattgttggatatggtggggaaagtacaaatacctattatgttggttgggaataagaaagacctgcatatggaaagggtgatcagttatgaagaagggaaagctttggcagaatcttggaatgcagcttttttggaatcttctgctaaagaaaatcagactgctgtggatgtttttcgaaggataattttggaggcagaaaaaatggacggggcagcttcacaaggcaagtcttcatgctcggtgatgtgattctgctgcaaagcctgaggacactgggaatatattctacctgaagaagcaaactgcccgttctccttgaagataaactatgcttcttttttcttctgttaacctgaaagatatcatttgggtcagagctcccctcccttcagattatgttaactctgagtctgtccaaatgagttcacttccattttcaaattttaagcaatcatattttcaatttatatattgtatttcttaatattatgaccaagaattttatcggcattaatttttcagtgtagtttgttgtttaaaataatgtaatcatcaaaatgatgcatattgttacactactattaactaggcttcagtatatcagtgtttatttcattgtgttaaatgtatacttgtaaataaaatagctgcaaacctcaaaaaaaaaaaaaaaaaaa

SEQ ID NO: 452 - protein, 184 aa, Homo sapien
MPQSKSRKIAILGYRSVGKSSLTIQFVEGQFVDSYDPTIENTFTKLITVNGQEYHLQLVDTAGQDEYSIFPQTYSIDINGYILVYSVTSIKSFEVIKVIHGKLLDMVGKVQIPIMLVGNKKDLHMERVISYEEGKALAESWNAAFLESSAKENQTAVDVFRRIILEAEKMDGAASQGKSSCSVM

SEQ ID NO: 453 - DNA, 1488 bp, Homo sapien
gttggtgagcatcatggcaaccgttacagccacaaccaaagtcccggagatccgtgatgtaacaaggattgagcgaatcggtgcccactcccacatccggggactggggctggacgatgccttggagcctcggcaggcttcgcaaggcatggtgggtcagctggcggcacggcgggcggctggcgtggtgctggagatgatccgggaagggaagattgccggtcgggcagtccttattgctggccagccgggcacggggaagacggccatcgccatgggcatggcgcaggccctgggccctgacacgccattcacagccatcgccggcagtgaaatcttctccctggagatgagcaagaccgaggcgctgacgcaggccttccggcggtccatcggcgttcgcatcaaggaggagacggagatcatcgaaggggaggtggtggagatccagattgatcgaccagcaacagggacgggctccaaggtgggcaaactgaccctcaagaccacagagatggagaccatctacgacctgggcaccaagatgattgagtccctgaccaaggacaaggtccaggccggggacgtgatcaccatcgacaaggcgacgggcaagatctccaagctgggccgctccttcacacgcgcccgcgactacgacgctatgggctcccagaccaagttcgtgcagtgcccagatggggagctccagaaacgcaaggaggtggtgcacaccgtgtccctgcacgagatcgacgtcatcaactctcgcacccagggcttcctggcgctcttctcaggtgacacaggggagatcaagtcagaagtccgtgagcagatcaatgccaaggtggctgagtggcgcgaggagggcaaggcggagatcatccctggagtgctgttcatcgacgaggtccacatgctggacatcgagagcttctccttcctcaaccgggccctggagagtgacatggcgcctgtcctgatcatggccaccaaccgtggcatcacgcgaatccggggcaccagctaccagagccctcacggcatccccatagacctgctggaccggctgcttatcgtctccaccaccccctacagcgagaaagacacgaagcagatcctccgcatccggtgcgaggaagaagatgtggagatgagtgaggacgcctacacggtgctgacccgcatcgggctggagacgtcactgcgctacgccatccagctcatcacagctgccagcttggtgtgccggaaacgcaagggtacagaagtgcaggtggatgacatcaagcgggtctactcactcttcctggacgagtcccgctccacgcagtacatgaaggagtaccaggacgccttcctcttcaacgaactcaaaggcgagaccatggacacctcctgagttggatgtcatcccccgaccccaccctgttttccaccagagttctgacactgtgactctgtataaaatggttgggaagctgc

SEQ ID NO: 454 - protein, 463 aa, Homo sapien
MATVTATTKVPEIRDVTRIERIGAHSHIRGLGLDDALEPRQASQGMVGQLAARRAAGVVLEMIREGKIAGRAVLIAGQPGTGKTAIAMGMAQALGPDTPFTAIAGSEIFSLEMSKTEALTQAFRRSIGVRIKEETEIIEGEVVEIQIDRPATGTGSKVGKLTLKTTEMETIYDLGTKMIESLTKDKVQAGDVITIDKATGKISKLGRSFTRARDYDAMGSQTKFVQCPDGELQKRKEVVHTVSLHEIDVINSRTQGFLALFSGDTGEIKSEVREQINAKVAEWREEGKAEIIPGVLFIDEVHMLDIESFSFLNRALESDMAPVLIMATNRGITRIRGTSYQSPHGIPIDLLDRLLIVSTTPYSEKDTKQILRIRCEEEDVEMSEDAYTVLTRIGLETSLRYAIQLITAASLVCRKRKGTEVQVDDIKRVYSLFLDESRSTQYMKEYQDAFLFNELKGETMDTS

SEQ ID NO: 455 - DNA, 3254 bp, Homo sapien
agagttgcactgagtgtggctgaagcagcgaggcgggagtggaggtgcgcggagtcaggcagacagacagacacagccagccagccaggtcggcagtatagtccgaactgcaaatcttattttcttttcaccttctctctaactgcccagagctagcgcctgtggctcccgggctggtggttcgggagtgtccagagagccttgtctccagccggccccgggaggagagccctgctgcccaggcgctgttgacagcggcggaaagcagcggtaccccacgcgcccgccgggggacgtcggcgagcggctgcagcagcaaagaactttcccggcggggaggaccggagacaagtggcagagtcccggagcgaacttttgcaagcctttcctgcgtcttaggcttctccacggcggtaaagaccagaaggcggcggagagccacgcaagagaagaaggacgtgcgctcagcttcgctcgcaccggttgttgaacttgggcgagcgcgagccgcggctgccgggcgccccctccccctagcagcggaggaggggacaagtcgtcggagtccgggcggccaagacccgccgccggccggccactgcagggtccgcactgatccgctccgcggggagagccgctgctctgggaagtgagttcgcctgcggactccgaggaaccgctgcgcccgaagagcgctcagtgagtgaccgcgacttttcaaagccgggtagcgcgcgcgagtcgacaagtaagagtgcgggaggcatcttaattaaccctgcgctccctggagcgagctggtgaggagggcgcagcggggacgacagccagcgggtgcgtgcgctcttagagaaactttccctgtcaaaggctccggggggcgcgggtgtcccccgcttgccagagccctgttgcggccccgaaacttgtgcgcgcacgccaaactaacctcacgtgaagtgacggactgttctatgactgcaaagatggaaacgaccttctatgacgatgccctcaacgcctcgttcctcccgtccgagagcggaccttatggctacagtaaccccaagatcctgaaacagagcatgaccctgaacctggccgacccagtggggagcctgaagccgcacctccgcgccaagaactcggacctcctcacctcgcccgacgtggggctgctcaagctggcgtcgcccgagctggagcgcctgataatccagtccagcaacgggcacatcaccaccacgccgacccccacccagttcctgtgccccaagaacgtgacagatgagcaggaggggttcgccgagggcttcgtgcgcgccctggccgaactgcacagccagaacacgctgcccagcgtcacgtcggcggcgcagccggtcaacggggcaggcatggtggctcccgcggtagcctcggtggcagggggcagcggcagcggcggcttcagcgccagcctgcacagcgagccgccggtctacgcaaacctcagcaacttcaacccaggcgcgctgagcagcggcggcggggcgccctcctacggcgcggccggcctggcctttcccgcgcaaccccagcagcagcagcagccgccgcaccacctgccccagcagatgcccgtgcagcacccgcggctgcaggccctgaaggaggagcctcagacagtgcccgagatgcccggcgagacaccgcccctgtcccccatcgacatggagtcccaggagcggatcaaggcggagaggaagcgcatgaggaaccgcatcgctgcctccaagtgccgaaaaaggaagctggagagaatcgcccggctggaggaaaaagtgaaaaccttgaaagctcagaactcggagctggcgtccacggccaacatgctcagggaacaggtggcacagcttaaacagaaagtcatgaaccacgttaacagtgggtgccaactcatgctaacgcagcagttgcaaacattttgaagagagaccgtcgggggctgaggggcaacgaagaaaaaaaataacacagagagacagacttgagaacttgacaagttgcgacggagagaaaaaagaagtgtccgagaactaaagccaagggtatccaagttggactgggttcggtctgacggcgcccccagtgtgcacgagtgggaaggacttggtcgcgccctcccttggcgtggagccagggagcggccgcctgcgggctgccccgctttgcggacgggctgtccccgcgcgaacggaacgttggactttcgttaacattgaccaagaactgcatggacctaacattcgatctcattcagtattaaaggggggagggggagggggttacaaactgcaatagagactgtagattgcttctgtagtactccttaagaacacaaagcggggggagggttggggaggggcggcaggagggaggtttgtgagagcgaggctgagcctacagatgaactctttctggcctgctttcgttaactgtgtatgtacatatatatattttttaatttgattaaagctgattactgtcaataaacagcttcatgcctttgtaagttatttcttgtttgtttgtttgggtatcctgcccagtgttgtttgtaaataagagatttggagcactctgagtttaccatttgtaataaagtatataatttttttatgttttgtttctgaaaattccagaaaggatatttaagaaaatacaataaactattggaaagtactcccctaacctcttttctgcatcatctgtagatcctagtctatctaggtggagttgaaagagttaagaatgctcgataaaatcactctcagtgcttcttactattaagcagtaaaaactgttctctattagacttagaaataaatgtacctgatgtacctgatgctatgtcaggcttcatactccacgctcccccagcgtatctatatggaattgcttaccaaaggctagtgcgatgtttcaggaggctggaggaaggggggttgcagtggagagggacagcccactgagaagtcaaacatttcaaagtttggattgcatcaagtggcatgtgctgtgaccatttataatgttagaaattttacaataggtgcttattctcaaagcaggaattggtggcagattttacaaaagatgtatccttccaatttggaatcttctctttgacaattcctagataaaaagatggcctttgtcttatgaatatttataacagcattctgtcacaataaatgtattcaaataccaat

SEQ ID NO: 456 - protein, 331 aa, Homo sapien
MTAKMETTFYDDALNASFLPSESGPYGYSNPKILKQSMTLNLADPVGSLKPHLRAKNSDLLTSPDVGLLKLASPELERLIIQSSNGHITTTPTPTQFLCPKNVTDEQEGFAEGFVRALAELHSQNTLPSVTSAAQPVNGAGMVAPAVASVAGGSGSGGFSASLHSEPPVYANLSNFNPGALSSGGGAPSYGAAGLAFPAQPQQQQQPPHHLPQQMPVQHPRLQALKEEPQTVPEMPGETPPLSPIDMESQERIKAERKRMRNRIAASKCRKRKLERIARLEEKVKTLKAQNSELASTANMLREQVAQLKQKVMNHVNSGCQLMLTQQLQTF

SEQ ID NO: 457 - DNA, 3254 bp, Homo sapien; identical to SEQ ID NO: 455

SEQ ID NO: 458 - protein, 331 aa, Homo sapien; identical to SEQ ID NO: 456

SEQ ID NO: 459 - DNA, 3254 bp, Homo sapien; identical to SEQ ID NO: 455

SEQ ID NO: 460 - protein, 331 aa, Homo sapien; identical to SEQ ID NO: 456

SEQ ID NO: 461 - DNA, 793 bp, Homo sapien
tgcgccacgatgtccggggagtcagccaggagcttggggaagggaagcgcgcccccggggccggtcccggagggctcgatccgcatctacagcatgaggttctgcccgtttgctgagaggacgcgtctagtcctgaaggccaagggaatcaggcatgaagtcatcaatatcaacctgaaaaataagcctgagtggttctttaagaaaaatccctttggtctggtgccagttctggaaaacagtcagggtcagctgatctacgagtctgccatcacctgtgagtacctggatgaagcatacccagggaagaagctgttgccggatgacccctatgagaaagcttgccagaagatgatcttagagttgttttctaaggtgccatccttggtaggaagctttattagaagccaaaataaagaagactatgctggcctaaaagaagaatttcgtaaagaatttaccaagctagaggaggttctgactaataagaagacgaccttctttggtggcaattctatctctatgattgattacctcatctggccctggtttgaacggctggaagcaatgaagttaaatgagtgtgtagaccacactccaaaactgaaactgtggatggcagccatgaaggaagatcccacagtctcagccctgcttactagtgagaaagactggcaaggtttcctagagctctacttacagaacagccctgaggcctgtgactatgggctctgaagggggcaggagtcagcaataaagctatgtctgatattttccttcagtaaaaaaaaaa

SEQ ID NO: 462 - protein, 241 aa, Homo sapien
MSGESARSLGKGSAPPGPVPEGSIRIYSMRFCPFAERTRLVLKAKGIRHEVININLKNKPEWFFKKNPFGLVPVLENSQGQLIYESAITCEYLDEAYPGKKLLPDDPYEKACQKMILELFSKVPSLVGSFIRSQNKEDYAGLKEEFRKEFTKLEEVLTNKKTTFFGGNSISMIDYLIWPWFERLEAMKLNECVDHTPKLKLWMAAMKEDPTVSALLTSEKDWQGFLELYLQNSPEACDYGL

SEQ ID NO: 463 - DNA, 1797 bp, Homo sapien
ccagcagggagctgggagctgggggaaacgacgccaggaaagctatcgcgccagagagggcgacgggggctcgggaagcctgacagggcttttgcgcacagctgccggctggctgctacccgcccgcgccagcccccgagaacgcgcgaccaggcacccagtccggtcaccgcagcggagagctcgccgctcgctgcagcgaggcccggagcggccccgcagggaccctccccagaccgcctgggccgcccggatgtgcactaaaatggaacagcccttctaccacgacgactcatacacagctacgggatacggccgggcccctggtggcctctctctacacgactacaaactcctgaaaccgagcctggcggtcaacctggccgacccctaccggagtctcaaagcgcctggggctcgcggacccggcccagagggcggcggtggcggcagctacttttctggtcagggctcggacaccggcgcgtctctcaagctcgcctcttcggagctggaacgcctgattgtccccaacagcaacggcgtgatcacgacgacgcctacacccccgggacagtacttttacccccgcgggggtggcagcggtggaggtgcagggggcgcagggggcggcgtcaccgaggagcaggagggcttcgccgacggctttgtcaaagccctggacgatctgcacaagatgaaccacgtgacaccccccaacgtgtccctgggcgctaccggggggcccccggctgggcccgggggcgtctacgccggcccggagccacctcccgtttacaccaacctcagcagctactccccagcctctgcgtcctcgggaggcgccggggctgccgtcgggaccgggagctcgtacccgacgaccaccatcagctacctcccacacgcgccgcccttcgccggtggccacccggcgcagctgggcttgggccgcggcgcctccaccttcaaggaggaaccgcagaccgtgccggaggcgcgcagccgggacgccacgccgccggtgtcccccatcaacatggaagaccaagagcgcatcaaagtggagcgcaagcggctgcggaaccggctggcggccaccaagtgccggaagcggaagctggagcgcatcgcgcgcctggaggacaaggtgaagacgctcaaggccgagaacgcggggctgtcgagtaccgccggcctcctccgggagcaggtggcccagctcaaacagaaggtcatgacccacgtcagcaacggctgtcagctgctgcttggggtcaagggacacgccttctgaacgtcccctgcccctttacggacaccccctcgcttggacggctgggcacacgcctcccactggggtccagggagcaggcggtgggcacccaccctgggacctaggggcgccgcaaaccacactggactccggcccccctaccctgcgcccagtccttccacctcgacgtttacaagcccccccttccacttttttttgtatgttttttttctgctggaaacagactcgattcatattgaatataatatatttgtgtatttaacagggaggggaagagggggcgatcgcggcggagctggccccgccgcctggtactcaagcccgcggggacattgggaaggggacccccgccccctgccctcccctctctgcaccgtactgtggaaaagaaacacgcacttagtctctaaagagtttattttaagacgtgtttgtgtttgtgtgtgtttgttctttttattgaatctatttaagtaaaaaaaaaattggttctttattaa

SEQ ID NO: 464 - protein, 347 aa, Homo sapien
MCTKMEQPFYHDDSYTATGYGRAPGGLSLHDYKLLKPSLAVNLADPYRSLKAPGARGPGPEGGGGGSYFSGQGSDTGASLKLASSELERLIVPNSNGVITTTPTPPGQYFYPRGGGSGGGAGGAGGGVTEEQEGFADGFVKALDDLHKMNHVTPPNVSLGATGGPPAGPGGVYAGPEPPPVYTNLSSYSPASASSGGAGAAVGTGSSYPTTTISYLPHAPPFAGGHPAQLGLGRGASTFKEEPQTVPEARSRDATPPVSPINMEDQERIKVERKRLRNRLAATKCRKRKLERIARLEDKVKTLKAENAGLSSTAGLLREQVAQLKQKVMTHVSNGCQLLLGVKGHAF

SEQ ID NO: 465 - DNA, 2795 bp, Homo sapien
atcagcgagggattcacggcgaaatgagactgttcgtgagtgatggcgtcccgggttgcttgccggtgctggccgccgccgggagagcccggggcagagcagaggtgctcatcagcactgtaggcccggaagattgtgtggtcccgttcctgacccggcctaaggtccctgtcttgcagctggatagcggcaactacctcttctccactagtgcaatctgccgatatttttttttgttatctggctgggagcaagatgacctcactaaccagtggctggaatgggaagcgacagagctgcagccagctttgtctgctgccctgtactatttagtggtccaaggcaagaagggggaagatgttcttggttcagtgcggagagccctgactcacattgaccacagcttgagtcgtcagaactgtcctttcctggctggggagacagaatctctagccgacattgttttgtggggagccctatacccattactgcaagatcccgcctacctccctgaggagctgagtgccctgcacagctggttccagacactgagtacccaggaaccatgtcagcgagctgcagagactgtactgaaacagcaaggtgtcctggctctccggccttacctccaaaagcagccccagcccagccccgctgagggaagggctgtcaccaatgagcctgaggaggaggagctggctaccctatctgaggaggagattgctatggctgttactgcttgggagaagggcctagaaagtttgcccccgctgcggccccagcagaatccagtgttgcctgtggctggagaaaggaatgtgctcatcaccagtgccctcccttacgtcaacaatgtcccccaccttgggaacatcattggttgtgtgctcagtgccgatgtctttgccaggtactctcgcctccgccagtggaacaccctctatctgtgtgggacagatgagtatggtacagcaacagagaccaaggctctggaggagggactaaccccccaggagatctgcgacaagtaccacatcatccatgctgacatctaccgctggtttaacatttcgtttgatatttttggtcgcaccaccactccacagcagaccaaaatcacccaggacattttccagcagttgctgaaacgaggttttgtgctgcaagatactgtggagcaactgcgatgtgagcactgtgctcgcttcctggctgaccgcttcgtggagggcgtgtgtcccttctgtggctatgaggaggctcggggtgaccagtgtgacaagtgtggcaagctcatcaatgctgtcgagcttaagaagcctcagtgtaaagtctgccgatcatgccctgtggtgcagtcgagccagcacctgtttctggacctgcctaagctggagaagcgactggaggagtggttggggaggacattgcctggcagtgactggacacccaatgcccagtttatcacccgttcttggcttcgggatggcctcaagccacgctgcataacccgagacctcaaatggggaacccctgtacccttagaaggttttgaagacaaggtattctatgtctggtttgatgccactattggctatctgtccatcacagccaactacacagaccagtgggagagatggtggaagaacccagagcaagtggacctgtatcagttcatggccaaagacaatgttcctttccatagcttagtctttccttgctcagccctaggagctgaggataactataccttggtcagccacctcattgctacagagtacctgaactatgaggatgggaaattctctaagagccgcggtgtgggagtgtttggggacatggcccaggacacggggatccctgctgacatctggcgcttctatctgctgtacattcggcctgagggccaggacagtgctttctcctggacggacctgctgctgaagaataattctgagctgcttaacaacctgggcaacttcatcaacagagctgggatgtttgtgtctaagttctttgggggctatgtgcctgagatggtgctcacccctgatgatcagcgcctgctggcccatgtcaccctggagctccagcactatcaccagctacttgagaaggttcggatccgggatgccttgcgcagtatcctcaccatatctcgacatggcaaccaatatattcaggtgaatgagccctggaagcggattaaaggcagtgaggctgacaggcaacgggcaggaacagtgactggcttggcagtgaatatagctgccttgctctctgtcatgcttcagccttacatgcccacggttagtgccacaatccaggcccagctgcagctcccacctccagcctgcagtatcctgctgacaaacttcctgtgtaccttaccagcaggacaccagattggcacagtcagtcccttgttccaaaaattggaaaatgaccagattgaaagtttaaggcagcgctttggagggggccaggcaaaaacgtccccgaagccagcagttgtagagactgttacaacagccaagccacagcagatacaagcgctgatggatgaagtgacaaaacaaggaaacattgtccgagaactgaaagcacaaaaggcagacaagaacgaggttgctgcggaggtggcgaaactcttggatctaaagaaacagttggctgtagctgaggggaaaccccctgaagcccctaaaggcaagaagaaaaagtaaaagaccttggctcatagaaagtcactttaatagatagggacagtaataaataaatgtacaatctctata

SEQ ID NO: 466 - protein, 900 aa, Homo sapien
MRLFVSDGVPGCLPVLAAAGRARGRAEVLISTVGPEDCVVPFLTRPKVPVLQLDSGNYLFSTSAICRYFFLLSGWEQDDLTNQWLEWEATELQPALSAALYYLVVQGKKGEDVLGSVRRALTHIDHSLSRQNCPFLAGETESLADIVLWGALYPLLQDPAYLPEELSALHSWFQTLSTQEPCQRAAETVLKQQGVLALRPYLQKQPQPSPAEGRAVTNEPEEEELATLSEEEIAMAVTAWEKGLESLPPLRPQQNPVLPVAGERNVLITSALPYVNNVPHLGNIIGCVLSADVFARYSRLRQWNTLYLCGTDEYGTATETKALEEGLTPQEICDKYHIIHADIYRWFNISFDIFGRTTTPQQTKITQDIFQQLLKRGFVLQDTVEQLRCEHCARFLADRFVEGVCPFCGYEEARGDQCDKCGKLINAVELKKPQCKVCRSCPVVQSSQHLFLDLPKLEKRLEEWLGRTLPGSDWTPNAQFITRSWLRDGLKPRCITRDLKWGTPVPLEGFEDKVFYVWFDATIGYLSITANYTDQWERWWKNPEQVDLYQFMAKDNVPFHSLVFPCSALGAEDNYTLVSHLIATEYLNYEDGKFSKSRGVGVFGDMAQDTGIPADIWRFYLLYIRPEGQDSAFSWTDLLLKNNSELLNNLGNFINRAGMFVSKFFGGYVPEMVLTPDDQRLLAHVTLELQHYHQLLEKVRIRDALRSILTISRHGNQYIQVNEPWKRIKGSEADRQRAGTVTGLAVNIAALLSVMLQPYMPTVSATIQAQLQLPPPACSILLTNFLCTLPAGHQIGTVSPLFQKLENDQIESLRQRFGGGQAKTSPKPAVVETVTTAKPQQIQALMDEVTKQGNIVRELKAQKADKNEVAAEVAKLLDLKKQLAVAEGKPPEAPKGKKKK

SEQ ID NO: 467 - DNA, 3117 bp, Homo sapien
attcgaaccccgtcgcgcccctttgtgcgtcacgggtggcgggcgcgggaaggggatttggattgttgcgcctctgctctgaagaaagtgctgtctggctccaactccagttctttcccctgagcagcgcctggaacctaacccttcccactctgtcaccttctcgatcccgccggcgctttagagccgcagtccagtcttggatccttcagagcctcagccactagctgcgatgcatgtgatcaagcgagatggccgccaagaacgagtcatgtttgacaaaattacatctcgaatccagaagctttgttatggactcaatatggattttgttgatcctgctcagatcaccatgaaagtaatccaaggcttgtacagtggggtcaccacagtggaactagatactttggctgctgaaacagctgcaaccttgactactaagcaccctgactatgctatcctggcagccaggatcgctgtctctaacttgcacaaagaaacaaagaaagtgttcagtgatgtgatggaagacctctataactacataaatccacataatggcaaacactctcccatggtggccaagtcaacattggatattgttctggccaataaagatcgcctgaattctgctattatctatgaccgagatttctcttacaattacttcggctttaagacgctagagcggtcttatttgttgaagatcaatggaaaagtggctgaaagaccacaacatatgttgatgagagtatctgttgggatccacaaagaagacattgatgcagcaattgaaacatataatcttctttctgagaggtggtttactcatgcttcgcccactctcttcaatgctggtaccaaccgcccacaactttctagctgttttcttctgagtatgaaagatgacagcattgaaggcatttatgacactctaaagcaatgtgcattgatttctaagtctgctggaggaattggtgttgctgtgagttgtattcgggctactggcagctacattgctgggactaatggcaattccaatggccttgtaccgatgctgagagtatataacaacacagctagatatgtggatcaaggtgggaacaagcgtcctggggcatttgctatttacctggagccttggcatttagacatctttgaattccttgatttaaagaagaacacaggaaaggaagagcagcgtgccagagatcttttctttgctctttggattccggatctcttcatgaaacgagtggagactaatcaggactggtctttgatgtgtccaaatgagtgtcctggtctggatgaggtttggggagaggaatttgagaaactatatgcaagttatgagaaacaaggtcgtgtccgcaaagttgtaaaagctcagcagctttggtatgccatcattgagtctcagacggaaacaggcaccccgtatatgctctacaaagattcctgtaatcgaaagagcaaccagcagaacctgggaaccatcaaatgcagcaacctgtgcacagaaatagtggagtacaccagcaaagatgaggttgctgtttgtaatttggcttccctggccctgaatatgtatgtcacatcagaacacacatacgactttaagaagttggctgaagtcactaaagtcgttgtccgaaacttgaataaaattattgatataaactactatcctgtaccagaggcatgcctatcaaataaacgccatcgccccattggaattggggtacaaggtctggcagatgcttttatcctgatgagatacccttttgagagtgcagaagcccagttactgaataagcagatctttgaaactatttattatggtgctctggaagccagctgtgaccttgccaaggagcagggcccatacgaaacctatgagggctctccagttagcaaaggaattcttcagtatgatatgtggaatgttactcctacagacctatgggactggaaggttctcaaggagaagattgcaaagtatggtataagaaacagtttacttattgccccgatgcctacagcttccactgctcagatcctggggaataatgagtccattgaaccttacaccagcaacatctatactcgcagagtcttgtcaggagaatttcagattgtaaatcctcacttattgaaagatcttaccgagcggggcctatggcatgaagagatgaaaaaccagattattgcatgcaatggctctattcagagcataccagaaattcctgatgacctgaagcaactttataaaactgtgtgggaaatctctcagaaaactgttctcaagatggcagctgagagaggtgctttcattgatcaaagccaatctttgaacatccacattgctgagcctaactatggcaaactcactagtatgcacttctacggctggaagcagggtttgaagactgggatgtattatttaaggacaagaccagcagctaatccaatccagttcactctaaataaggagaagctaaaagataaagaaaaggtatcaaaagaggaagaagagaaggagaggaacacagcagccatggtgtgctctttggagaatagagatgaatgtctgatgtgtggatcctgaggaaagacttggaagagaccagcatgtcttcagtagccaaactacttcttgagcatagataggtatagtgggtttgcttgaggtggtaaggctttgctggaccctgttgcaggcaaaaggagtaattgatttaaagtactgttaatgatgttaatgatttttttttaaactcatatattgggattttcaccaaaataatgcttttgaaaaaaagaaaaaaaaaacggatatattgagaatcaaagtagaagttttaggaatgcaaaataagtcatcttgcatacagggagtggttaagtaaggtttcatcacccatttagcatgcttttctgaagacttcagttttgttaaggagatttagttttactgctttgactggtgggtctctagaagcaaaactgagtgataactcatgagaagtactgataggacctttatctggatatggtcctataggttattctgaaataaagataaacatttctaagtgaaaaaaaaaaaaaaaa

SEQ ID NO: 468 - protein, 792 aa, Homo sapien
MHVIKRDGRQERVMFDKITSRIQKLCYGLNMDFVDPAQITMKVIQGLYSGVTTVELDTLAAETAATLTTKHPDYAILAARIAVSNLHKETKKVFSDVMEDLYNYINPHNGKHSPMVAKSTLDIVLANKDRLNSAIIYDRDFSYNYFGFKTLERSYLLKINGKVAERPQHMLMRVSVGIHKEDIDAAIETYNLLSERWFTHASPTLFNAGTNRPQLSSCFLLSMKDDSIEGIYDTLKQCALISKSAGGIGVAVSCIRATGSYIAGTNGNSNGLVPMLRVYNNTARYVDQGGNKRPGAFAIYLEPWHLDIFEFLDLKKNTGKEEQRARDLFFALWIPDLFMKRVETNQDWSLMCPNECPGLDEVWGEEFEKLYASYEKQGRVRKVVKAQQLWYAIIESQTETGTPYMLYKDSCNRKSNQQNLGTIKCSNLCTEIVEYTSKDEVAVCNLASLALNMYVTSEHTYDFKKLAEVTKVVVRNLNKIIDINYYPVPEACLSNKRHRPIGIGVQGLADAFILMRYPFESAEAQLLNKQIFETIYYGALEASCDLAKEQGPYETYEGSPVSKGILQYDMWNVTPTDLWDWKVLKEKIAKYGIRNSLLIAPMPTASTAQILGNNESIEPYTSNIYTRRVLSGEFQIVNPHLLKDLTERGLWHEEMKNQIIACNGSIQSIPEIPDDLKQLYKTVWEISQKTVLKMAAERGAFIDQSQSLNIHIAEPNYGKLTSMHFYGWKQGLKTGMYYLRTRPAANPIQFTLNKEKLKDKEKVSKEEEEKERNTAAMVCSLENRDECLMCGS

SEQ ID NO: 469 - DNA, 3117 bp, Homo sapien; identical to SEQ ID NO: 467

SEQ ID NO: 470 - protein, 792 aa, Homo sapien; identical to SEQ ID NO: 468

SEQ ID NO: 471 - DNA, 2465 bp, Homo sapien
gagcagcgcggcctgacgggaccaaggcggcgggagtctgcggtcgttccctcggctgtggaccgggcggcacgcacgcggtgcagggtaacatggcggatgcggaagtaattattttgccaaagaaacataagaagaaaaaggagcggaagtcattgccagaagaagatgtagccgaaatacaacacgctgaagaatttcttatcaaacctgaatccaaagttgctaagttggacacgtctcagtggccccttttgctaaagaattttgataagctgaatgtaaggacaacacactatacacctcttgcatgtggttcaaatcctctgaagagagagattggggactatatcaggacaggtttcattaatcttgacaagccctctaacccctcttcccatgaggtggtagcctggattcgacggatacttcgggtggagaagacagggcacagtggtactctggatcccaaggtgactggttgtttaatcgtgtgcatagaacgagccactcgcttggtgaagtcacaacagagtgcaggcaaagagtatgtggggattgtccggctgcacaatgctattgaaggggggacccagctttctagggccctagaaactctgacaggtgccttattccagcgacccccacttattgctgcagtaaagaggcagctccgagtgaggaccatctacgagagcaaaatgattgaatacgatcctgaaagaagattaggaatcttttgggtgagttgtgaggctggcacctacattcggacattatgtgtgcaccttggtttgttattgggagttggtggtcagatgcaggagcttcggagggttcgttctggagtcatgagtgaaaaggaccacatggtgacaatgcatgatgtgcttgatgctcagtggctgtatgataaccacaaggatgagagttacctgcggcgagttgtttaccctttggaaaagctgttgacatctcataaacggctggttatgaaagacagtgcagtaaatgccatctgctatggggccaagattatgcttccaggtgttcttcgatatgaggacggcattgaggtcaatcaggagattgtggttatcaccaccaaaggagaagcaatctgcatggctattgcattaatgaccacagcggtcatctctacctgcgaccatggtatagtagccaagatcaagagagtgatcatggagagagacacttaccctcggaagtggggtttaggtccaaaggcaagtcagaagaagctgatgatcaagcagggccttctggacaagcatgggaagcccacagacagcacacctgccacctggaagcaggagtatgttgactacagtgagtctgccaaaaaagaggtggttgctgaagtggtaaaagccccgcaggtagttgccgaagcagcaaaaactgcgaagcggaagcgagagagtgagagtgaaagtgacgagactcctccagcagctcctcagttgatcaagaaggaaaagaagaagagtaagaaggacaagaaggccaaagctggtctggagagcggggccgagcctggagatggggacagtgataccaccaagaagaagaagaagaagaagaaagcaaaagaggtagaattggtttctgagtagtgaaggccacttgaagctggaggagaaactaaagccttattgagaaaacatgttatagatccttttgttgctgagagagtggaacataggtcctagacagggtgaagagttctggcacattttagctgctactttgagacctcggtgatgttacctggtgtggtcatcccatcttgtcctgttttaaggatatgggtggtgaaagatgaaagaggcagagtttatcccaatgacttctctgtttgagttgggaagcctcaccttcagacccagtaactgtccgcagctgtctgctagtggttgtcttaacatcgtagtcctagtttgcattttttaaatcccctctgtttaaaaggtttgtaaaacaaaaacaaaaaactaagtctgctcagtgaaatgctgtagaaccctaaataagtggtagaagagtgtcactgaattttgtctctgaattcagtataactgagttttgtccatgctggtgtctgggttataggcctgatgggcctggtagttttccatcttgttctggcctagaggtcagtcctttgcacttcctcaaagcttgtgtacagtgctcacctaaatccatctgactacttgttcctgtgccctcttgttttaggcctcgtttacttttaaaaaatgaaattgttcattgctgggagaagaatgttgtaatttttacttattaaagtcaacttgttaagttttttatgtattcctgttgggttttcttgttgatctcatgctagcagagcaaaaattgtaaaatattttgattaaaaatctagggacctttatgtcctatttggaattcgatatcaa

SEQ ID NO: 472 - protein, 514 aa, Homo sapien
MADAEVIILPKKHKKKKERKSLPEEDVAEIQHAEEFLIKPESKVAKLDTSQWPLLLKNFDKLNVRTTHYTPLACGSNPLKREIGDYIRTGFINLDKPSNPSSHEVVAWIRRILRVEKTGHSGTLDPKVTGCLIVCIERATRLVKSQQSAGKEYVGIVRLHNAIEGGTQLSRALETLTGALFQRPPLIAAVKRQLRVRTIYESKMIEYDPERRLGIFWVSCEAGTYIRTLCVHLGLLLGVGGQMQELRRVRSGVMSEKDHMVTMHDVLDAQWLYDNHKDESYLRRVVYPLEKLLTSHKRLVMKDSAVNAICYGAKIMLPGVLRYEDGIEVNQEIVVITTKGEAICMAIALMTTAVISTCDHGIVAKIKRVIMERDTYPRKWGLGPKASQKKLMIKQGLLDKHGKPTDSTPATWKQEYVDYSESAKKEVVAEVVKAPQVVAEAAKTAKRKRESESESDETPPAAPQLIKKEKKKSKKDKKAKAGLESGAEPGDGDSDTTKKKKKKKKAKEVELVSE

SEQ ID NO: 473 - DNA, 1904 bp, Homo sapien
agctatttcaaggcgcgcgcctcgtggtggactcaccgctagcccgcagcgctcggcttcctggtaattcttcacctcttttctcagctccctgcagcatgggtgctgggccctccttgctgctcgccgccctcctgctgcttctctccggcgacggcgccgtgcgctgcgacacacctgccaactgcacctatcttgacctgctgggcacctgggtcttccaggtgggctccagcggttcccagcgcgatgtcaactgctcggttatgggaccacaagaaaaaaaagtagtggtgtaccttcagaagctggatacagcatatgatgaccttggcaattctggccatttcaccatcatttacaaccaaggctttgagattgtgttgaatgactacaagtggtttgccttttttaagtataaagaagagggcagcaaggtgaccacttactgcaacgagacaatgactgggtgggtgcatgatgtgttgggccggaactgggcttgtttcaccggaaagaaggtgggaactgcctctgagaatgtgtatgtcaacacagcacaccttaagaattctcaggaaaagtattctaataggctctacaagtatgatcacaactttgtgaaagctatcaatgccattcagaagtcttggactgcaactacatacatggaatatgagactcttaccctgggagatatgattaggagaagtggtggccacagtcgaaaaatcccaaggcccaaacctgcaccactgactgctgaaatacagcaaaagattttgcatttgccaacatcttgggactggagaaatgttcatggtatcaattttgtcagtcctgttcgaaaccaagcatcctgtggcagctgctactcatttgcttctatgggtatgctagaagcgagaatccgtatactaaccaacaattctcagaccccaatcctaagccctcaggaggttgtgtcttgtagccagtatgctcaaggctgtgaaggcggcttcccataccttattgcaggaaagtacgcccaagattttgggctggtggaagaagcttgcttcccctacacaggcactgattctccatgcaaaatgaaggaagactgctttcgttattactcctctgagtaccactatgtaggaggtttctatggaggctgcaatgaagccctgatgaagcttgagttggtccatcatgggcccatggcagttgcttttgaagtatatgatgacttcctccactacaaaaaggggatctaccaccacactggtctaagagaccctttcaacccctttgagctgactaatcatgctgttctgcttgtgggctatggcactgactcagcctctgggatggattactggattgttaaaaacagctggggcaccggctggggtgagaatggctacttccggatccgcagaggaactgatgagtgtgcaattgagagcatagcagtggcagccacaccaattcctaaattgtagggtatgccttccagtatttcataatgatctgcatcagttgtaaaggggaattggtatattcacagactgtagactttcagcagcaatctcagaagcttacaaatagatttccatgaagatatttgtcttcagaattaaaactgcccttaattttaatatacctttcaatcggccactggccatttttttctaagtattcaattaagtgggaattttctggaagatggtcagctatgaagtaatagagtttgcttaatcatttgtaattcaaacatgctatattttttaaaatcaatgtgaaaacatagacttatttttaaattgtaccaatcacaagaaaataatggcaataattatcaaaacttttaaaatagatgctcatatttttaaaataaagttttaaaaataactgca

SEQ ID NO: 474 - protein, 463 aa, Homo sapien
MGAGPSLLLAALLLLLSGDGAVRCDTPANCTYLDLLGTWVFQVGSSGSQRDVNCSVMGPQEKKVVVYLQKLDTAYDDLGNSGHFTIIYNQGFEIVLNDYKWFAFFKYKEEGSKVTTYCNETMTGWVHDVLGRNWACFTGKKVGTASENVYVNTAHLKNSQEKYSNRLYKYDHNFVKAINAIQKSWTATTYMEYETLTLGDMIRRSGGHSRKIPRPKPAPLTAEIQQKILHLPTSWDWRNVHGINFVSPVRNQASCGSCYSFASMGMLEARIRILTNNSQTPILSPQEVVSCSQYAQGCEGGFPYLIAGKYAQDFGLVEEACFPYTGTDSPCKMKEDCFRYYSSEYHYVGGFYGGCNEALMKLELVHHGPMAVAFEVYDDFLHYKKGIYHHTGLRDPFNPFELTNHAVLLVGYGTDSASGMDYWIVKNSWGTGWGENGYFRIRRGTDECAIESIAVAATPIPKL

SEQ ID NO: 475 - DNA, 1591 bp, Homo sapien
tctgggcgcgcgcgacgtcagtttgagttctgtgttctccccgcccgtgtcccgcccgacccgcgcccgcgatgctggcgctgcgctgcggctcccgctggctcggcctgctctccgtcccgcgctccgtgccgctgcgcctccccgcggcccgcgcctgcagcaagggctccggcgacccgtcctcttcctcctcctccgggaacccgctcgtgtacctggacgtggacgccaacgggaagccgctcggccgcgtggtgctggagctgaaggcagatgtcgtcccaaagacagctgagaacttcagagccctgtgcactggtgagaagggcttcggctacaaaggctccaccttccacagggtgatcccttccttcatgtgccaggcgggcgacttcaccaaccacaatggcacaggcgggaagtccatctacggaagccgctttcctgacgagaactttacactgaagcacgtggggccaggtgtcctgtccatggctaatgctggtcctaacaccaacggctcccagttcttcatctgcaccataaagacagactggttggatggcaagcatgttgtgttcggtcacgtcaaagagggcatggacgtcgtgaagaaaatagaatctttcggctctaagagtgggaggacatccaagaagattgtcatcacagactgtggccagttgagctaatctgtggccagggtgctggcatggtggcagctgcaaatgtccatgcacccaggtggccgcgttgggctgtcagccaaggtgcctgaaacgatacgtgtgcccactccactgtcacagtgtgcctgaggaaggctgctagggatgttagacctcggccaggacccaccacattgcttcctaatacccacccttcctcacgacctcatttctgggcatctttgtggacatgatgtcacccaccccttgtcaagcattgcctgtgattgcccagcccagattcatctgtgccttggacatggtgatggtgatgggttgccatccaagtgaaagtcttttccttgaccaagggggacagtcagttttgcaaaaggactctaatacctgtttaatattgtcttcctaattgggataatttaattaacaagattgactagaagtgaaactgcaacactaacttccccgtgctgtggtgtgacctgagttggtgacacaggccacagaccccagagcttggcttttgaaacacaactcagggcttttgtgaaggttcccccgctgagatctttcctcctggttactgtgaagcctgttggtttgctgctgtcgtttttgaggagggcccatgggggtaggagcagttgaacctgggaacaaacctcacttgagctgtgcctagacaatgtgaattcctgtgttgctaacagaagtggcctgtaagctcctgtgctccggagggaagcatttcctggtaggctttgatttttctgtgtgttaaagaaattcaatctactcatgatgtgttatgcataaaacatttctggaacatggatttgtgttcaccttaaatgtgaaaataaatcctattttctatggaaaaaaaaaaaaaaaaaaaaaaa

SEQ ID NO: 476 - protein, 207 aa, Homo sapien
MLALRCGSRWLGLLSVPRSVPLRLPAARACSKGSGDPSSSSSSGNPLVYLDVDANGKPLGRVVLELKADVVPKTAENFRALCTGEKGFGYKGSTFHRVIPSFMCQAGDFTNHNGTGGKSIYGSRFPDENFTLKHVGPGVLSMANAGPNTNGSQFFICTIKTDWLDGKHVVFGHVKEGMDVVKKIESFGSKSGRTSKKIVITDCGQLS

SEQ ID NO: 477 - DNA, 1591 bp, Homo sapien; identical to SEQ ID NO: 475

SEQ ID NO: 478 - protein, 207 aa, Homo sapien; identical to SEQ ID NO: 476

SEQ ID NO: 479 - DNA, 1375 bp, Homo sapien
aaaagcaagccaggaggtgcttgcggccgcttctagtagtttccaggcgctgccgggcggctggcactaagcggtcctgaggctgtggctacggctgctccggagctggtggcgccgcgataggagagccgatggccaagtggggtgagggagacccacgctggatcgtggaggagcgggcggacgccaccaacgtcaacaactggcactggacggagagagatgcttcaaattggtccacggataagctgaaaacactgttcttggcagtgcaggttcaaaatgaagaaggcaagtgtgaggtgacggaagtgagtaagcttgatggagaggcatccattaacaatcgcaaagggaaacttatcttcttttatgaatggagcgtcaaactaaactggacaggtacttctaagtcaggagtacagtacaaaggacatgtggagatccccaatttgtctgatgaaaacagcgtggatgaagtggagattagtgtgagccttgccaaagatgagcctgacacaaatctcgtggccttaatgaaggaagaaggggtgaaacttctaagagaagcaatgggaatttacatcagcaccctcaaaacagagttcacccagggcatgatcttacctacaatgaatggagagtcagtagacccagtggggcagccagcactgaaaactgaggagcgcaaggctaagcctgctccttcaaaaacccaggccagacctgttggagtcaaaatccccacttgtaagatcactcttaaggaaaccttcctgacgtcaccagaggagctctatagagtgtttaccacccaagagctggtgcaggcctttacccatgctcctgcaacattagaagcagacagaggtggaaagttccacatggtagatggcaacgtctctggggaatttactgatctggtccctgagaaacatattgtgatgaagtggaggtttaaatcttggccagagggacactttgccaccatcaccttgaccttcatcgacaagaacggagagactgagctgtgcatggaaggtcgaggcatccctgctcctgaggaagagcggacacgacagggctggcagcggtactactttgagggcattaaacagacctttggctatggcgcacgcttattttagggccagcggcaggggactccagcctgctggacacttcagtccagctctctcctgactggggcttgcgactcacaggattgcatcgtcccagctgctaacttggggccggggcccctcccttccacatataccttgggtttgtgcatgttttctgctgggtgggttcagagggcaatttctcttttatgtgtacatatgctaaataaacataatttaaaaaacaaaaa

SEQ ID NO: 480 - protein, 338 aa, Homo sapien
MAKWGEGDPRWIVEERADATNVNNWHWTERDASNWSTDKLKTLFLAVQVQNEEGKCEVTEVSKLDGEASINNRKGKLIFFYEWSVKLNWTGTSKSGVQYKGHVEIPNLSDENSVDEVEISVSLAKDEPDTNLVALMKEEGVKLLREAMGIYISTLKTEFTQGMILPTMNGESVDPVGQPALKTEERKAKPAPSKTQARPVGVKIPTCKITLKETFLTSPEELYRVFTTQELVQAFTHAPATLEADRGGKFHMVDGNVSGEFTDLVPEKHIVMKWRFKSWPEGHFATITLTFIDKNGETELCMEGRGIPAPEEERTRQGWQRYYFEGIKQTFGYGARLF

SEQ ID NO: 481 - DNA, 2826 bp, Homo sapien
gtgtgcggacgcagttgcgtgaggggtttgtgctatcctcggtgctgtggtgcagagctagttcctctccagctcagccgcgtaggtttggacatatttgactcttttccccccaggttgaattgaccaaagcaatggtgatggagaagcctagtcccctgctggtcgggcgggaatttgtgagacagtattacacactgctgaaccaggccccagacatgctgcatagattttatggaaagaactcttcttatgtccatgggggattggattcaaatggaaagccagcagatgcagtctacggacagaaagaaatccacaggaaagtgatgtcacaaaacttcaccaactgccacaccaagattcgccatgttgatgctcatgccacgctaaatgatggtgtggtagtccaggtgatggggcttctctctaacaacaaccaggctttgaggagattcatgcaaacgtttgtccttgctcctgaggggtctgttgcaaataaattctatgttcacaatgatatcttcagataccaagatgaggtctttggtgggtttgtcactgagcctcaggaggagtctgaagaagaagtagaggaacctgaagaaagacagcaaacacctgaggtggtacctgatgattctggaactttctatgatcaggcagttgtcagtaatgacatggaagaacatttagaggagcctgttgctgaaccagagcctgatcctgaaccagaaccagaacaagaacctgtatctgaaatccaagaggaaaagcctgagccagtattagaagaaactgcccctgaggatgctcagaagagttcttctccagcacctgcagacatagctcagacagtacaggaagacttgaggacattttcttgggcatctgtgaccagtaagaatcttccacccagtggagctgttccagttactgggataccacctcatgttgttaaagtaccagcttcacagccccgtccagagtctaagcctgaatctcagattccaccacaaagacctcagcgggatcaaagagtgcgagaacaacgaataaatattcctccccaaaggggacccagaccaatccgtgaggctggtgagcaaggtgacattgaaccccgaagaatggtgagacaccctgacagtcaccaactcttcattggcaacctgcctcatgaagtggacaaatcagagcttaaagatttctttcaaagttatggaaacgtggtggagttgcgcattaacagtggtgggaaattacccaattttggttttgttgtgtttgatgattctgagcctgttcagaaagtccttagcaacaggcccatcatgttcagaggtgaggtccgtctgaatgtcgaagagaagaagactcgagctgccagggaaggcgaccgacgagataatcgccttcggggacctggaggccctcgaggtgggctgggtggtggaatgagaggccctccccgtggaggcatggtgcagaaaccaggatttggagtgggaagggggcttgcgccacggcagtgaatcttcatggatcttcatgcagccatacaaaccctggttccaacagaatggtgaattttcgacagcctttggtatcttggagtatgaccccagtctgttataaactgcttaagtttgtataattttactttttttgtgtgttaatggtgtgtgctccctctccctctcttccctttcctgacctttagtctttcacttccaattttgtggaatgatattttaggaataacggacttttaaagaagcaaaaaaaaaagactgaatttccttgcttactttgcatatacagactggattttttttttttttttacagccatttccccaaaggaatgtcttgcatattactgacatttggtatgtttcattcattggaatatttcttattttctacgtgtttgaaaagcctgtaagaaatacaggatttgataatattttgaaggcaggaaaaacccaaattgtttcttctttgagagtcatgactaccttctggtgtggagaaattgccattggaaaatttgacaattttgattctcactggtatgtttaaaaactgaataaaaggaatagaatttttttttgataaaggatcacaaaacaattctaaaacctaactgtttttaccattgaaatttaaattgtgataataggttttaaatgtctagaatgcaactgataggcttttcttgaactgttagtttttttgaagtagttttttcatgtttaatttgtatttgtaaaaaaacaaaaagcaaaaaaattcccaaaacccagataacaaccagagcaaaactgttgtgccttctatttatctttgatttcagtcttggcaattgtttaaaaaaaaaatctagatttgttttattaggttcagagtatgtggggaattatagaatccctctttcatcactttgtgtatgtcttttgttaacatatttgttatgccttattctaaaattgagtctcaaactggaatgcctttgaagacagatgcttctatagaggttctttgacctaaatagttcagcatttgtatttttattctggtatctaatcagattcctaatcatagcccgtaagaaggaatgttactttaatattggactttgctcatgtgctcgtgtccgcatttttttttttcttaaaatcatagccatatggtaaattttctattttgttatggttctcttttattgatgggcatgcagtgggtgttacttggaaatggccaatttttattaaaatatttctggaagaaaatccaaaaaaaaaaaaaaaaaaaaaaaaaaaaa

SEQ ID NO: 482 - protein, 466 aa, Homo sapien
MVMEKPSPLLVGREFVRQYYTLLNQAPDMLHRFYGKNSSYVHGGLDSNGKPADAVYGQKEIHRKVMSQNFTNCHTKIRHVDAHATLNDGVVVQVMGLLSNNNQALRRFMQTFVLAPEGSVANKFYVHNDIFRYQDEVFGGFVTEPQEESEEEVEEPEERQQTPEVVPDDSGTFYDQAVVSNDMEEHLEEPVAEPEPDPEPEPEQEPVSEIQEEKPEPVLEETAPEDAQKSSSPAPADIAQTVQEDLRTFSWASVTSKNLPPSGAVPVTGIPPHVVKVPASQPRPESKPESQIPPQRPQRDQRVREQRINIPPQRGPRPIREAGEQGDIEPRRMVRHPDSHQLFIGNLPHEVDKSELKDFFQSYGNVVELRINSGGKLPNFGFVVFDDSEPVQKVLSNRPIMFRGEVRLNVEEKKTRAAREGDRRDNRLRGPGGPRGGLGGGMRGPPRGGMVQKPGFGVGRGLAPRQ

SEQ ID NO: 483 - DNA, 2160 bp, Homo sapien
agccccctgcccctcgccgccccccgccgcctgcctgggccgggccgaggatgcggcgcagcgcctcggcggccaggcttgctcccctccggcacgcctgctaacttcccccgctacgtccccgttcgcccgccgggccgccccgtctccccgcggcctccgggtccgggtcctccaggacggccaggccgtgccgccgtgtgccctccgccgctcgcccgcgcgccgcgcgctccccgcctgcgcccagcgccccgcgcccgcgccccagtcctcgggcggtccatgctgcccctctgcctcgtggccgccctgctgctggccgccgggcccgggccgagcctgggcgacgaagccatccactgcccgccctgctccgaggagaagctggcgcgctgccgcccccccgtgggctgcgaggagctggtgcgagaggcgggctgcggctgttgcgccacttgcgccctgggcttggggatgccctgcggggtgtacaccccccgttgcggctcgggcctgcgctgctacccgccccgaggggtggagaagcccctgcacacactgatgcacgggcaaggcgtgtgcatggagctggcggagatcgaggccatccaggaaagcctgcagccctctgacaaggacgagggtgaccaccccaacaacagcttcagcccctgtagcgcccatgaccgcaggtgcctgcagaagcacttcgccaaaattcgagaccggagcaccagtgggggcaagatgaaggtcaatggggcgccccgggaggatgcccggcctgtgccccagggctcctgccagagcgagctgcaccgggcgctggagcggctggccgcttcacagagccgcacccacgaggacctctacttcatccccatccccaactgcgaccgcaacggcaacttccaccccaagcagtgtcacccagctctggatgggcagcgtggcaagtgctggtgtgtggaccggaagacgggggtgaagcttccggggggcctggagccaaagggggagctggactgccaccagctggctgacagctttcgagagtgaggcctgccagcaggccagggactcagcgtcccctgctactcctgtgctctggaggctgcagagctgacccagagtggagtctgagtctgagtcctgtctctgcctgcggcccagaagtttccctcaaatgcgcgtgtgcacgtgtgcgtgtgcgtgcgtgtgtgtgtgtttgtgagcatgggtgtgcccttggggtaagccagagcctggggtgttctctttggtgttacacagcccaagaggactgagactggcacttagcccaagaggtctgagccctggtgtgtttccagatcgatcctggattcactcactcactcattccttcactcatccagccacctaaaaacatttactgaccatgtactacgtgccagctctagttttcagccttgggaggttttattctgacttcctctgattttggcatgtggagacactcctataaggagagttcaagcctgtgggagtagaaaaatctcattcccagagtcagaggagaagagacatgtaccttgaccatcgtccttcctctcaagctagcccagagggtgggagcctaaggaagcgtggggtagcagatggagtaatggtcacgaggtccagacccactcccaaagctcagacttgccaggctccctttctcttcttccccaggtccttcctttaggtctggttgttgcaccatctgcttggttggctggcagctgagagccctgctgtgggagagcgaagggggtcaaaggaagacttgaagcacagagggctagggaggtggggtacatttctctgagcagtcagggtgggaagaaagaatgcaagagtggactgaatgtgcctaatggagaagacccacgtgctaggggatgaggggcttcctgggtcctgttcccctaccccatttgtggtcacagccatgaagtcaccgggatgaacctatccttccagtggctcgctccctgtagctctgcctccctctccatatctccttcccctacacctccctccccacacctccctactcccctgggcatcttctggcttgactggatggaaggagacttaggaacctaccagttggccatgatgtcttttctt

SEQ ID NO: 484 - protein, 258 aa, Homo sapien
MLPLCLVAALLLAAGPGPSLGDEAIHCPPCSEEKLARCRPPVGCEELVREAGCGCCATCALGLGMPCGVYTPRCGSGLRCYPPRGVEKPLHTLMHGQGVCMELAEIEAIQESLQPSDKDEGDHPNNSFSPCSAHDRRCLQKHFAKIRDRSTSGGKMKVNGAPREDARPVPQGSCQSELHRALERLAASQSRTHEDLYFIPIPNCDRNGNFHPKQCHPALDGQRGKCWCVDRKTGVKLPGGLEPKGELDCHQLADSFRE

SEQ ID NO: 485 - DNA, 1238 bp, Homo sapien
cggcggagctggtcccgttgtgctgcggcgccgcgcggcctgcagtcccgggcccgcgccccgcgccgcccgcccgcccgccatggagcccggccccgacggccccgccgcctccggccccgccgccatccgcgagggctggttccgcgagacctgcagcctgtggcccggccaggccctgtcgctgcaggtggagcagctgctccaccaccggcgctcgcgctaccaggacatcctcgtcttccgcagtaagacctatggcaacgtgctggtgttggacggtgtcatccagtgcacggagagagacgagttctcctaccaggagatgatcgccaacctgcctctctgcagccaccccaacccgcgaaaggtgctgatcatcgggggcggagatggaggtgtcctgcgggaggtggtgaagcacccctccgtggagtccgtggtccagtgtgagatcgacgaggatgtcatccaagtctccaagaagttcctgccaggcatggccattggctactctagctcgaaggtgaccctacatgtgggtgacggttttgagttcatgaaacagaatcaggatgccttcgacgtgatcatcactgactcctcagaccccatgggccccgccgaaagtctcttcaaggagtcctattaccagctcatgaagacagccctcaaggaagatggtgtcctctgctgccagggcgagtgcgagtggctgcacctggacctcatcaaggagatgcggcagttctgccagtccctgttccccgtggtggcctatgcctactgcaccatccccacctaccccagcggccagatcggcttcatgctgtgcagcaagaacccgagcacgaacttccaggagccggtgcagccgctgacacagcagcaggtggcgcagatgcagctgaagtactacaactccgacgtgcaccgcgccgcctttgtgctgcccgagtttgcccgcaaggccctgaatgatgtgagctgagcccaggcgccaccactgatgccacccaggacctcggaccttggagcctgcggggtgcctcggcccctccagccccgggccggacctcctgctggctctcgcccaccaaccaagtgttacaagccccagaatgctgcccggcctgccctgctgggcggactgtctgtgtgtctgtctctctggcgttccacctccaagcctataccagctgtgtacagcgccatctctctgccttctgttgcccccg

SEQ ID NO: 486 - protein, 302 aa, Homo sapien
MEPGPDGPAASGPAAIREGWFRETCSLWPGQALSLQVEQLLHHRRSRYQDILVFRSKTYGNVLVLDGVIQCTERDEFSYQEMIANLPLCSHPNPRKVLIIGGGDGGVLREVVKHPSVESVVQCEIDEDVIQVSKKFLPGMAIGYSSSKVTLHVGDGFEFMKQNQDAFDVIITDSSDPMGPAESLFKESYYQLMKTALKEDGVLCCQGECEWLHLDLIKEMRQFCQSLFPVVAYAYCTIPTYPSGQIGFMLCSKNPSTNFQEPVQPLTQQQVAQMQLKYYNSDVHRAAFVLPEFARKALNDVS

SEQ ID NO: 487 - DNA, 2120 bp, Homo sapien
cgcattgtggtccgcttctctgcactatgtcgggtggcctcctgaaggcgctgcgcagcgactcctacgtggagctgagccagtaccgggaccagcacttccggggtgacaatgaagaacaagaaaaattactgaagaaaagctgtacgttatatgttggaaatctttctttttacacaactgaagaacaaatctatgaactcttcagcaaaagtggtgacataaagaaaatcattatgggtctggataaaatgaagaaaacagcatgtggattctgttttgtggaatattactcacgcgcagatgcggaaaacgccatgcggtacataaatgggacgcgtctggatgaccgaatcattcgcacagactgggacgcaggctttaaggagggcaggcaatacggccgtgggcgatctgggggccaggttcgggatgagtatcggcaggactacgatgctgggagaggaggctatggaaaactggcacagaaccagtgagtggtgagagctctgtcagtgacaaacactcctttggcctgttgaatttgctgaagaacatcacctaaagtctgcacacgagcccatttttaccaagatttgatcagtgtctttactgagctggaagcctctgaaagttattaaaggacagaatccaaaagaatgcctttaattcttgtctgagaatcttggccatgtgtcagattatcagaacaattttgttaccaggtcagaaattgtgttctttgacaacagattggatctgtaatgttgattagtctttagccataaccactacacttttagaaagacagaaaaatgtaagaatttgtttttaccataatgagtcttaagtaggttcatgatctacattggggcctgggattatttttttaattttaagtttgcatgagatagcctaataaatggaggtggggccaggcatggtggctcacacgtgtaatcccaacactttgggaggctgaggaggaaggatagcttgaggccaggagtttgagactagactgggcaacatagcaagaccccgtctctacaaagcacaacgaaaaacaacaaatggagttgtgctatgttgtattgctttgcacaaaattaggaacaggtgtttgacaattgaatttgttttctgtgaattctaacctctaaaggcatgcttagaggtcaaggaccttcctgtgtagttggtgcaaaagcaatctccacaggacagcactgcttccatgcttcatacatcaggaaatgaggccagaacttgagtatttactaacacgtttttcaaaagatgtcagtgttatacctaaagctaaaaaaaagcaagggtttgtcatagagggaacctctaaataatttcaggggtaggggagatgttgtcaataggaaatgggataaaatatcaagagacaatgaaaacactgccttgacatgaggaccagcaagtttattcttttcattttcagtgatgttgggaatggactgggttttaaaagggagcttgaagagggaatgtttgacagtcacagaaggttcctgcagcagatgcctcttttagccatttctcatttttttcctcaaattttacctactgaggctcaagccttcacagtgagctgatggtctctacagggaggggagtctagggaatttatttggtatttgtaaggcaagaggtgatttctctctaatatatctgagttattgctcatttaaaactgttaagtccagtataattttccctgatatgaaaaaatgtgcatttttttcacttagcaacaaagtaccttctaatttccaatagtccgtgaaagttggggctgaagtacctaagtgtgaatgtctctcccgttaaactgagtgtagaaatctgaatttttaaaagagctgtaactagttgtaagtgcttaggaagaaactttgcaaacatttaatgaggatacactgttcatttttaaaattccttcacactgtaatttaatgtgttttatattcttttgtagtaaaacaacataactcagatttctacaggagacagtggttttatttggattgtcttctgtaataggtttcaataaagctggatgaacttaaaaaaaaaaaaaaaaaaaa

SEQ ID NO: 488 - protein, 156 aa, Homo sapien
MSGGLLKALRSDSYVELSQYRDQHFRGDNEEQEKLLKKSCTLYVGNLSFYTTEEQIYELFSKSGDIKKIIMGLDKMKKTACGFCFVEYYSRADAENAMRYINGTRLDDRIIRTDWDAGFKEGRQYGRGRSGGQVRDEYRQDYDAGRGGYGKLAQNQ

SEQ ID NO: 489 - DNA, 1746 bp, Homo sapien
gagcctgacttcagcgctcccactctcggccgacacccctcatggccaaccgttacaccatggatctgactgccatctacgagagcctcctgtcgctgagccctgacgtgcccgtgccatccgaccatggagggactgagtccagcccaggctggggctcctcgggaccctggagcctgagcccctccgactccagcccgtctggggtcacctcccgcctgcctggccgctccaccagcctagtggagggccgcagctgtggctgggtgcccccaccccctggcttcgcaccgctggctccccgcctgggccctgagctgtcaccctcacccacttcgcccactgcaacctccaccaccccctcgcgctacaagactgagctatgtcggaccttctcagagagtgggcgctgccgctacggggccaagtgccagtttgcccatggcctgggcgagctgcgccaggccaatcgccaccccaaatacaagacggaactctgtcacaagttctacctccagggccgctgcccctacggctctcgctgccacttcatccacaaccctagcgaagacctggcggccccgggccaccctcctgtgcttcgccagagcatcagcttctccggcctgccctctggccgccggacctcaccaccaccaccaggcctggccggcccttccctgtcctccagctccttctcgccctccagctccccaccaccacctggggaccttccactgtcaccctctgccttctctgctgcccctggcacccccctggctcgaagagaccccaccccagtctgttgcccctcctgccgaagggccactcctatcagcgtctgggggcccttgggtggcctggttcggaccccctctgtacagtccctgggatccgaccctgatgaatatgccagcagcggcagcagcctggggggctctgactctcccgtcttcgaggcgggagtttttgcaccaccccagcccgtggcagccccccggcgactccccatcttcaatcgcatctctgtttctgagtgacaaagtgactgcccggtcagatcagctggatctcagcggggagccacgtctcttgcactgtggtctctgcatggaccccagggctgtggggacttgggggacagtaatcaagtaatccccttttccagaatgcattaacccactcccctgacctcacgctggggcaggtccccaagtgtgcaagctcagtattcatgatggtgggggatggagtgtcttccgaggttcttgggggaaaaaaaattgtagcatatttaagggaggcaatgaaccctctcccccacctcttccctgcccaaatctgtctcctagaatcttatgtgctgtgaataataggccttcactgcccctccagtttttatagacctgaggttccagtgtctcctggtaactggaacctctcctgagggggaatcctggtgctcaaattaccctccaaaagcaagtagccaaagccgttgccaaaccccacccataaatcaatgggccctttatttatgacgactttatttattctaatatgattttatagtatttatatatattgggtcgtctgcttcccttgtatttttcttcctttttttgtaatattgaaaacgacgatataattattataagtagactataatatatttagtaatatatattattaccttaaaagtctatttttgtgttttgggcatttttaaataaacaatctgagtgt

SEQ ID NO: 490 - protein, 326 aa, Homo sapien
MDLTAIYESLLSLSPDVPVPSDHGGTESSPGWGSSGPWSLSPSDSSPSGVTSRLPGRSTSLVEGRSCGWVPPPPGFAPLAPRLGPELSPSPTSPTATSTTPSRYKTELCRTFSESGRCRYGAKCQFAHGLGELRQANRHPKYKTELCHKFYLQGRCPYGSRCHFIHNPSEDLAAPGHPPVLRQSISFSGLPSGRRTSPPPPGLAGPSLSSSSFSPSSSPPPPGDLPLSPSAFSAAPGTPLARRDPTPVCCPSCRRATPISVWGPLGGLVRTPSVQSLGSDPDEYASSGSSLGGSDSPVFEAGVFAPPQPVAAPRRLPIFNRISVSE

SEQ ID NO: 491 - DNA, 949 bp, Homo sapien
gcgctccgggcctggaatccctacgcgtccctttgggtttagcacgatgagctcaatcggcactgggtatgacctgtcagcctctacattctctcctgacggaagagtttttcaagttgaatatgctatgaaggctgtggaaaatagtagtacagctattggaatcagatgcaaagatggtgttgtctttggggtagaaaaattagtcctttctaaactttatgaagaaggttccaacaaaagactttttaatgttgatcggcatgttggaatggcagtagcaggtttgttggcagatgctcgttctttagcagacatagcaagagaagaagcttccaacttcagatctaactttggctacaacattccactaaaacatcttgcagacagagtggccatgtatgtgcatgcatatacactctacagtgctgttagaccttttggctgcagtttcatgttagggtcttacagtgtgaatgacggtgcgcaactctacatgattgacccatcaggtgtttcatacggttattggggctgtgccatcggcaaagccaggcaagctgcaaagacggaaatagagaagcttcagatgaaagaaatgacctgccgtgatatcgttaaagaagttgcaaaaataatttacatagtacatgacgaagttaaggataaagcttttgaactagaactcagctgggttggtgaattaactaatggaagacatgaaattgttccaaaagatataagagaagaagcagagaaatatgctaaggaatctctgaaggaagaagatgaatcagatgatgataatatgtaacatttactccagcatctattgtattttaaatttctactccagtccaatgtaactatttagccctggattatacatactgtccaattttcattaaatttttgtcttataactataaaaaaaaaaaaaaaaaaaaaa

SEQ ID NO: 492 - protein, 255 aa, Homo sapien
MSSIGTGYDLSASTFSPDGRVFQVEYAMKAVENSSTAIGIRCKDGVVFGVEKLVLSKLYEEGSNKRLFNVDRHVGMAVAGLLADARSLADIAREEASNFRSNFGYNIPLKHLADRVAMYVHAYTLYSAVRPFGCSFMLGSYSVNDGAQLYMIDPSGVSYGYWGCAIGKARQAAKTEIEKLQMKEMTCRDIVKEVAKIIYIVHDEVKDKAFELELSWVGELTNGRHEIVPKDIREEAEKYAKESLKEEDESDDDNM

SEQ ID NO: 493 - DNA, 3323 bp, Homo sapien
gatcacgaaccagtcaaaatcgtggtttatttctgtaacgtgaagacttctgctcttttttctttgtttgtttttttcgtaaacatctgggtgtatatcaaacggcaagatgtccagtaatgtcccggcggatatgataaatttgcgcctcattttggtaagcggaaaaacaaaagagttcctgttttctcctaacgattctgcttctgacattgcaaagcatgtatatgacaattggccaatggactgggaagaagagcaggtcagcagtccaaatattctacgacttatttatcaaggacgatttctacatggaaatgtcacattaggagcattaaaacttccttttggcaaaacaacagtgatgcatttggtggccagagagacattaccagagccaaactctcaaggtcagaggaatcgtgagaagactggagagagtaattgttgtgtaatcctgtaaacactgtctgcctagtgtgatgtgatatagtctttgtctttcatgctgctgggacagaaaagacccgacattgcttcagaaaccgttcagaacagtctgcctgtaaacacatggaactgaattaccacatgaacactgtcatcttttctcatgaaagtaaaaagaaccaagaacatttttcactctgattttttatttcttgtattttttgttgagctgttttaacacatattggtttttgaatgcagtcaatctccaggggaaaagttaacaagttatctttcgtagcagaaaccattttgctgccacaaaattttcatcatcagaactaataaatcaagtgttccaaatacaatttgcactaaaaagattggcattattttcctcatcagcagaatttataacagtgtgtggtatctagaaatacttatatatacaattccacactggaagacactcagcaattaatgaagttaattactgggccaacttgagaggaaaaaatggaaaagaaactaaaatgttgggtgaattctaccaaagtcagccgtggtggctgcactggcacagaatactaaactgagtgtgactattttcactgcaacaaatgaaaaaacaaaatgtgcctgtttaaagcactcagtagagggctgatgaaactaattttttttcctttaagacatgcactcttgagtcctacagtaactgagtgtttgtttagacagcacaagaaggggtgagagtgcgtctcctagccttaatgtgggagggtagtttcagtcactcatcggctttcattattgtgcagaaatattagaaaacctcattgatcaattttatgtatttgaatatcagcaaattgaaattttccataattatcattaatttgtaaccacatccagtgtcatgcttactccttagagttcagatgaattcttaaaattaaaaaaaaactccatagtactaattttgtttctttatatagtttgcgtttgatattagtgcttgcaattgtattaaagtcaaaagctgatttttatggcatacacaagaatgccactttttcttttatttcataccaataatttaaagattgatatgctaaaaacaatttgcacagcactaaagcatgagctactttcatctaaacctgtaaaaatatgaaagatttttatattttttcactgggaagaaattcttcctggatgaaattacaaatatgtgtagaatatatttaataaaagacttataaaatacctaactacaggacttaaaatatagattggcgcgtagtatatagaacaatattccatataaataagtttagcctttataaaaatgaagttgcaggctgacattacattctgtacttactaagtgtcaacagcccttacaaacattaaatgtaaatggtttcaaatggtcagcgttgtttaaatgtaatcatgttattttattcattgttaatgctttgatgaaaaggctttatatgcagtagatctacgaaaatattgttcatactgatcagaattaaatttgtatagagcagagttttaaaatgaatgtaaatagcactaaacgttttctttctgcaacctgtacttacagattcttcctgtaaactaaataaaaaaaaaatgatagtgcattttggtggtaattttaaaggtcttgattaggtcaataattgtttaagcaccgtctcattcatgttttctactttcatttcttaagcttttaaaattcatttaattaatattctgttgttgttttggggagtattcccaatgtatctttgatatttaacctggttaatttgtggacagtcacaacaatggatagaattatgtagtctccgttatcactaaaatgttatcttcaagagatgttaaatatttatatgctttgttgactagctgaaatgtgaattctgttagtgttgactaaagaatctggtagttgcttaattgggcaattaaacaatttatggctctattttgtaaaacaaactactggtaattatttttaatacctattttcattctgattactctttttttaagttaaagactatcagttaattaagattgagtttttatgatggttaaaaataattctctattggtttttcaatatatttttctgtgtgttctcagattatatatttccctcaatttagagtttgctaagtgaaataaactggttcactagtagagaaagaattacgtcgcttaatacctaatatcatagttgtacaatatgaaaaaaaagaataaaaagtagcagtaaaattatatactgaaaacaccaaaaatttagatgccttaatagtatatacgtgaaatactcagctgtccctttaaaaataattccttggactgcctggtggttaaaatacgattcctcatatccaaggctacttttgaagatccctctgccaaaaatatagctcacttatctaaaggtgagagctgcatagatccagtaatgtacataaagcctgaatgatgagcctatgtccctgcctaacgctggtgtctcactcatctcttttacctaaattgtcctgaactttgttaagtgttctggacaaggccaagcttttctttattaaaacctcagcatgtctccctgatctgaactatttgctttctcttcaagataagttgtattttaccatggaaaaatacagtatctaacattaccattcacgttaaatgaagtttcctcataacatttatctttagttttatgaagtcatcgtgaccaatgttacagtaatttctgttagctgattgtggtaaacaatgtttaatgtgaaaagaaattaaaactttcttcatctgttgtaaaaaaaaaa

SEQ ID NO: 494 - protein, 117 aa, Homo sapien
MSSNVPADMINLRLILVSGKTKEFLFSPNDSASDIAKHVYDNWPMDWEEEQVSSPNILRLIYQGRFLHGNVTLGALKLPFGKTTVMHLVARETLPEPNSQGQRNREKTGESNCCVIL

SEQ ID NO: 495 - DNA, 3323 bp, Homo sapien; identical to SEQ ID NO: 493

SEQ ID NO: 496 - protein, 347 aa, Homo sapien
MSVTSSIEKPTTTASAIQQQYQHQQQQQQQKPQQQQQQDKSSTIAIAAAAGQQQKRKSLSSKRSYSLSSSSASSSGSFGAIRSATSPLVTTAEREKDKEKSSSSASNTHHQHHQLHQHQHHHQQQQSQQQQQSFLPYSYCTDTIAAVHHQRQSYALVQKPPSLRYQGKPHHQLSNFSPTMTSSEPSSPLAADGCGSGILSPSEVATHCCANVKANITTPLATTTQKMHRTIPSDKINLRLILVSGKTKEFIFSPSDSAGDIAQTVFDNWPEDWTHETVSKAEILRLIYQGRFLHCNVTLGALGLPLGKTTVMHLVPRDNLPEPNSQDQRQNSKGGSGRCCSTNCSIL

SEQ ID NO: 497 - DNA, 3061 bp, Homo sapien
cggcacgaggcgactttggtggaggtagttctttggcagcgggcatggcgggtaccgtggtgctggacgatgtggagctgcgggaggctcagagagattacctggacttcctggacgacgaggaagaccagggaatttatcagagcaaagttcgggagctgatcagtgacaaccaataccggctgattgtcaatgtgaatgacctgcgcaggaaaaacgagaagagggctaaccggcttctgaacaatgcctttgaggagctggttgccttccagcgggccttaaaggattttgtggcctccattgatgctacctatgccaagcagtatgaggagttctacgtaggactggaaggcagctttggctccaagcacgtctccccgcggactcttacctcctgcttcctcagctgtgtggtctgtgtggagggcattgtcactaaatgttctctagttcgtcccaaagtcgtccgcagtgtccactactgtcctgctactaagaagaccatagagcgacgttattctgatctcaccaccctggtggcctttccctccagctctgtctatcctaccaaggatgaggagaacaatccccttgagacagaatatggcctttctgtctacaaggatcaccagaccatcaccatccaggagatgccggagaaggccccagccggccagctcccccgctctgtggacgtcattctggatgatgacttggtggataaagcgaagcctggtgaccgggttcaggtggtgggaacctaccgttgccttcctggaaagaagggaggctacacctctgggaccttcaggactgtcctgattgcctgtaatgttaagcagatgagcaaggatgctcagccctctttctctgctgaggatatagccaagatcaagaagttcagtaaaacccgatccaaggatatctttgaccagctggccaagtcattggccccaagtatccatgggcatgactatgtcaagaaagcaatcctctgcttgctcttgggaggggtggaacgagacctagaaaatggcagccacatccgtggggacatcaatattcttctaataggagacccatccgttgccaagtctcagcttctgcggtatgtgctttgcactgcaccccgagctatccccaccactggccggggctcctctggagtgggtctgacggctgctgtcaccacagaccaggaaacaggagagcgccgtctggaagcaggggccatggtcctggctgaccgaggcgtggtttgcattgatgaatttgacaaaatgtctgacatggatcgcacagccatccatgaagtgatggagcagggtcgagtgaccattgccaaggctggcatccatgctcggctgaatgcccgctgcagtgttttggcagctgccaaccctgtctacggcaggtatgaccagtataagactccaatggagaacattgggctacaggactcactgctgtcacgatttgacttgctcttcatcatgctggatcagatggatcctgagcaggatcgggagatctcagaccatgtccttcggatgcaccgttacagagcacctggggagcaggatggcgatgctatgcccttgggtagtgctgtggatatcctggccacagatgatcccaactttagccaggaagatcagcaggacacccagatttatgagaagcatgacaaccttctacatgggaccaagaagaaaaaggagaagatggtgagtgcagcattcatgaagaagtacatccatgtggccaaaatcatcaagcctgtcctgacacaggagtcggccacctacattgcagaagagtattcacgcctgcgcagccaggatagcatgagctcagacaccgccaggacatctccagttacagcccgaacactggaaactctgattcgactggccacagcccatgcgaaggcccgcatgagcaagactgtggacctgcaggatgcagaggaagctgtggagttggtccagtatgcttactttaagaaggttctggagaaggagaagaaacgtaagaagcgaagtgaggatgaatcagagacagaagatgaagaggagaaaagccaagaggaccaggagcagaagaggaagagaaggaagactcgccagccagatgccaaagatggggattcatacgacccctatgacttcagtgacacagaggaggaaatgcctcaagtacacactccaaagacggcagactcacaggagaccaaggaatcccagaaagtggagttgagtgaatccaggttgaaggcattcaaggtggccctcttggatgtgttccgggaagctcatgcgcagtcaatcggcatgaatcgcctcacagaatccatcaaccgggacagcgaagagcccttctcttcagttgagatccaggctgctctgagcaagatgcaggatgacaatcaggtcatggtgtctgagggcatcatcttcctcatctgaggaggcctcgtctctgaacttgggttgtgccgagagagtttgttctgtgtttcccaccctctccctgacccaagtctttgcctctactcccttaacagtgttgaattcaactgaaggcgaggaatgttggtgatgaagctgagttcaggactcggtggaccctttgggaatgggtcatgaaagctgccatggggtgaggaaagaggagacagtgggagaggacaatgactattgcatcttcattgcaaaagcactggctcatccgccctacttcccatcccacacaaacccaattgtaaataacatatgacttctgagtacttttgggggcacaactgttttctgtttgctgtttttttgttttgttttttttctccagagcactttggtctagactaggctttgggtggttccaattggtggagagaagctctgaggcacgtcatgcaggtcaagaaagctttctttgcagtagcaccagttaaggtgaatatgtattgtatcacaaaacaaacccaatatccagatgaatatccgagatgttgaataaacttagccatttcgtacaaaaaaaggggggcccggtaaac

SEQ ID NO: 498 - protein, 808 aa, Homo sapien
MAGTVVLDDVELREAQRDYLDFLDDEEDQGIYQSKVRELISDNQYRLIVNVNDLRRKNEKRANRLLNNAFEELVAFQRALKDFVASIDATYAKQYEEFYVGLEGSFGSKHVSPRTLTSCFLSCVVCVEGIVTKCSLVRPKVVRSVHYCPATKKTIERRYSDLTTLVAFPSSSVYPTKDEENNPLETEYGLSVYKDHQTITIQEMPEKAPAGQLPRSVDVILDDDLVDKAKPGDRVQVVGTYRCLPGKKGGYTSGTFRTVLIACNVKQMSKDAQPSFSAEDIAKIKKFSKTRSKDIFDQLAKSLAPSIHGHDYVKKAILCLLLGGVERDLENGSHIRGDINILLIGDPSVAKSQLLRYVLCTAPRAIPTTGRGSSGVGLTAAVTTDQETGERRLEAGAMVLADRGVVCIDEFDKMSDMDRTAIHEVMEQGRVTIAKAGIHARLNARCSVLAAANPVYGRYDQYKTPMENIGLQDSLLSRFDLLFIMLDQMDPEQDREISDHVLRMHRYRAPGEQDGDAMPLGSAVDILATDDPNFSQEDQQDTQIYEKHDNLLHGTKKKKEKMVSAAFMKKYIHVAKIIKPVLTQESATYIAEEYSRLRSQDSMSSDTARTSPVTARTLETLIRLATAHAKARMSKTVDLQDAEEAVELVQYAYFKKVLEKEKKRKKRSEDESETEDEEEKSQEDQEQKRKRRKTRQPDAKDGDSYDPYDFSDTEEEMPQVHTPKTADSQETKESQKVELSESRLKAFKVALLDVFREAHAQSIGMNRLTESINRDSEEPFSSVEIQAALSKMQDDNQVMVSEGIIFLI

SEQ ID NO: 499 - DNA, 2159 bp, Homo sapien
tctttccgtcccgggcagccagcgccagtcggagccagcgcgagcgccgccgccatcactgccgctgccaagtcctccacccgctgcccccgccatgtctgctaccgctgccacggccccccctgctgccccggctggggagggtggtccccctgcaccccctccaaacctcaccagtaacaggagactgcagcagacccaggcccaggtggatgaggtggtggacatcatgagggtgaacgtggacaaggtcctggagcgagaccagaagctgtcggagctggacgaccgtgcagatgcactccaggcgggggcctcccagtttgaaacaagcgcagccaagctcaagcgcaaatactggtggaaaaacctcaagatgatgatcatcttgggagtgatttgcgccatcatcctcatcatcatcatagtttacttcagctcttaaatccccgaggagtctgccctgcctagagaagggcctctcccccaaccctcagccgttcctccacctctcagccatatctttcagccccccctcccctggatccgtgtgtgtgtgtgtccgtgtgtgtgtccccctgtaaatagccagctgttatttatacatatataatattatatatatttggtctgtttgtagttttattactagatgatttttccggttgtccttaacaccccttcctgaggttcccttcacccctctctcttgccttccttccctttccctttcttcctgactagccccaagtcccttcatttgcatctgctatgcaatagtccctctcctttccttcttcttccctcagatttagctgatccttcctcccaccctggccttcctttcctctttcctcctcactctccccgtcatgctccctctgccccgccctcaaaaaaaaaaaaaaaaaaaaaaaaaaaaaaaaccaccagcacctgtccaggcttccttaggtacatcttctttgtatccattgggaggctctgagactggccccacttggtcctaaaaatcccaaggtctttgggagcgtccagcatgttaattagcgtatcattacatactgctatccctttccatttctttttgttccatcactcttctctcaacctgtgtttctttttttactgaggagttagtccccattagttcttgtatcacattttcatttgcacgacattactcgcaggtggtggggagcctgggcttttggggaaccaggctgctctggtccccagcattgcctcctcctagcccctctagtccagtttgcctcccttaccctcattttccaaacctcttgtaccctcctctccctcccccagtggtatgtaagtgtcttgaagttcagtatgttatgatggaccaataattctgcccttcgggtttctccctacattcctgctccccagttttcatgtggggtactcaactgacattcccatggggtttccctcccatctgcctgatccacctcctcctcccaccacaagatcaattgttggccacaattgatctcttgtagaggggtggctaccagtgtgtgtgtgggggtcatcactgccttggggaggagtggggcagggcagagaatccccccaattcctgcctgaaatctctggcctcacccctgctgggggttggactgaaaaccctcctccccaatttggggggtgttgccccatcactgcccagctcctctgactgccccccctgaatttagggtgggggtactagtcactgccaatgtgtgtatgggacttgctggaaaacggggatgcttgcccctctccaggactattgagcccagagagagctgtcctctcattgggtgaactgattgaggaagggtctattgtctttttaaatggcacaattttaagggtttgagggtacagtcccttaacctgccacgggagggggcccccaaactttcttcccccccacacttctggttttctgtgtggagggggagcagggatatctaagctgtggtgtgaaagggtaggagagatgctggaggtgggggtgctgtgttctagaccccccatattatcccagtgtcccctgcccccctcttcccccaccccatgcccccaattctgtggcgcatccagattgtgaaaatgtacaataaatgtgtaatgagtaaccaggt

SEQ ID NO: 500 - protein, 116 aa, Homo sapien
MSATAATAPPAAPAGEGGPPAPPPNLTSNRRLQQTQAQVDEVVDIMRVNVDKVLERDQKLSELDDRADALQAGASQFETSAAKLKRKYWWKNLKMMIILGVICAIILIIIIVYFSS

SEQ ID NO: 501 - DNA, 2159 bp, Homo sapien; identical to SEQ ID NO: 499

SEQ ID NO: 502 - protein, 116 aa, Homo sapien; identical to SEQ ID NO: 500

SEQ ID NO: 503 - DNA, 3653 bp, Homo sapien
attgcaacacatgcagctgcctggagagagggagccggtgtcctacgtcagagccgccgccgccgcgagccgccgccggggaggagcagccgctgccgcccaggactgggcccttagggaggaggaggcgagaagatggcggacgaccccagtgctgccgacaggaacgtggagatctggaagatcaagaagctcattaagagcttggaggcggcccgcggcaatggcaccagcatgatatcattgatcattcctcccaaagaccagatttcacgagtggcaaaaatgttagcggatgagtttggaactgcatctaacattaagtcacgagtaaaccgcctttcagtcctgggagccattacatctgtacaacaaagactcaaactttataacaaagtacctccaaatggtctggttgtatactgtggaacaattgtaacagaagaaggaaaggaaaagaaagtcaacattgactttgaacctttcaaaccaattaatacgtcattgtatttgtgtgacaacaaattccatacagaggctcttacagcactactttcagatgatagcaagtttggattcattgtaatagatggtagtggtgcactttttggcacactccaaggaaacacaagagaagtcctgcacaaattcactgtggatctcccaaagaaacacggtagaggaggtcagtcagccttgcgttttgcccgtttaagaatggaaaagcgacataactatgttcggaaagtagcagagactgctgtgcagctgtttatttctggggacaaagtgaatgtggctggtctagttttagctggatccgctgactttaaaactgaactaagtcaatctgatatgtttgatcagaggttacaatcaaaagttttaaaattagttgatatatcctatggtggtgaaaatggattcaaccaagctattgagttatctactgaagtcctctccaacgtgaaattcattcaagagaagaaattaataggacgatactttgatgaaatcagccaggacacgggcaagtactgttttggcgttgaagatacactaaaggctttggaaatgggagctgtagaaattctaatagtctatgaaaatctggatataatgagatatgttcttcattgccaaggcacagaagaggagaaaattctctatctaactccagagcaagaaaaggataaatctcatttcacagacaaagagaccggacaggaacatgagcttatcgagagcatgcccctgttggaatggtttgctaacaactataaaaaatttggagctacgttggaaattgtcacagataaatcacaagaagggtctcagtttgtgaaaggatttggtggaattggaggtatcttgcggtaccgagtagatttccagggaatggaataccaaggaggagacgatgaattttttgaccttgatgactactaggtagtcgacatgggtccggcaaaacgtgcctcaccctccagcatccaacccaaggagcatacccatggtggaatccaaacagatccctgccttacaattggaacatttccagaacttaatccatgagcattggatattgaaaagaaaaccgaaacaaaaccagacccagccctacactttggtttgtcatggtgtcagcgcagcagcctacaactaagttcctaaacgccactttggactaatttaaaaaagaatcccagtttttacttttactggatggtgaaattggttgctcttgtattttatgaaaaaaaatgatttttttaaccttcatacatagaagcaaaaatactttaactgctgtaaaccttcaaaagttaatagaagtgagatcatactggtttgtttcttattttgattggagaaaaattaaattgctgcatttcgcagtgacccatttacatggcattctcagcttagactgcgtaagaagaaatatatgtggtgaaatgttggaaccatttctctcttggtctctgtttaatgttgaaagggtgagctaataggaggcactttcaacttcactccctcacgctaccccgtccccctccagactggcagtttcaaggatgcaaattgcattgcaaaatcaaactgactcatgaagcatttgggccagtgcactgtttacttccatctgtttgcagacacatttgtgcccggcgtttgggagccctttgtatcaatgttctgacaagggtccctataaccttaacctactcgaaaccggtttgggatggatatgatggggcttctgtgctattgctgggattgggagaaataaaacatgcaatttaagtggaagcgaagaaatttaaagaggattttattttgcttgggtcaatccttgttaaaagggaggtggatgtgtttccttgtgttggatggcatgagattatgtgaatgttttgatttattaaaatgaactgcaaggtttttcacaggaacgacagacatgtatgactgcatgtaattataaactcctgacctcctggtggggttggagcatctgtttcaaatgtgggacttacaagcacttctcacatgagaaattaggggcgggtgggaagggatgggacacagcttctggcaccatggatttaagaccatgttggatccaaaagttggcctgaaaccctgaagctgatgcttcacagctgggctgtaagtcagacttgaacccagctgatatgcaaggtcatggcgtgccagggtggtgacagttgaacaaagtgtatagtacgtgcccagtggtagcgatggaaaaaagtataccaaatggactttgaaggaccaaaggttttaaaagtcaattggtatcacctccacactgactagggtagtggggtgcatttggttttcaaattgggtacttttaacactttagtgcctgactgctgttctttactgacttgattcagtcactcgtagctttattggtctgaaccagctccttgttcccaggttacagacctgcctatcgttccaataatcctgtttcacttgaatgaagggagtatgtcttaaatgtaaagtttctggttctcacactgtactctgaggtccaaatactgtctgtcaatgtgtaacctgatgtctcaaccccctgtgagaagagtccattatttggtgttcaccaacgtgggagacttcaccggaacaggcttttttgctttgggctctgctatttgtttgcagaacacccaagagcgagcaaacacgctctcttcacagcagtaccttagggttttgccattgtaaatgggtctgatgtgatatgacaagaccagagaaattggatgtaaatttacatttttgaatatgcttgttgtttcacatgatacatttagggtatgcagctccttttgtagtttttatttttactatttaagtttggaaatgatgccaaatttttgtatttctttaatcaatgtgttctcttcggtgatatatattgcattatatattgatgtgtgtatcaatatatattgatatgtattacacttacacatacaaacacatataagagggggtgaaaaccgtagcctttgcattctctatagcctctgcagagagatactaagcagcaaaatcttggtgttgtgatgtacagaaatggagaagagtattaaaccatatttaag

SEQ ID NO: 504 - protein, 437 aa, Homo sapien
MADDPSAADRNVEIWKIKKLIKSLEAARGNGTSMISLIIPPKDQISRVAKMLADEFGTASNIKSRVNRLSVLGAITSVQQRLKLYNKVPPNGLVVYCGTIVTEEGKEKKVNIDFEPFKPINTSLYLCDNKFHTEALTALLSDDSKFGFIVIDGSGALFGTLQGNTREVLHKFTVDLPKKHGRGGQSALRFARLRMEKRHNYVRKVAETAVQLFISGDKVNVAGLVLAGSADFKTELSQSDMFDQRLQSKVLKLVDISYGGENGFNQAIELSTEVLSNVKFIQEKKLIGRYFDEISQDTGKYCFGVEDTLKALEMGAVEILIVYENLDIMRYVLHCQGTEEEKILYLTPEQEKDKSHFTDKETGQEHELIESMPLLEWFANNYKKFGATLEIVTDKSQEGSQFVKGFGGIGGILRYRVDFQGMEYQGGDDEFFDLDDY

SEQ ID NO: 505 - DNA, 732 bp, Homo sapien
tgctgcgaaccacgtgggtcccgggcgcgtttcgggtgctggcggctgcagccggagttcaaacctaagcagctggaaggaaccatggccaactgtgagcgtaccttcattgcgatcaaaccagatggggtccagcggggtcttgtgggagagattatcaagcgttttgagcagaaaggattccgccttgttggtctgaaattcatgcaagcttccgaagatcttctcaaggaacactacgttgacctgaaggaccgtccattctttgccggcctggtgaaatacatgcactcagggccggtagttgccatggtctgggaggggctgaatgtggtgaagacgggccgagtcatgctcggggagaccaaccctgcagactccaagcctgggaccatccgtggagacttctgcatacaagttggcaggaacattatacatggcagtgattctgtggagagtgcagagaaggagatcggcttgtggtttcaccctgaggaactggtagattacacgagctgtgctcagaactggatctatgaatgacaggagggcagaccacattgcttttcacatccatttcccctccttcccatgggcagaggaccaggctgtaggaaatctagttatttacaggaacttcatcataatttggagggaagctcttggagctgtgagttctccctgtacagtgttaccatccccgaccatctgattaaaatgcttcctcccagc

SEQ ID NO: 506 - protein, 152 aa, Homo sapien
MANCERTFIAIKPDGVQRGLVGEIIKRFEQKGFRLVGLKFMQASEDLLKEHYVDLKDRPFFAGLVKYMHSGPVVAMVWEGLNVVKTGRVMLGETNPADSKPGTIRGDFCIQVGRNIIHGSDSVESAEKEIGLWFHPEELVDYTSCAQNWIYE

SEQ ID NO: 507 - DNA, 2059 bp, Homo sapien
gtgtggggaaggtagatgtcattcaagaaccaggtttgagtggccgcttctttgtcaccactctcccagcattttttcatgcaaaggatgggatattccgccgttatcgtggcccaggaatcttcgaagacctgcagaattatatcttagagaagaaatggcaatcagtcgagcctctgactggctggaaatccccggcttctctaacgatgtctggaatggctggtctttttagcatctctggcaagatatggcatcttcacaactatttcacagtgactcttggaattcctgcttggtgttcttatgtctttttcgtcatagccaccttggtttttggcctttttatgggtctggtcttggtggtaatatcagaatgtttctatgtgccacttccaaggcatttatctgagcgttctgagcagaatcggagatcagaggaggctcatagagctgaacagttgcaggatgcggaggaggaaaaagatgattcaaatgaagaagaaaacaaagacagccttgtagatgatgaagaagagaaagaagatcttggcgatgaggatgaagcagaggaagaagaggaggaggacaacttggctgctggtgtggatgaggagagaagtgaggccaatgatcaggggcccccaggagaggacggtgtgacccgggaggaagtagagcctgaggaggctgaagaaggcatctctgagcaaccctgcccagctgacacagaggtggtggaagactccttgaggcagcgtaaaagtcagcatgctgacaagggactgtagatttaatgatgcgttttcaagaatacacaccaaaacaatatgtcagcttccctttggcctgcagtttgtaccaaatccttaatttttcctgaatgagcaagcttctcttaaaagatgctctctagtcatttggtctcatggcagtaagcctcatgtatactaaggagagtcttccaggtgtgacaatcaggatatagaaaaacaaacgtagtgttgggatctgtttggagactgggatgggaacaagttcatttacttaggggtcagagagtctcgaccagaggaggccattcccagtcctaatcagcaccttccagagacaaggctgcaggccctgtgaaatgaaagccaagcaggagccttggctcctgagcatccccaaagtgtaacgtagaagccttgcatccttttcttgtgtaaagtatttatttttgtcaaattgcaggaaacatcaggcaccacagtgcatgaaaaatctttcacagctagaaattgaaagggccttgggtatagagagcagctcagaagtcatcccagccctctgaatctcctgtgctatgttttatttcttacctttaatttttccagcatttccaccatgggcattcaggctctccacactcttcactattatctcttggtcagaggactccaataacagccaggtttacatgaactgtgtttgttcattctgacctaaggggtttagataatcagtaaccataacccctgaagctgtgactgccaaacatctcaaatgaaatgttgtggccatcagagactcaaaaggaagtaaggattttacaagacagattaaaaaaaaattgttttgtccaaaatatagttgttgttgatttttttttaagttttctaagcaatatttttcaagccagaagtcctctaagtcttgccagtacaaggtagtcttgtgaagaaaagttgaatactgttttgttttcatctcaaggggttccctgggtcttgaactactttaataataactaaaaaaccacttctgattttccttcagtgatgtgcttttggtgaaagaattaatgaactccagtacctgaaagtgaaagatttgattttgtttccatcttctgtaatcttccaaagaattatatctttgtaaatctctcaatactcaatctactgtaagtacccagggaggctaatttccttaaaaaaaaaaaatctatccatctacttctctcttacctgatttatgtgttagaataaattcatgaaattcgattccaagcata

SEQ ID NO: 508 - protein, 193 aa, Homo sapien
MSGMAGLFSISGKIWHLHNYFTVTLGIPAWCSYVFFVIATLVFGLFMGLVLVVISECFYVPLPRHLSERSEQNRRSEEAHRAEQLQDAEEEKDDSNEEENKDSLVDDEEEKEDLGDEDEAEEEEEEDNLAAGVDEERSEANDQGPPGEDGVTREEVEPEEAEEGISEQPCPADTEVVEDSLRQRKSQHADKGL

SEQ ID NO: 509 - DNA, 5224 bp, Homo sapien
ggctcatagagctgaacagttgcaggatgcggaggaggaaaaagatgattcaaatgaagaagaaaacaaagacagccttgtagatgatgaagaagagaaagaagatcttggcgatgaggatgaagcagaggaagaagaggaggaggacaacttggctgctggtgtggatgaggagagaagtgaggccaatgatcaggggcccccaggagaggacggtgtgacccgggaggaagtagagcctgaggaggctgaagaaggcatctctgagcaaccctgcccagctgacacagaggtggtggaagactccttgaggcagcgtaaaagtcagcatgctgacaagggactgtagatttaatgatgcgttttcaagaatacacaccaaaacaatatgtcagcttccctttggcctgcagtttgtaccaaatccttaatttttcctgaatgagcaagcttctcttaaaagatgctctctagtcatttggtctcatggcagtaagcctcatgtatactaaggagagtcttccaggtgtgacaatcaggatatagaaaaacaaacgtagtgttgggatctgtttggagactgggatgggaacaagttcatttacttaggggtcagagagtctcgaccagaggaggccattcccagtcctaatcagcaccttccagagacaaggctgcaggccctgtgaaatgaaagccaagcaggagccttggctcctgagcatccccaaagtgtaacgtagaagccttgcatccttttcttgtgtaaagtatttatttttgtcaaattgcaggaaacatcaggcaccacagtgcatgaaaaatctttcacagctagaaattgaaagggccttgggtatagagagcagctcagaagtcatcccagccctctgaatctcctgtgctatgttttatttcttacctttaatttttccagcatttccaccatgggcattcaggctctccacactcttcactattatctcttggtcagaggactccaataacagccaggtttacatgaactgtgtttgttcattctgacctaaggggtttagataatcagtaaccataacccctgaagctgtgactgccaaacatctcaaatgaaatgttgtggccatcagagactcaaaaggaagtaaggattttacaagacagattaaaaaaaaatggttttgtccaaaatatagttgttgttgatttttttttaagttttctaagcaatatttttcaagccagaagtcctctaagtcttgccagtacaaggtagtcttgtgaagaaaagttgaatactgttttgttttcatctcaaggggttccctgggtcttgaactactttaataataactaaaaaaccacttctgattttccttcagtgatgtgcttttggtgaaagaattaatgaactccagtacctgaaagtgaaagatttgattttgtttccatcttctgtaatcttccaaagaattatatctttgtaaatctctcaatactcaacctactgtaagtacccagggaggctaatttccttaaaaaaaaaaaatctatccatctacttctctcttacctgatttatgtgttagaataaattcatgaaattcgattccaagcatacgaaagatgcctaaagttgattctatgctccttagatccagacagaataatgagtacaggtttatgaaattctaaaagtttctgtcgtctttaaaaaggaacgtgcagtatatttctatctggctgtttagataaccctttccttgtattaattgtgagcacggagctcactggtgggggaggttctgaaactctctgccctcctgtggttgaatgaagatgttgcaagacttgcacaaaggaggttattcttctgacagcatcaacttttagagatggttctttttcatctttccaattcagttacttgacagtctccttccccagtatgctgaagtttgttaagagtcaccagtaattgtgcttttcagacagtagtgcagcttcaaaatcgaggccatcactgggctgatgggctgggagaaccttgccatgtgcctgcctgtttcctgcccccttagtcactgcccatttcctgcccccttggtcgctgacacaccttcacccaaagtgccatggttctgatggtggcagttccatctccctgacatcaggaagcttttctcgatcagagcagagcggggcctgcctgccctcgtgtcactggatttctttctcttataatcagctgaaacagagttctcaaagaacagtaaactcaggttcagaggtattatggaataagaatggtttcatagtttggcttttctatataattcctccctctcaaactgaaatattcatttttttagtggagtatttgactagagagaaggtaaggcagaaatacagtctacactggcttttaaaaatgtaaagccaatttccaaccggaccccaaatagtacaggttgaacattccgttccaacaatccaaaaccccaaatgctccaaaatcttaaactttgagttccagcattccgtcagaagtggaaaattttacacctgacctcatttgacaggtggcagttacagtgcaatcaaaactttgttccatgcccaagattattaaaaatattggataaaattaccttcaagctatgttgtataaggtgtatataaaacaaatgaattttgtgtttagacttgggtctactcccaagatacctcattatatatatacaaaaatccccaaatccaaaaacatttgaaacacttctggtcccacacattttggataagggatatttgacctatatctaattatataataagaaaaatgtattttctttttttttttttttttgagatggagtttcactcttgttgtcgcccaggctgcaatggcacaatcttggcttactacaacctccgcctccctagttcaagggattctcctgcctcagcctcccaggtagctgggattacaggcatgtgccaccatgcctggctaattttgtatttttagtagagacggggtttcgccatgttggtcagactggtcttgaactcctgacctcaggtgatccgcccgcctcagcctcccaacgtgctgggattacaggtgtgagccaccgtacctggcagaaaatgtactttctttctcagaaatacttttaaaaaaaattgaagggtgaggagaaaaacatcttggagaagaggacccattaaaactttaaatatctgtgggaaccatttttcctgattttcccttttttaacatcatggcaaagatgggtttttttccaacaaaatttaatttaatatctttccacttgaagattttaggtttgttttcaatacttaatgaatataaaactaaaggagaaaagccaacctgaaataatttaaactttatatgaacatttcgataagagtttgtggattttttctgtagataatatatttgatccagaactcaagtgcatggaaacatgattttgatttttaaaatctaaaaaaaaaaaaaattaaaatcatgcttccctctattgcagtatcagttatttagtcacagaatggtattttatgtaaattaaaattaggtgaatgcaatgcaggtaactggttttggaatgggaatgtgcagtgctttatgtttggggagttggagcagggtatcttttcatcaattagaaggaaagtttgaaacttctgattacctttatgttggtttctcttattatttgtctcttgctagatctgctaaaccaacccagcttgctcagagatctcatattgaagcaacatacaggcaatccacatctttctttccctttgaagtatagtcattggatgggatgagggacagggcctgttgggttcacagggccttgcactgcatgggcacatacttaaaagctcttgtgcatggaatccctgtctgttagccacaggcctctttagctctatacattcaaaataactactgtagtagaaaatagataagcttcagctgagttggcttttgatagtggaaaaaaaacaaaatttgactttttatggccaaaattccttgttgacagctgtgatgttctaatatgatttgggaatatgtcagtctacagaacctgcatcctgtaaaaacacctttggggtagacgataaaagtcatttttaaggcaaatacttaccatgtgactttttattaccaaatgcatcagtagtggagctggtatgttgtttcataggatggaaacattagaagtccagagaaaaataaattttaaaaaaaggtggaaaagttacggcaaacctgagatttcagcataaaatctttagtatgaagtgagagaaagaagagggaggctggttctgttgctcgtatcaataggttatctgtgtccctcatcttggtgttacagtgttatttctgtcagtattatgaatatgtggttgacccatcctgtcaaatgtaccaacattttcgaaagaattcattcaaatctcttatgccaacagaaaagttccttcttgtttaatatctctttacctcagtcctacattttgattctctggaggagattttagcttgtcttaaaaagccaaatttggagtcatcaagcctgctgaacctgatggggcagctttttgaacagctttctggaagtaagaacttcagttgaaaagccctttgatcgcttcagcccgggacatgcccttcagatggcttattctcagtaaagctttatgtagactgtgacactgtatatgtgtgactcgtacaactttgacgtgtttctgaagtggtttaatcgtatttgttattagcttctttgtggaaatgcaatttttatactaaaaacattgcttatttgcaatgcaatatgttataaatttgttgtttatattactggtattagtcttagcctaatgaacctaattatttttctttctgtattctttgcttcctcaaatagcatctgcagcaattggaatgagaaatccagatatgtgtttcaagtagtacattgcctgaatcacaaatcacttgatcacagtattgtatataatccctgatcctatttgtttcattttattgtaaattcccatttgcatcaaaacctaatgatagtgattggtaagtaaaaacaaatggtgtattgcttttcatacaagtgttttcacaaaagccatttgcctaggcagcaaaaaatattaatttgtt

SEQ ID NO: 510 - DNA, 2807 bp, Homo sapien
cgctggccaatcggttgagagctgagctggacttggcggtgggagccggagcctgcttgttgcagctgtgggtgaggacggctctagctagttcccttttagactatggcgacatacctggagttcatccagcagaatgaagaacgggatggtgtgcgttttagttggaacgtgtggccttccagccggctggaggctacaagaatggttgtacccctggcttgtctccttactcctttgaaagaacgtccagacctacctcctgtacaatatgaacctgtgctttgcagcaggccaacttgtaaagctgttctcaacccactttgtcaggttgattatcgagcaaaactttgggcctgtaatttctgttttcaaagaaatcagtttcctccagcttatggaggcatatctgaggtgaatcaacctgccgaattgatgccccagttttctacaattgagtacgtgatacagcgaggtgctcagtcccctctgatctttctctatgtggttgacacatgcctggaggaagatgaccttcaagcactcaaagagtccctgcagatgtccctgagtcttcttcctccagatgctctggtgggtctgatcacatttggaaggatggtgcaggttcatgagctaagctgtgaaggaatctccaaaagttatgtcttccgagggaccaaggatttaactgcaaagcaaatacaggatatgttgggcctgaccaagccagccatgcccatgcagcaagcacgacctgcacaaccacaggagcacccttttgcttcaagcagatttctgcagcctgttcacaagattgatatgaacctcactgatcttcttggggagctacagagggacccatggccagtaactcaggggaagagacctttgcgatccactggtgtggctttgtccattgctgttggcttgctggagggcacttttccaaacacaggagccaggatcatgctgtttactggaggtccccctacccaagggcctggcatggtggttggagatgaattaaagattcctattcgttcttggcatgatattgagaaagataatgcacgattcatgaaaaaggcaaccaagcactatgagatgcttgctaatcgaacagctgcaaatggtcactgcattgatatttatgcttgtgcccttgatcaaactggacttttggagatgaagtgttgtgcaaatcttactggaggctacatggtaatgggagattctttcaacacttctctcttcaagcagacattccaaagaatctttactaaagattttaatggagatttccgaatggcatttggtgctactttggacgtaaagacctctcgggaactgaagattgcaggagccattggtccatgcgtatctctgaatgtgaaaggaccgtgtgtgtcagaaaatgagcttggtgttggtggcacgagtcagtggaaaatctgtggcctagatcctacatctacacttggcatctattttgaagttgtcaatcagcacaacaccccgatcccccaaggaggcagaggagccatccagtttgtcacgcattatcagcactccagcacccagagacgcatccgcgtgaccaccatcgcccgaaattgggcagatgtacagagtcagctcaggcacatagaagcagcatttgaccaggaggctgcggcagtgttgatggcacggcttggggtgttccgagcggagtcagaggaggggcccgatgtgctccggtggctggaccgacaactcatccgactgtgtcaaaagtttggacagtataacaaagaagaccccacttcttttaggttatcagattccttttctctatatcctcagtttatgttccatctgagaagatctccatttcttcaagtgtttaacaacagtcctgatgagtcgtcatattacagacatcattttgcccggcaggacctgacccagtccctcatcatgatccagcccattctctactcttactcctttcatgggccaccagagccagtactcttggatagcagcagcattctagctgacagaattttgctgatggatactttctttcaaattgtcatttatcttggtgagaccatagcccagtggcgtaaagctggctaccaggacatgcccgagtatgaaaacttcaagcaccttctgcaggcaccactggatgatgctcaagaaattctgcaagcacgcttcccgatgccacgttacatcaacacggagcatggaggcagtcaggctcgattccttttgtccaaagtgaacccatctcagacacacaataacctgtatgcttggggacaggaaactggagcacccatcctaactgatgatgttagcctgcaggtgttcatggaccatttgaagaagctggctgtctccagtgcctgttaagctgaggatacaaccaggaaatgcaacggtgtcagattgtgttcaaaatgtctagaaaggcttgataacattcctgttacttttctagcagattttaacaaataatcaaggacattttatatgtaactctttagattataatttatttgtattcctgtctttgtcctttttcttgcactataaaattataaggtcataaatgttttggtacttgtagatgtttatgtgctttttgtatcctaacttttagaatctaaataaaatcagaggtaatgtattttggcagcttgtttaggtgagaatcttaatgatcataaaaggaaataaatctagatgcagaaagtactggctaaaatattgctaatacaaatgtgatttcctgaaaaaaaaaaaaaaaa

SEQ ID NO: 511 - protein, 767 aa, Homo sapien
MATYLEFIQQNEERDGVRFSWNVWPSSRLEATRMVVPLACLLTPLKERPDLPPVQYEPVLCSRPTCKAVLNPLCQVDYRAKLWACNFCFQRNQFPPAYGGISEVNQPAELMPQFSTIEYVIQRGAQSPLIFLYVVDTCLEEDDLQALKESLQMSLSLLPPDALVGLITFGRMVQVHELSCEGISKSYVFRGTKDLTAKQIQDMLGLTKPAMPMQQARPAQPQEHPFASSRFLQPVHKIDMNLTDLLGELQRDPWPVTQGKRPLRSTGVALSIAVGLLEGTFPNTGARIMLFTGGPPTQGPGMVVGDELKIPIRSWHDIEKDNARFMKKATKHYEMLANRTAANGHCIDIYACALDQTGLLEMKCCANLTGGYMVMGDSFNTSLFKQTFQRIFTKDFNGDFRMAFGATLDVKTSRELKIAGAIGPCVSLNVKGPCVSENELGVGGTSQWKICGLDPTSTLGIYFEVVNQHNTPIPQGGRGAIQFVTHYQHSSTQRRIRVTTIARNWADVQSQLRHIEAAFDQEAAAVLMARLGVFRAESEEGPDVLRWLDRQLIRLCQKFGQYNKEDPTSFRLSDSFSLYPQFMFHLRRSPFLQVFNNSPDESSYYRHHFARQDLTQSLIMIQPILYSYSFHGPPEPVLLDSSSILADRILLMDTFFQIVIYLGETIAQWRKAGYQDMPEYENFKHLLQAPLDDAQEILQARFPMPRYINTEHGGSQARFLLSKVNPSQTHNNLYAWGQETGAPILTDDVSLQVFMDHLKKLAVSSAC

SEQ ID NO: 512 - DNA, 5825 bp, Homo sapien
atggggttcctgaaactgattgagattgagaactttaagtcgtacaagggtcgacagattatcggaccatttcagaggttcaccgccatcattggacccaatggctctggtaagtcaaatctcatggatgccatcagctttgtgctaggtgaaaaaaccagcaacctgcgggtaaagaccctgcgggacctgatccatggagctcctgtgggcaagccagctgccaaccgggcctttgtcagcatggtctactctgaggagggtgctgaggaccgtacctttgcccgtgtcattgtaggaggttcttctgagtacaagatcaacaacaaagtggtccaactacatgagtacagtgaggaattagagaagttgggcattctcatcaaagctcgtaacttcctcgttttccagggtgctgtggaatctattgccatgaagaaccccaaagagaggacagctctatttgaagagattagtcgttctggggagctggcgcaggagtatgacaagcgaaagaaggaaatggtgaaggctgaagaggacacacagtttaattaccatcgcaagaaaaatattgcggctgaacgcaaggaagcaaagcaggagaaagaagaggctgaccggtaccagcgcctgaaggatgaggtagtacgggctcaggtacagctgcagctctttaagctttaccataatgaagtggaaattgagaagctcaacaaggaactggcctcaaagaacaaggagatcgagaaggacaagaagcgtatggacaaggtggaggatgaactgaaggagaagaagaaggagctgggcaaaatgatgcgggagcagcagcagattgagaaggagatcaaggagaaggactcagaattgaaccagaagcggcctcagtacatcaaagccaaggagaacacctcccacaaaatcaagaagctggaagcagccaagaagtctctgcagaatgctcagaagcactacaagaagcgtaaaggtgacatggatgagctggagaaggagatgctgtcagtggagaaggctcggcaggagtttgaagaacggatggaagaagagagtcagagtcagggcagagatttgacgttggaggagaatcaggtgaagaaataccaccggttgaaagaagaagccagcaagagagcagctaccctggcccaggagctggagaaattcaatcgagaccagaaagctgaccaggaccgtctggatctggaagaacggaagaaagtagagacagaggccaagatcaagcaaaagctgcgggaaattgaagagaatcagaagcggattgagaaactggaggaatacatcaccactagcaagcagtccctagaagagcagaagaagctagagggggagctgacagaggaggtggagatggccaagcggcgtattgatgaaatcaataaggagctgaaccaggtgatggagcagctaggggatgcccgcatcgaccgccaggagagcagccgccagcagcgaaaggcagagataatggaaagcatcaagcgcctttaccctggctctgtgtacggccgcctcattgacctatgccagcccacacaaaagaagtatcagattgctgtaaccaaggttttgggcaagaacatggatgccattattgtggactcggagaagacaggccgggactgtattcagtatatcaaggagcagcgtggggagcctgagaccttcttgcctcttgactacctggaggtgaagcctacagatgagaaactccgggagctgaagggggccaagctagtgattgatgtgattcgctatgagccacctcatatcaaaaaggccctgcagtatgcttgtggcaatgcccttgtctgtgacaacgtggaagatgcccgccgcattgcctttggaggccaccagcgccacaagacagtggcactggatggaaccctattccagaagtcaggagtgatctctggtggggccagtgacctgaaggccaaggcacggcgctgggatgagaaagcagtagacaagttgaaagagaagaaggagcgcttgacagaggagctgaaagagcagatgaaggcaaaacggaaagaggcagagctgcgtcaggtgcagtctcaggcccatggactgcagatgcggctcaagtactcccagagtgacctagaacagaccaagacacgacatctagccctgaatctgcaggaaaaatccaagctggagagtgagctagccaactttgggcctcgcattaatgatatcaagaggatcattcagagccgagagagggaaatgaaagacttgaaggagaagatgaaccaggtagaggatgaggtgtttgaagagttttgtcgggagattggtgtgcgcaacatccgggagtttgaggaagaaaaggtgaaacggcagaatgaaatcgccaagaagcgtttggagtttgagaatcagaagactcgcttgggcattcagttggattttgaaaagaaccaactgaaggaggaccaagataaagtacacatgtgggagcagacagtgaaaaaagatgaaaatgagatagaaaagctcaaaaaggaggaacaaagacacatgaagatcatagatgagaccatggctcagctacaagacctgaagaatcagcatctggccaagaagtcggaagtgaatgacaagaatcatgagatggaggagattcgtaagaaactcgggggcgccaacaaggaaatgacccatttacagaaggaggtgacagccattgagaccaagcttgaacagaagcgcagtgaccgtcacaacttgctacaggcctgtaagatgcaggacattaagttgccactgtcaaaaggcaccatggatgatattagtcaggaagagggtagctcccagggggaggactcagtgagtggttcacagagaatttccagtatctatgcacgagaggccctcattgagattgactacggtgatctgtgtgaggatctgaaggatgcccaggctgaggaagagatcaagcaagagatgaacacactgcagcagaagctgaatgagcagcagagtgtgcttcagcgtattgccgcccccaacatgaaggccatggaaaagctggaaagtgtccgagacaagttccaggagacctcagatgagtttgaagcagcccgaaagcgagcaaagaaggccaagcaggcattcgaacagatcaagaaggagcgctttgaccgcttcaatgcttgttttgaatctgtggctaccaacattgatgagatctataaggccctgtcccgcaatagcagtgcccaggcattcctgggccctgagaaccctgaagagccctacttggatggcatcaactacaactgtgtggctcctgggaaacgcttccggcctatggacaacttgtcaggcggggagaagacagtggcagctctggccctgctctttgccatccacagctacaagccagcccccttcttcgtcctggatgagattgatgctgccttggataacaccaacattggcaaggtggcaaattacatcaaggagcagtcgacttgcaacttccaggccatcgtcatctctctcaaggaggagttctacaccaaggccgagagcctcattggagtctatcctgagcaaggggactgtgtgatcagcaaagtcctgaccttcgacctcaccaagtacccagatgccaaccccaaccccaatgagcagtagcagtatttttgccctcccgccctgtctggatccctaagctgtccctctcccaatctctggatatttgactcccaaccttccccctacctcctggccctttttggtgtagtcatgggatttaggcactgctaatcaagcatgaagaggaacagaggtgatgttaggtctggagcaaaaattcctgaacgacagggagtattctggcctctgaaaggaggtgctgagctgaacagggccatctgttcatcacacacacccccttcctccccctcatcacccataatcgtgggccccttgggcctcttgcccactgtgtgtgtgggtatgtatgtgtgtatgtatgtatccgcatgtgtgcatgtgagtatgtttgcaaaataataaaggatattggagacctgttttagaaggagcctaggctgaatttgattccaagagagcttaggatgacagcacccctgagctgggcaaaggtactcaggacctcataggagtcttaggcagttacctgaaactgccttcattcactcatttgtgtattcattcatttatgtattcatcagacacataccgaacaccctctatttgtcaggctctgtgcttggaatacagagttgaatcagacatgatctctaccctcctagtaaggagatacagtgggttcatgaatgactatagttagctgaatgtcatatgtactttgaatttgagaagtgggtgatcccctctaggcttcctggaggtcacatttaagctagaccttgacaaattggtaggatttggtcaggcactaggagtggagcatgagctctggggacagacagttatgggttctggtcccactttttatcacttactagttgtttgaccttgggcaagtcatttgaccttctgtgcctcagtttcctcatctgtaaaatggggctaacaatattacctacctcataggatttaatgatgtcaagctcctcactggaggccttatcccttcgtggagcccactaggtgccgacccctcagaatataaccctcatgcctggacccctgagagcttctgatcccagctattagggacagaagaagcctccaaatctggaaggtgctgaatgccctgctgactgggaaagtttcagggcactgatggggtctacctggtaagcggagggcctgaggaaacctgtagcttcaatcatgtctggtaaccgggtgcctgagccccaatctgggttgtgaggaaataggggagaggtatcctgggccacatcccagcctaacacctgtgaggttcattttaggaactaacctcattagctataaggatcatgcagaggcagcaaagccgggtgcgatgagctcagcctttactcattcacatacaccatcacactttaattccaatctgtatattgctttttaaaagttaagtccattctaattacccaaatatgcatgaattcattctccttttgagaagttagattgttaaagatagtctcattcagctaccaaccactccttgatccttcccttcttagtggctgttgtttgttgtacttccgtttagactttgttttaatgcttgtacgtacatatgtgaactcattggaaatattgtgtgtttaatgcaaatgatatattgaattgtttagcaatttgttttctttgcttaacgatgtttttgagatctgtgcatgttacttaatgtagctcaatccatcttctgtaattgctgtatagattgtcatcatatgattaccacattttacttacgcatttcttttgtgatggacattaagactgtttttaggttttgctattacaaaatactacacaggagcatcactatgcctgtgtgaaagtatatgtatgaaagtttacctagggttgattcctagaagtggaattgcaaagtcataggatatttatatattggtttttaataatacttccaaattgccctcctgtactatttactcagtatttttcttgaggttgatctgaggtctaacattgttatcctatatcattttcatcccaagtagtgatatctgtgaaatcacaggtttgatgtgtgctaattatgtattcttctaatacatattaaaagacataactatcaaaac

SEQ ID NO: 513 - DNA, 2122 bp, Homo sapien
gcccgtcccgccgcccgcccgccagccatgagctccacgcagttcaacaagggcccctcgtacgggctgtcggccgaggtcaagaaccggctcctgtccaaatatgacccccagaaggaggcagagctccgcacctggatcgagggactcaccggcctctccatcggccccgacttccagaagggcctgaaggatggaactatcttatgcacactcatgaacaagctacagccgggctccgtccccaagatcaaccgctccatgcagaactggcaccagctagaaaacctgtccaacttcatcaaggccatggtcagctacggcatgaaccctgtggacctgttcgaggccaacgacctgtttgagagtgggaacatgacgcaggtgcaggtgtctcttctcgccctggcggggaaggccaagactaaggggctgcagagcggggtggacattggcgtcaagtactcggagaagcaggagcggaatttcgacgatgccaccatgaaggctggccagtgcgtcatcgggctgcagatgggcaccaacaaatgcgccagccagtcgggcatgactgcctacggcacgagaaggcatctctatgaccccaagaaccatatcctgccccccatggaccactcgaccatcagcctccagatgggcacgaacaagtgcgccagccaggtgggcatgacggctcccgggacccggcggcacatctatgataccaagctgggaaccgacaagtgtgacaactcctccatgtccctgcagatgggctacacgcagggcgccaaccagagcggccaggtcttcggcctgggccggcagatatatgaccccaagtactgcccgcaaggcacagtggccgatggggctccctcgggcaccggcgactgcccggacccgggggaggtccctgaatatcccccttactaccaggaggaggccggctactgaggctcccagcacgctctctccccacatcgtcttcccatctgggtttttgggtttttctgtgttttcatctttttttttttttttcttgacccgttcagtgctgccagtcaaccaagggtctgtgagtgtcagcgtgggatcaggcagcagagcttttttcccctttgccttgatccttcgcaaggctgagccactgggctgtgggggaaggggtcaaggccatatcccaatacgtgtagggcgagggtccctgctggcacattcaggctgtgctgggaagaagagacctgggcttggaaggaaccggtccccgacggtttctggttgcctcgcctcttcccccttttgtcagctgagcagtttgtggtttctatgcccgcaagtttcaggaagtattcacaaaagaaaaatacattttttcccccaggggtggggcaaggacagtggagagagtgctaggaaatgagtcccctgggaaaggggaccgggccgtgatgttaaatatctccggctcccaagtgactggatttgcctaggaccttcagatcaacagacttcagaccctcagacctgccccggggccaggtggagaaagtgagggccgtacaaggaagtgaaattctgagttgttggggctaagcctgaccccctctccatgctccccgccccaactcactctggcctcagtagatttttttttcagttgtggttgttgcccaggctggagtgcagtggcgccatcttggctcactgcacctccaccttccgggctcaagcgattctccagcctcagcctcctgagtagctaggactgcaggtgctccaccacgcccggctaatttttgtatttttagtagagatggggtttccccatgttggccaggctggtctcgaactcctggcctcaggtgtgatccgcccgcctccgcctccccaagcgctgagattacaggtgtgagccaccgtgcccaggccctcagtaggttttaaggagtccccagccctcctcccttctgggcccgaccagcttatactgctccatcttccccggccacatgccccgccaagtactgcacagggaccccccacccaggggccctgctccgtgagataatgtgaaatacgactgtggaccaaacgcaataaaacctttgtttgtaggaag

SEQ ID NO: 514 - protein, 309 aa, Homo sapien
MSSTQFNKGPSYGLSAEVKNRLLSKYDPQKEAELRTWIEGLTGLSIGPDFQKGLKDGTILCTLMNKLQPGSVPKINRSMQNWHQLENLSNFIKAMVSYGMNPVDLFEANDLFESGNMTQVQVSLLALAGKAKTKGLQSGVDIGVKYSEKQERNFDDATMKAGQCVIGLQMGTNKCASQSGMTAYGTRRHLYDPKNHILPPMDHSTISLQMGTNKCASQVGMTAPGTRRHIYDTKLGTDKCDNSSMSLQMGYTQGANQSGQVFGLGRQIYDPKYCPQGTVADGAPSGTGDCPDPGEVPEYPPYYQEEAGY

SEQ ID NO: 515 - DNA, 3305 bp, Homo sapien
aaaaaaaatatattaataaaaaagttcaaaaaaggggggggattgtcatctcctttggggtgcgatggcttcaaatccaaactgaggctctccgggtggtaaggatgtgcgaggaggcctcttgaagaactccaggcctatcatgctgtctctccgctaaagcctgaggcccgaggtcagaggattcaggaaggctctgcagtcggcccaggagggcggggtcccgtggtggaggcggggagagggaaggaccgcacggagcaccaacccctgctcggccccgtaccaggaagcgctggggggcagaggagcggagttgaggcagaagccaggtgaggctggagtcctggggtaggcaggctgtcgctgccgctgccgctgcctgagatggaaatcgggggaggaagctcgcggaagaaacagcggagggttcgtggaaaaaaaagcaatggctgagctaagggatggggtaccaggttagggggaggaaacggtagagagaaataggtggggctcccgcgcatgctcaatagggaaggggcgcccgtggggtgcggacgcatgcgtagtgggcttctcgggcggtggggtgggcgcggaatttggagacccacttcgggaaaggtaaaatgcgggcgcaattttagggtacctgtgggacccgggctcttagggtcttgacacaggacgggcctgggccgaaagcccaggcacgcccgaccagagagtgtttctccactcccggactctgccagtcaggatggtggtgccttcgctgaagcttcaggacctcatcgaagagattcgcggggccaagactcaggcccaggagcgggaggtgatccaaaaggagtgtgcccacatccgggcctccttccgcgacggggacccagtgcacaggcaccggcagctggccaaactgctctacgtccacatgttgggctaccccgcccactttggacagatggagtgcctgaaactgatcgcctcctccagattcacagacaagagggtgggctacctgggggccatgcttctattggatgagaggcacgatgcccacctgctcattaccaacagcatcaagaatgacctgagccaggggattcagccagtacaaggcctggccttgtgcactttgagcaccatgggctctgctgagatgtgccgagacctggccccagaggtggagaaactgctcctgcagcccagtccctacgtgcgcaagaaggctattctgactgcagtgcacatgatccggaaggtccctgaactctccagtgtcttcctcccaccctgtgcccaactgcttcatgagcgtcaccatggcatcctgctgggcaccatcacgctgatcacggagctctgcgaacgaagccctgcagccctcaggcacttccgaaaggtggtaccccagctggtacacatcctccggactctggtgacaatgggatactccacagaacacagcatatctggagtcagcgaccccttcctgcaggtccagatacttcgtctgcttcggatcctgggccggaaccacgaggagagcagtgagaccatgaatgacttgctggcccaggtggccactaacacggacaccagccgaaatgccggaaatgcggtcctgtttgagacagtactcaccatcatggatatccgctctgcagctggcctacgggttctagctgtcaacattcttggtcgcttcctactcaacagtgacaggaacattaggtatgtggccctgacatcactgcttcgactggtgcagtctgatcacagtgctgtgcagcggcatcggcccactgtggtggaatgtctacgggaaactgatgcctccctcagccggagagccctggaactaagcctggctctggtaaatagctccaatgtgcgagccatgatgcaagagctgcaggcctttctggagtcctgccctcctgacctacgggctgactgtgcctcaggcatcctgctggctgcagagaggtttgctccaaccaaacgctggcacatagacaccatcctgcatgtgctgacaacggcgggcacccatgtgcgggatgatgcagtggccaacctgacccagctgattgggggggcccaggagctacatgcctactctgtgcgccgcctctacaatgccctggcagaagacatttcccagcaaccactggtgcaggtggcagcctggtgcattggggagtatggggacctcctgctggcagggaactgcgaggagattgagccccttcaggtggacgaagaggaagtgctggcattgctggaaaaggtgctgcagtcccacatgtccctgccagccactcgaggatatgccctcacagccctcatgaagctcagcactcgcctctgtggggacaacaaccgcatccgccaggtggtgtccatctacgggagctgcttggacgtggagctgcagcagcgggctgtggagtatgacacactcttccggaaatacgaccacatgagggctgccatcctggaaaaaatgcctcttgtggagcgagatggccctcaggctgatgaggaagcaaaggaaagcaaagaagcagcccagctttcagaagcagccccagtgcccacagagccccaggcctcacagctcctggatctgctagatctcctggatggggcttctggggatgtccagcatcctccccatctggacccctccccaggaggtgccctggtacacctgcttgaccttccctgtgtacctccacccccagctcccatcccagatctcaaagtgtttgagcgtgagggagtacagctgaatctgtctttcattcgaccccctgaaaaccctgctttgctgttaatcaccatcactgccaccaacttctcagagggtgatgtcacccatttcatctgccaggctgctgtgcccaagagtctccagctgcagctgcaggcccccagtgggaacacagttccagctcggggtggccttcctatcacccagctcttcagaatcctcaatcctaacaaggcccccctgcggctaaagctgcgcctcacctacgaccactttcaccagtcggtgcaggagatctttgaggtgaacaacttgcctgtggaatcgtggcagtaactgtctccactcacagcctgaaattctcctgtgtcccaaaccccagggggccccagcagcttcgaacctacacctgagggctaccagcaggtggcgctctggctttgcactgcaaaaactggggaccagcccccttctcccacaaataaagcccaataaagcctgagaagtgaggaaagccaaaaaa

SEQ ID NO: 516 - protein, 785 aa, Homo sapien
MVVPSLKLQDLIEEIRGAKTQAQEREVIQKECAHIRASFRDGDPVHRHRQLAKLLYVHMLGYPAHFGQMECLKLIASSRFTDKRVGYLGAMLLLDERHDAHLLITNSIKNDLSQGIQPVQGLALCTLSTMGSAEMCRDLAPEVEKLLLQPSPYVRKKAILTAVHMIRKVPELSSVFLPPCAQLLHERHHGILLGTITLITELCERSPAALRHFRKVVPQLVHILRTLVTMGYSTEHSISGVSDPFLQVQILRLLRILGRNHEESSETMNDLLAQVATNTDTSRNAGNAVLFETVLTIMDIRSAAGLRVLAVNILGRFLLNSDRNIRYVALTSLLRLVQSDHSAVQRHRPTVVECLRETDASLSRRALELSLALVNSSNVRAMMQELQAFLESCPPDLRADCASGILLAAERFAPTKRWHIDTILHVLTTAGTHVRDDAVANLTQLIGGAQELHAYSVRRLYNALAEDISQQPLVQVAAWCIGEYGDLLLAGNCEEIEPLQVDEEEVLALLEKVLQSHMSLPATRGYALTALMKLSTRLCGDNNRIRQVVSIYGSCLDVELQQRAVEYDTLFRKYDHMRAAILEKMPLVERDGPQADEEAKESKEAAQLSEAAPVPTEPQASQLLDLLDLLDGASGDVQHPPHLDPSPGGALVHLLDLPCVPPPPAPIPDLKVFEREGVQLNLSFIRPPENPALLLITITATNFSEGDVTHFICQAAVPKSLQLQLQAPSGNTVPARGGLPITQLFRILNPNKAPLRLKLRLTYDHFHQSVQEIFEVNNLPVESWQ

SEQ ID NO: 517 - DNA, 1542 bp, Homo sapien
ctgaagatggcggctgctgtaggacggttgctccgagcgtcggttgcccgacatgtgagtgccattccttggggcatttctgccactgcagccctcaggcctgctgcatgtggaagaacgagcttgacaaatttattgtgttctggttccagtcaagcaaaattattcagcaccagttcctcatgccatgcacctgctgtcacccagcatgcaccctattttaagggtacagccgttgtcaatggagagttcaaagacctaagccttgatgactttaaggggaaatatttggtgcttttcttctatcctttggatttcacctttgtgtgtcctacagaaattgttgcttttagtgacaaagctaacgaatttcacgatgtgaactgtgaagttgtcgcagtctcagtggattcccactttagccatcttgcctggataaatacaccaagaaagaatggtggtttgggccacatgaacatcgcactcttgtcagacttaactaagcagatttcccgagactacggtgtgctgttagaaggttctggtcttgcactaagaggtctcttcataattgaccccaatggagtcatcaagcatttgagcgtcaacgatctcccagtgggccgaagcgtggaagaaaccctccgcttggtgaaggcgttccagtatgtagaaacacatggagaagtctgcccagcgaactggacaccggattctcctacgatcaagccaagtccagctgcttccaaagagtactttcagaaggtaaatcagtagatcacccatgtgtatctgcaccttctcaactgagagaagaaccacagttgaaacctgcttttatcattttcaagatggttatttgtagaaggcaaggaaccaattatgcttgtattcataagtattactctaaatgttttgtttttgtaattctggctaggaccttttaaacatggttagttgctagtacaggaatcgtttattggtaacatcttggtggctggctagctagtttctacagaacataatttgcctctatagaaggctattcttagatcatgtctcaatggaaacactcttctttcttagccttacttgaatcttgcctataataaagtagagcaacacacattgaaagcttctgatcaacggtcctgaaattttcatcttgaatgtctttgtattaaactgaattttcttttaagctaacaaagatcataattttcaatgattagccgtgtaactcctgcaatgaatgtttatgtgattgaagcaaatgtgaatcgtattattttaaaaagtggcagagtgacttaactgatcatgcatgatccctcatccctgaaattgagtttatgtagtcattttacttattttattcattagctaactttgtctatgtatatttctagatattgattagtgtaatcgattataaaggatatttatcaaatccagggattgcattttgaaattataattattttctttgctgaagtattcattgtaaaacatacaaataacatatttaaacaaaaaaaaaaa

SEQ ID NO: 518 - protein, 256 aa, Homo sapien
MAAAVGRLLRASVARHVSAIPWGISATAALRPAACGRTSLTNLLCSGSSQAKLFSTSSSCHAPAVTQHAPYFKGTAVVNGEFKDLSLDDFKGKYLVLFFYPLDFTFVCPTEIVAFSDKANEFHDVNCEVVAVSVDSHFSHLAWINTPRKNGGLGHMNIALLSDLTKQISRDYGVLLEGSGLALRGLFIIDPNGVIKHLSVNDLPVGRSVEETLRLVKAFQYVETHGEVCPANWTPDSPTIKPSPAASKEYFQKVNQ

SEQ ID NO: 519 - DNA, 2587 bp, Homo sapien
aggcgctgcggccgtcccgggccgtgactcctcctttcccccgccccgcctccgttcggagagccggcgggcgggcgcctctcggccaggtacgcggccggctgggataggggtcgcgggcgggctttggtcgcgcagcagccggtcctccccggaggtaggcgggcgcgggccctgttgggtctttgggacgcgggtcccgctggggccggggatgctcctctctgtgagcgcggtcccgtccccccctgtccccgggcgggcgcacgggggtctaaccttggggggcggcgctcccgcctgtcccgggtgccggggttcgcgtcccgcggggccttcctcgctctttgtctcttctgagtgaacttgatgacccccttcttccaggaagcgcctcttggacgcgtgtgaccgatgcccagattgcacgaccacttctggagctgctcctgtgcgcacagcgcgaggcgccgaggccccccgcgagccagcaccgcggggctgccgcccaaggttggggagatgatcaacgtttccgtgtccgggccctccctgctggcggcccacggtgccccggacgctgaccccgcgcccaggggccgcagtgctgcgatgagcggccccgagcccggcagcccctaccccaacacctggcatcatcgcctgttgcagaggagcctcgtgctcttctcggttggggtggtcctaaccctggtgctcaacctgctgcagatccagaggaatgtcactctcttccccgaggaggtgatcgccaccatcttttcctccgcctggtgggtccctccctgctgcgggacagcagctgctgttgttggcctactgtacccctgtatcgacagtcacctcggagaaccccacaaatttaagagagaatgggccagtgtcatgcgctgcatagcaggttttggtggcattaaccacgccagtgctaaattggattttgccaataatgtccagctgtccttgactttagcagccctatctttgggcctttggtggacatttgatcgttccagaagtggccttgggctggggatcaccatagcttttctagctacgctgatcacgcagtttctcgtgtataatggtgtctatcagtatacgtccccagatttcctctatattcgttcttggctcccttgtatatttttctcaggaggcgtcacggtggggaacataggacgacagttagctatgggtgttcctgaaaagccccatagtgattgagtcttcaaaaccaccgattctgagagcaaggaagattttggaagaaaatctgactgtggattatgacaaagattatcttttttcttaagtaatctatttagatcgggctgactgtacaaatgactcctggaaaaaactcgtcacctatctagaaaagtcaagaatagggaggtggagaatgatgacttaccctgaagtcttcccttgctacccacactggcgcctgtctgtgccctggagcattctgcccagcctacgtgggttcagtcaggtgccaccttcccaagtattcgatttcattcatgtgattaaaacaagttgccatatttcaaagccttgagctaagactcaattaccaacccgcagttttgtgtcagtgcccaaaggagggaggttgatggtgcttaacaaacatgaagtatggtgtaataggaataatatttatccaaaagatttttaaaaatagggctgtgtttaaagaaggaatcaaaacaagaaaagcagcagtgattatagagaggtcacactctaagtggggtcgcggcgtggccacgcttcacggtcacgctcgtccgtcctgcagtggcgtgtttacatggtcacacgtgtgtgtatcaccagtgggtcaactgcttgtcattcctcccgcggcagtgttgtgtagacaatcttactgagcaaaaggcaatgaaaagtcttgggctcccacactgcgatatattggaattcccacctcagtttatgaagtttatttcgaaatccatagtcatctaagaatgaatacctgtctgccatgtatttcaatcttagtgagccaaaattgtttgtttgttactacagaatagagatgactgttttttggcacagccctatggaatttgcaatctgtgattgccttgtaaaaaggagagtgcatatggcactgcattaaacgtgtggtgtttctagtcaatgatattggtgagcacaatgtattcatttaatggcatagaccataccagacctaatttgcaagtattgggtcttcaaacttcaagtgcaatgtattatgaaaaccaatctgagccttgtatctcttaaatatttattccttctaacgtgtgagatgtcccgagagaagggttctccattcatttcagtgctgcctggaggaaactcggcaatgatttcttcagttgtgaagttcctttcgggttacaacctccactggaaccctcaaccttcgaaatactccagttttgggggttggggccatttacttataaatttaccgccgggtttttggaatctacatgtcttgggggcgggctcaaattcttcgaaagtggttggattaaaa

SEQ ID NO: 520 - protein, 277 aa, Homo sapien
MPRLHDHFWSCSCAHSARRRGPPRASTAGLPPKVGEMINVSVSGPSLLAAHGAPDADPAPRGRSAAMSGPEPGSPYPNTWHHRLLQRSLVLFSVGVVLTLVLNLLQIQRNVTLFPEEVIATIFSSAWWVPPCCGTAAAVVGLLYPCIDSHLGEPHKFKREWASVMRCIAGFGGINHASAKLDFANNVQLSLTLAALSLGLWWTFDRSRSGLGLGITIAFLATLITQFLVYNGVYQYTSPDFLYIRSWLPCIFFSGGVTVGNIGRQLAMGVPEKPHSD

SEQ ID NO: 521 - DNA, 2587 bp, Homo sapien; identical to SEQ ID NO: 519

SEQ ID NO: 522 - protein, 277 aa, Homo sapien; identical to SEQ ID NO: 520

SEQ ID NO: 523 - DNA, 1345 bp, Homo sapien
acttggccttacactccgctcggctcaccatgtgtcactctcgcagctgccacccgaccatgaccatcctgcaggccccgaccccggccccctccaccatcccgggaccccggcggggctccggtcctgagatcttcaccttcgaccctctcccggagcccgcagcggcccctgccgggcgccccagcgcctctcgcgggcaccgaaagcgcagccgcagggtctctctaccctcgagtggtgagtatcgccgaagtgggcattcgcggtgtgcgctgccctggagtcactggggaacgacccgactccagagcctcgacctgacctgtctcctgttttgtctccccttagtccggcgccagctgccagtcgaggaaccgaacccagccaaaaggcttctctttctgctgctcaccatcgtcttctgccagatcctgatggctgaagagggtgtgccggcgcccctgcctccagaggacgcccctaacgccgcatccctggcgcccacccctgtgtcccccgtcctcgagccctttaatctgacttcggagccctcggactacgctctggacctcagcactttcctccagcaacacccggccgccttctaactgtgactccccgcactccccaaaaagaatccgaaaaaccacaaagaaacaccaggcgtacctggtgcgcgagagcgtatccccaactgggacttccgaggcaacttgaactcagaacactacagcggagacgccacccggtgcttgaggcgggaccgaggcgcacagagaccgaggcgcatagagaccgaggcacagcccagctgggctaggccggtgggaaggagagcgtcgttaatttatttcttattgctcctaattaatatttatatgtatttatgtacgtcctcctaggtgatggagatgtgtacgtaatatttattttaacttatgcaagggtgtgagatgttccctctgctgtaaatgcaggtctcttggtatttattgagctttgtgggactggtggaagcaggacacctggaactgcggcaaagtaggagaagaaatggggaggactcgggtgggggaggacgtcccggctgggatgaagtctggtggtgggtcgtaagtttaggaggtgactgcatcctccagcatctcaactccgtctgtctactgtgtgagacttcggcggaccattaggaatgagatccgtgagatccttccatcttcttgaagtcgcctttagggtggctgcgaggtagagggttgggggttggtgggctgtcacggagcgactgtcgagatcgcctagtatgttctgtgaacacaaataaaattgatttactgtctgc

SEQ ID NO: 524 - protein, 193 aa, Homo sapien
MCHSRSCHPTMTILQAPTPAPSTIPGPRRGSGPEIFTFDPLPEPAAAPAGRPSASRGHRKRSRRVSLPSSGEYRRSGHSRCALPWSHWGTTRLQSLDLTCLLFCLPLVRRQLPVEEPNPAKRLLFLLLTIVFCQILMAEEGVPAPLPPEDAPNAASLAPTPVSPVLEPFNLTSEPSDYALDLSTFLQQHPAAF

SEQ ID NO: 525 - DNA, 983 bp, Homo sapien
gtggaattcatggcatctacttcgtatgactattgcagagtgcccatggaagacggggataagcgctgtaagcttctgctggggataggaattctggtgctcctgatcatcgtgattctgggggtgcccttgattatcttcaccatcaaggccaacagcgaggcctgccgggacggccttcgggcagtgatggagtgtcgcaatgtcacccatctcctgcaacaagagctgaccgaggcccagaagggctttcaggatgtggaggcccaggccgccacctgcaaccacactgtgatggccctaatggcttccctggatgcagagaaggcccaaggacaaaagaaagtggaggagcttgagggagagatcactacattaaaccataagcttcaggacgcgtctgcagaggtggagcgactgagaagagaaaaccaggtcttaagcgtgagaatcgcggacaagaagtactaccccagctcccaggactccagctccgctgcggcgccccagctgctgattgtgctgctgggcctcagcgctctgctgcagtgagatcccaggaagctggcacatcttggaaggtccgtcctgctcggcttttcgcttgaacattcccttgatctcatcagttctgagcgggtcatggggcaacacggttagcggggagagcacggggtagccggagaagggcctctggagcaggtctggaggggccatggggcagtcctgggtgtggggacacagtcgggttgacccagggctgtctccctccagagcctccctccggacaatgagtcccccctcttgtctcccaccctgagattgggcatggggtgcggtgtggggggcatgtgctgcctgttgttatgggttttttttgcggggggggttgcttttttctggggtctttgagctccaaaaaataaacacttcctttgagggagagcaaaaaaaaaaaaaaaaaaaaaaaaaaaaaaaaaaaa

SEQ ID NO: 526 - protein, 180 aa, Homo sapien
MASTSYDYCRVPMEDGDKRCKLLLGIGILVLLIIVILGVPLIIFTIKANSEACRDGLRAVMECRNVTHLLQQELTEAQKGFQDVEAQAATCNHTVMALMASLDAEKAQGQKKVEELEGEITTLNHKLQDASAEVERLRRENQVLSVRIADKKYYPSSQDSSSAAAPQLLIVLLGLSALLQ

SEQ ID NO: 527 - DNA, 1223 bp, Homo sapien
agctcggtcctgctggaggccacgggtgccacacactcggtcccgacatgatggcgagcatgcgagtggtgaaggagctggaggatcttcagaagaagcctcccccatacctgcggaacctgtccagcgatgatgccaatgtcctggtgtggcacgctctcctcctacccgaccaacctccctaccacctgaaagccttcaacctgcgcatcagcttcccgccggagtatccgttcaagcctcccatgatcaaattcacaaccaagatctaccaccccaacgtggacgagaacggacagatttgcctgcccatcatcagcagtgagaactggaagccttgcaccaagacttgccaagtcctggaggccctcaatgtgctggtgaatagaccgaatatcagggagcccctgcggatggacctcgctgacctgctgacacagaatccggagctgttcagaaagaatgccgaagagttcaccctccgattcggagtggaccggccctcctaactcatgttctgaccctctgtgcactggatcctcggcatagcggacggacacacctcatggactgaggccagagccccctgtggcccattccccattcatttttcccttcttaggttgttagtcattagtttgtgtgtgtgtgtggtggagggaagggagctatgagtgtgtgtgttgtgtatggactcactcccaggttcacctggccacaggtgcacccttcccacaccctttacattccccagagccaagggagtttaagtttgcagttacaggccagttctccagctctccatcttagagagacaggtcaccttgcaggcctgcttgcaggaaatgaatccagcagccaactcgaatccccctagggctcaggcactgagggcctggggacagtggagcatatgggtgggagacagatggagggtaccctatttacaactgagtcagccaagccactgatgggaatatacagatttaggtgctaaaccgtttattttccacggatgagtcacaatctgaagaatcaaacttccatcctgaaaatctatatgtttcaaaaccacttgccatcctgttagattgccagttcctgggaccaggcctcagactgtgaagtatatatcctccagcattcagtccagggggagccacggaaaccatgttcttgcttaagccattaaagtcagagatgaaaaaaaaaaaaaaaaaaaa

SEQ ID NO: 528 - protein, 153 aa, Homo sapien
MMASMRVVKELEDLQKKPPPYLRNLSSDDANVLVWHALLLPDQPPYHLKAFNLRISFPPEYPFKPPMIKFTTKIYHPNVDENGQICLPIISSENWKPCTKTCQVLEALNVLVNRPNIREPLRMDLADLLTQNPELFRKNAEEFTLRFGVDRPS

SEQ ID NO: 529 - DNA, 5611 bp, Homo sapien
gcgcgaccgtcccgggggtggggccgggcgcagcggcgagaggaggcgaaggtggctgcggtagcagcagcgcggcagcctcggacccagcccggagcgcagggcggccgctgcaggtccccgctcccctccccgtgcgtccgcccatggccgccgccgggcagctgtgcttgctctacctgtcggcggggctcctgtcccggctcggcgcagccttcaacttggacactcgggaggacaacgtgatccggaaatatggagaccccgggagcctcttcggcttctcgctggccatgcactggcaactgcagcccgaggacaagcggctgttgctcgtgggggccccgcgcggagaagcgcttccactgcagagagccaacagaacgggagggctgtacagctgcgacatcaccgcccgggggccatgcacgcggatcgagtttgataacgatgctgaccccacgtcagaaagcaaggaagatcagtggatgggggtcaccgtccagagccaaggtccagggggcaaggtcgtgacatgtgctcaccgatatgaaaaaaggcagcatgttaatacgaagcaggaatcccgagacatctttgggcggtgttatgtcctgagtcagaatctcaggattgaagacgatatggatgggggagattggagcttttgtgatgggcgattgagaggccatgagaaatttggctcttgccagcaaggtgtagcagctacttttactaaagactttcattacattgtatttggagccccgggtacttataactggaaagggattgttcgtgtagagcaaaagaataacactttttttgacatgaacatctttgaagatgggccttatgaagttggtggagagactgagcatgatgaaagtctcgttcctgttcctgctaacagttacttaggtttttctttggactcagggaaaggtattgtttctaaagatgagatcacttttgtatctggtgctcccagagccaatcacagtggagccgtggttttgctgaagagagacatgaagtctgcacatctcctccctgagcacatattcgatggagaaggtctggcctcttcatttggctatgatgtggcggtggtggacctcaacaaggatgggtggcaagatatagttattggagccccacagtattttgatagagatggagaagttggaggtgcagtgtatgtctacatgaaccagcaaggcagatggaataatgtgaagccaattcgtcttaatggaaccaaagattctatgtttggcattgcagtaaaaaatattggagatattaatcaagatggctacccagatattgcagttggagctccgtatgatgacttgggaaaggtttttatctatcatggatctgcaaatggaataaataccaaaccaacacaggttctcaagggtatatcaccttattttggatattcaattgctggaaacatggaccttgatcgaaattcctaccctgatgttgctgttggttccctctcagattcagtaactattttcagatcccggcctgtgattaatattcagaaaaccatcacagtaactcctaacagaattgacctccgccagaaaacagcgtgtggggcgcctagtgggatatgcctccaggttaaatcctgttttgaatatactgctaaccccgctggttataatccttcaatatcaattgtgggcacacttgaagctgaaaaagaaagaagaaaatctgggctatcctcaagagttcagtttcgaaaccaaggttctgagcccaaatatactcaagaactaactctgaagaggcagaaacagaaagtgtgcatggaggaaaccctgtggctacaggataatatcagagataaactgcgtcccattcccataactgcctcagtggagatccaagagccaagctctcgtaggcgagtgaattcacttccagaagttcttccaattctgaattcagatgaacccaagacagctcatattgatgttcacttcttaaaagagggatgtggagacgacaatgtatgtaacagcaaccttaaactagaatataaattttgcacccgagaaggaaatcaagacaaattttcttatttaccaattcaaaaaggtgtaccagaactagttctaaaagatcagaaggatattgctttagaaataacagtgacaaacagcccttccaacccaaggaatcccacaaaagatggcgatgacgcccatgaggctaaactgattgcaacgtttccagacactttaacctattctgcatatagagaactgagggctttccctgagaaacagttgagttgtgttgccaaccagaatggctcgcaagctgactgtgagctcggaaatccttttaaaagaaattcaaatgtcactttttatttggttttaagtacaactgaagtcacctttgacaccccatatctggatattaatctgaagttagaaacaacaagcaatcaagataatttggctccaattacagctaaagcaaaagtggttattgaactgcttttatcggtctcgggagttgctaaaccttcccaggtgtattttggaggtacagttgttggcgagcaagctatgaaatctgaagatgaagtgggaagtttaatagagtatgaattcagggtaataaacttaggtaaacctcttacaaacctcggcacagcaaccttgaacattcagtggccaaaagaaattagcaatgggaaatggttgctttatttggtgaaagtagaatccaaaggattggaaaaggtaacttgtgagccacaaaaggagataaactccctgaacctaacggagtctcacaactcaagaaagaaacgggaaattactgaaaaacagatagatgataacagaaaattttctttatttgctgaaagaaaataccagactcttaactgtagcgtgaacgtgaactgtgtgaacatcagatgcccgctgcgggggctggacagcaaggcgtctcttattttgcgctcgaggttatggaacagcacatttctagaggaatattccaaactgaactacttggacattctcatgcgagccttcattgatgtgactgctgctgccgaaaatatcaggctgccaaatgcaggcactcaggttcgagtgactgtgtttccctcaaagactgtagctcagtattcgggagtaccttggtggatcatcctagtggctattctcgctgggatcttgatgcttgctttattagtgtttatactatggaagtgtggtttcttcaagagaaataagaaagatcattatgatgccacatatcacaaggctgagatccatgctcagccatctgataaagagaggcttacttctgatgcatagtattgatctacttctgtaattgtgtggattctttaaacgctctaggtacgatgacagtgttccccgataccatgctgtaaggatccggaaagaagagcgagagatcaaagatgaaaagtatattgataaccttgaaaaaaaacagtggatcacaaagtggaacagaaatgaaagctactcatagcgggggcctaaaaaaaaaaaagcttcacagtacccaaactgctttttccaactcagaaattcaatttggatttaaaagcctgctcaatccctgaggactgatttcagagtgactacacacagtacgaacctacagttttaactgtggatattgttacgtagcctaaggctcctgttttgcacagccaaatttaaaactgttggaatggatttttctttaactgccgtaatttaactttctgggttgcctttgtttttggcgtggctgacttacatcatgtgttggggaagggcctgcccagttgcactcaggtgacatcctccagatagtgtagctgaggaggcacctacactcacctgcactaacagagtggccgtcctaacctcgggcctgctgcgcagacgtccatcacgttagctgtcccacatcacaagactatgccattggggtagttgtgtttcaacggaaagtgctgtcttaaactaaatgtgcaatagaaggtgatgttgccatcctaccgtcttttcctgtttcctagctgtgtgaatacctgctcacgtcaaatgcatacaagtttcattctccctttcactaaaaacacacaggtgcaacagacttgaatgctagttatacttatttgtatatggtatttattttttcttttctttacaaaccattttgttattgactaacaggccaaagagtctccagtttacccttcaggttggtttaatcaatcagaattagaattagagcatgggagggtcatcactatgacctaaattatttactgcaaaaagaaaatctttataaatgtaccagagagagttgttttaataacttatctataaactataacctctccttcatgacagcctccaccccacaacccaaaaggtttaagaaatagaattataactgtaaagatgtttatttcaggcattggatattttttactttagaagcctgcataatgtttctggatttacatactgtaacattcaggaattcttggagaagatgggtttattcactgaactctagtgcggtttactcactgctgcaaatactgtatattcaggacttgaaagaaatggtgaatgcctatggaactagtggatccaaactgatccagtataagactactgaatctgctaccaaaacagttaatcagtgagtcgagtgttctattttttgttttgtttcctcccctatctgtattcccaaaaattactttggggctaatttaacaagaactttaaattgtgttttaattgtaaaaatggcagggggtggaattattactctatacattcaacagagactgaatagatatgaaagctgattttttttaattaccatgcttcacaatgttaagttatatggggagcaacagcaaacaggtgctaatttgttttggatatagtataagcagtgtctgtgttttgaaagaatagaacacagtttgtagtgccactgttgttttggggggggctttttttctttttccggaaaatccttaaaccttaagatactaaggacgttgttttggttgtacttggaattcttagtcacaaaatatattttgtttacaaaaatttctgtaaaacaggttataacagtgtttaaagtctcagtttcttgcttggggaacttgtgtccctaatgtgttagattgctagattgctaaggagctgatacttgacagttttttagacctgtgttactaaaaaaaagatgaatgtcggaaaagggtgttgggagggtggtcaacaaagaaacaaagatgttatggtgtttagacttatggttgttaaaaatgtcatctcaagtcaagtcactggtctgtttgcatttgatacatttttgtactaactagcattgtaaaattatttcatgattagaaattacctgtggatatttgtataaaagtgtgaaataaattttttataaaagtgttcattgtttcgtaacacagcattgtatatgtgaagcaaactctaaaattataaatgacaacctgaattatctatttcatcaaaaaaaaaaaaaaaaaaaa

SEQ ID NO: 530 - protein, 1073 aa, Homo sapien
MAAAGQLCLLYLSAGLLSRLGAAFNLDTREDNVIRKYGDPGSLFGFSLAMHWQLQPEDKRLLLVGAPRGEALPLQRANRTGGLYSCDITARGPCTRIEFDNDADPTSESKEDQWMGVTVQSQGPGGKVVTCAHRYEKRQHVNTKQESRDIFGRCYVLSQNLRIEDDMDGGDWSFCDGRLRGHEKFGSCQQGVAATFTKDFHYIVFGAPGTYNWKGIVRVEQKNNTFFDMNIFEDGPYEVGGETEHDESLVPVPANSYLGFSLDSGKGIVSKDEITFVSGAPRANHSGAVVLLKRDMKSAHLLPEHIFDGEGLASSFGYDVAVVDLNKDGWQDIVIGAPQYFDRDGEVGGAVYVYMNQQGRWNNVKPIRLNGTKDSMFGIAVKNIGDINQDGYPDIAVGAPYDDLGKVFIYHGSANGINTKPTQVLKGISPYFGYSIAGNMDLDRNSYPDVAVGSLSDSVTIFRSRPVINIQKTITVTPNRIDLRQKTACGAPSGICLQVKSCFEYTANPAGYNPSISIVGTLEAEKERRKSGLSSRVQFRNQGSEPKYTQELTLKRQKQKVCMEETLWLQDNIRDKLRPIPITASVEIQEPSSRRRVNSLPEVLPILNSDEPKTAHIDVHFLKEGCGDDNVCNSNLKLEYKFCTREGNQDKFSYLPIQKGVPELVLKDQKDIALEITVTNSPSNPRNPTKDGDDAHEAKLIATFPDTLTYSAYRELRAFPEKQLSCVANQNGSQADCELGNPFKRNSNVTFYLVLSTTEVTFDTPYLDINLKLETTSNQDNLAPITAKAKVVIELLLSVSGVAKPSQVYFGGTVVGEQAMKSEDEVGSLIEYEFRVINLGKPLTNLGTATLNIQWPKEISNGKWLLYLVKVESKGLEKVTCEPQKEINSLNLTESHNSRKKREITEKQIDDNRKFSLFAERKYQTLNCSVNVNCVNIRCPLRGLDSKASLILRSRLWNSTFLEEYSKLNYLDILMRAFIDVTAAAENIRLPNAGTQVRVTVFPSKTVAQYSGVPWWIILVAILAGILMLALLVFILWKCGFFKRNKKDHYDATYHKAEIHAQPSDKERLTSDA

SEQ ID NO: 531 - DNA, 3741 bp, Homo sapien
gaattcgttgttgggaaggactggggaaacagctgtaacatttgccaccctcagaagctgctggtcctgtgtcacaccaccttagcctcttgatcgaggaagattctcgctgaagtctgttaattctactttttgagtacttatgaataaccacgtgtcttcaaaaccatctaccatgaagctaaaacataccatcaaccctattcttttatattttatacattttctaatatcactttatactattttaacatacattccgttttattttttctccgagtcaagacaagaaaaatcaaaccgaattaaagcaaagcctgtaaattcaaaacctgattctgcatacagatctgttaatagtttggatggtttggcttcagtattataccctggatgtgatactttagataaagtttttacatatgcaaaaaacaaatttaagaacaaaagactcttgggaacacgtgaagttttaaatgaggaagatgaagtacaaccaaatggaaaaatttttaaaaaggttattcttggacagtataattggctttcctatgaagatgtctttgttcgagcctttaattttggaaatggattacagatgttgggtcagaaaccaaagaccaacatcgccatcttctgtgagaccagggccgagtggatgatagctgcacaggcgtgttttatgtataattttcagcttgttacattatatgccactctaggaggtccagccattgttcatgcattaaatgaaacagaggtgaccaacatcattactagtaaagaactcttacaaacaaagttgaaggatatagtttctttggtcccacgcctgcggcacatcatcactgttgatggaaagccaccgacctggtccgacttccccaagggcatcattgtgcataccatggctgcagtggaggccctgggagccaaggccagcatggaaaaccaacctcatagcaaaccattgccctcagatattgcagtaatcatgtacacaagtggatccacaggacttccaaagggagtcatgatctcacatagtaacattattgctggtataactgggatggcagaaaggattccagaactaggagaggaagatgtctacattggatatttgcctctggcccatgttctagaattaagtgctgagcttgtctgtctttctcacggatgccgcattggttactcttcaccacagactttagcagatcagtcttcaaaaattaaaaaaggaagcaaaggggatacatccatgttgaaaccaacactgatggcagcagttccggaaatcatggatcggatctacaaaaatgtcatgaataaagtcagtgaaatgagtagttttcaacgtaatctgtttattctggcctataattacaaaatggaacagatttcaaaaggacgtaatactccactgtgcgacagctttgttttccggaaagttcgaagcttgctagggggaaatattcgtctcctgttgtgtggtggcgctccactttctgcaaccacgcagcgattcatgaacatctgtttctgctgtcctgttggtcagggatacgggctcactgaatctgctggggctggaacaatttccgaagtgtgggactacaatactggcagagtgggagcaccattagtttgctgtgaaatcaaattaaaaaactgggaggaaggtggatactttaatactgataagccacaccccaggggtgaaattcttattgggggccaaagtgtgacaatggggtactacaaaaatgaagcaaaaacaaaagctgatttctctgaagatgaaaatggacaaaggtggctctgtactggggatattggagagtttgaacccgatggatgcttaaagattattgatcgtaaaaaggaccttgtaaaactacaggcaggggaatatgtttctcttgggaaagtagaggcagctttgaagaatcttccactagtagataacatttgtgcatatgcaaacagttatcattcttatgtcattggatttgttgtgccaaatcaaaaggaactaactgaactagctcgaaagaaaggacttaaagggacttgggaggagctgtgtaacagttgtgaaatggaaaatgaggtacttaaagtgctttccgaagctgctatttcagcaagtctggaaaagtttgaaattccagtaaaaattcgtttgagtcctgaaccgtggacccctgaaactggtctggtgacagatgccttcaagctgaaacgcaaagagcttaaaacacattaccaggcggacattgagcgaatgtatggaagaaaataattattctcttctggcatcagtttgctacagtgagctcacatcaaataggaaaatacttgaaatgcatgtctcaagctgcaaggcaaactccattcctcatattaaactattacttctcatgacgtcaccatttttaactgacaggattagtaaaacattaagacagcaaacttgtgtctgtctcttctttcattttccccgccaccaacttactttaccacctatgactgtacttgtcagtatgagaatttttctgaatcatattggggaagcagtgattttaaaacctcaagtttttaaacatgatttatatgttctgtataatgttcagtttgtaactttttaaaagtttggatgtatagagggataaataggaaatataagaattggttatttgggggcttttttacttactgtatttaaaaatacaagggtattgatatgaaattatgtaaatttcaaatgcttatgaatcaaatcattgttgaacaaaagatttgttgctgtgtaattattgtcttgtatgcatttgagagaaataaatatacccatacttatgttttaagaagttgagatcttgtgaatatatgcctgtcagtgtcttctttatatatttattttttattagaaaaaatgaagtttggttggtgatgcatgaaacaaaatagcaagagagggttatagtttaatagtaagggagataacacagcatgtgtagcaccagttgataattggtctctagtagcttactgtcaaaatgttcaatgaagtcttctgttcatctgttgaaactaggaaaatacccaaacttaaatggaagaattctgaaagagaggatagaatttaaagaacaagagtatataaagttattctttgaatatttcgttgactatatgtacattgagttatctatatttgtaaacaaattagtcatggaaaattattctattccaaagtctccttttagtctagataatcattatttcattttaaaattagtgtttttcatagtttgcactgatgcgtgtatggatgtgtgtgagtcagtggtagcttatttaaaaagcaccttatcctttctcccataacctttgtacactaaaaaatgaaagaatttagaatgtatttgatgatagcattctcactaagacacatgagaatttaactttataaccgcgtgagttaagatttaattcataggttttgatgtcattgttgaagttatttgtaattcagaaaccttgcttgtgtgatacatagtaagtctcttcatttattactgcttgcctgttgttatatctggattatcaaaagcaatagtgcaccaattaagatgtgctcaaatcaggacttaaatcataggcaccacatttttcatgtcagactagttactttgttgattctcagttactgtaggcatcaaaaggcaaaaatca

SEQ ID NO: 532 - protein, 720 aa, Homo sapien
MNNHVSSKPSTMKLKHTINPILLYFIHFLISLYTILTYIPFYFFSESRQEKSNRIKAKPVNSKPDSAYRSVNSLDGLASVLYPGCDTLDKVFTYAKNKFKNKRLLGTREVLNEEDEVQPNGKIFKKVILGQYNWLSYEDVFVRAFNFGNGLQMLGQKPKTNIAIFCETRAEWMIAAQACFMYNFQLVTLYATLGGPAIVHALNETEVTNIITSKELLQTKLKDIVSLVPRLRHIITVDGKPPTWSDFPKGIIVHTMAAVEALGAKASMENQPHSKPLPSDIAVIMYTSGSTGLPKGVMISHSNIIAGITGMAERIPELGEEDVYIGYLPLAHVLELSAELVCLSHGCRIGYSSPQTLADQSSKIKKGSKGDTSMLKPTLMAAVPEIMDRIYKNVMNKVSEMSSFQRNLFILAYNYKMEQISKGRNTPLCDSFVFRKVRSLLGGNIRLLLCGGAPLSATTQRFMNICFCCPVGQGYGLTESAGAGTISEVWDYNTGRVGAPLVCCEIKLKNWEEGGYFNTDKPHPRGEILIGGQSVTMGYYKNEAKTKADFSEDENGQRWLCTGDIGEFEPDGCLKIIDRKKDLVKLQAGEYVSLGKVEAALKNLPLVDNICAYANSYHSYVIGFVVPNQKELTELARKKGLKGTWEELCNSCEMENEVLKVLSEAAISASLEKFEIPVKIRLSPEPWTPETGLVTDAFKLKRKELKTHYQADIERMYGRK

SEQ ID NO: 533 - DNA, 5261 bp, Homo sapien
ctcaggcacgtctagattttcccacttacataggtcttgttaagaaaccagtcctgccttcttgccactcgtgtctttcgatggctcccttcccgaagtcccgctgcctctaagcggagtgttaagcggggctctcggaagccggtggaccgagatttccccgggtggggcgggcgcggtgtagcggcccgcgggctgacttgctcccggctgtcccccggccccagcgaccatgccccgtaaaggcacccagccctccactgcccggcgcagagaggaagggccgccgccgccgtcccctgacggcgccagcagcgacgcggagcctgagccgccgtccggccgcacggagagcccagccaccgccgcagagactgcaagtgaggaacttgataatagaagtttagaagagattttgaacagcattcctcctcccccgcctccagcaatgaccaatgaagctggagctcctcggcttatgataactcatattgtaaaccagaacttcaaatcctatgctggggagaaaattctgggacctttccataagcgcttttcctgtattatcgggccaaatggcagtggcaaatccaatgttattgattctatgctttttgtgtttggctatcgagcacaaaaaataagatctaaaaaactctcagtattaatacataattctgatgaacacaaggacattcagagttgtacagtagaagttcattttcaaaagataattgataaggaaggggatgattatgaagtcattcctaacagtaatttctatgtatccagaacggcctgcagagataatacttctgtctatcacataagtggaaagaaaaagacatttaaggatgttggaaatcttcttcgaagccatggaattgacttggaccataatagatttttaattttacagggtgaagttgaacaaattgctatgatgaaaccaaaaggccagactgaacacgatgagggtatgcttgaatatttagaagatataattggttgtggacggctaaatgaacctattaaagtcttgtgtcggagagttgaaatattaaatgaacacagaggagataagttaaacagggtaaagatggtggaaaaggaaaaggatgccttagaaggagagaaaaacatagctatcgaatttcttaccttggaaaatgaaatatttagaaaaaagaatcatgtttgtcaatattatatttatgagttgcagaaacgaattgctgaaatggaaactcaaaaggaaaaaattcatgaagataccaaagaaattaatgagaagagcaatatactatcaaatgaaatgaaagctaagaataaagatgtaaaagatacagaaaagaaactgaataaaattacaaaatttattgaggagaataaagaaaaatttacacagctagatttggaagatgttcaagttagagaaaagttaaaacatgccacgagtaaagccaaaaaactggagaaacaacttcaaaaagataaagaaaaggttgaagaatttaaaagtatacctgccaagagtaacaatatcattaatgaaacaacaaccagaaacaatgccctcgagaaggaaaaagagaaagaagaaaaaaaattaaaggaagttatggatagccttaaacaggaaacacaagggcttcagaaagaaaaagaaagtcgagagaaagaacttatgggtttcagcaaatcggtaaatgaagcacgttcaaagatggatgtagcccagtcagaacttgatatctatctcagtcgtcataatactgcagtgtctcaattaactaaggctaaggaagctctaattgcagcttctgagactctcaaagaaaggaaagctgcaatcagagatatagaaggaaaactccctcaaactgaacaagaattaaaggagaaagaaaaagaacttcaaaaacttacacaagaagaaacaaactttaaaagtttggttcatgatctctttcaaaaagttgaagaagcaaagagctcattagcaatgaatcgaagtagggggaaagtccttgatgcaataattcaagaaaaaaaatctggcaggattccaggaatatatggaagattgggggacttaggagccattgatgaaaaatacgacgtggctatatcatcctgttgtcatgcactggactacattgttgttgattctattgatatagcccaagaatgtgtaaacttccttaaaagacaaaatattggagttgcaacctttataggtttagataagatggctgtatgggcgaaaaagatgaccgaaattcaaactcctgaaaatactcctcgtttatttgatttagtaaaagtaaaagatgagaaaattcgccaagctttttattttgctttacgagataccttagtagctgacaacttggatcaagccacaagagtagcatatcaaaaagatagaagatggagagtggtaactttacagggacaaatcatagaacagtcaggtacaatgactggtggtggaagcaaagtaatgaaaggaagaatgggttcctcacttgttattgaaatctctgaagaagaggtaaacaaaatggaatcacagttgcaaaacgactctaaaaaagcaatgcaaatccaagaacagaaagtacaacttgaagaaagagtagttaagttacggcatagtgaacgagaaatgaggaacacactagaaaaatttactgcaagcatccagcgtttaatagagcaagaagaatatttgaatgtccaagttaaggaacttgaagctaatgtacttgctacagcccctgacaaaaaaaagcagaaattgctagaagaaaacgttagtgctttcaaaacagaatatgatgctgtggctgagaaagctggtaaagtagaagctgaggttaaacgcttacacaataccatcgtagaaatcaataatcataaactcaaggcccaacaagacaaacttgataaaataaataagcaattagatgaatgtgcttctgctattactaaagcccaagtagcaatcaagactgctgacagaaaccttcaaaaggcacaagactctgtcttgcgtacagagaaagaaataaaagatactgagaaagaggtggatgacctaacagcagagctgaaaagtcttgaggacaaagcagcagaggtcgtaaagaatacaaatgctgcagaggaatccttaccagagatccagaaagaacatcgcaatctgcttcaagaattaaaagttattcaagaaaatgaacatgctcttcaaaaagatgcacttagtattaagttgaaacttgaacaaatagatggtcacattgctgaacataattctaaaataaaatattggcacaaagagatttcaaaaatatcactgcatcctatagaagataatcctattgaagagatttcggttctaagcccagaggatcttgaagcgatcaagaatccagattctataacaaatcaaattgcacttttggaagcccggtgtcatgaaatgaaaccaaacctcggtgccatcgcagagtataaaaagaaggaagaattgtatttgcaacgggtagcagaattggacaaaattacttatgaaagagacagttttagacaggcatatgaagatcttcggaaacaaaggcttaatgaatttatggcaggtttttatataataacaaataaattaaaggaaaattaccaaatgcttactttgggaggggacgccgaactcgagcttgtagacagcttggatcctttctctgaaggaatcatgttcagtgttcgaccacctaagaaaagttggaaaaagatcttcaacctttcgggaggagagaaaacacttagttcattggctttagtatttgctcttcaccactacaagcccactcccctttacttcatggatgagattgatgcagcccttgattttaaaaatgtgtccattgttgcattttatatatatgaacaaacaaaaaatgcacagttcataataatttctcttcgaaataatatgtttgagatttcggatagacttattggaatttacaagacatacaacataacaaaaagtgttgctgtaaatccaaaagaaattgcatctaagggactttgttgaactttatgctgaagattcttcaagttgattcagtgtattactgatttttttctatttgtaaaggattatgagttgtataaaatacatactccctaaactagatcatgaaactggtttctgttttatgcagttgtcatttgtaaagtctaataaaatattctctataattgcttctagattacaaaaatatgacaatcttgtaagtagcagactatggagaaaaatgagttacctggagggtcaggtaacttgccaaactaaaaagtatgttagttgaggcaaagtcctaagcaaggttgtgctatcaaggctcagcataccttcgtgggcctttgatttaccaacactggaaatgcctgccaactaatcttggatagattctttaaggcattccacttagcttgccagttgagacaatcaccacagttattacccaaatactatgaacatatttttgtaaaccagtcattctgaattatagtgatgagaatttaaatatatgcttttctagaatttgatgtttgaccatttatgacttaattaccagagagccagtaaattaggacagtgtttcaacaagcctaggctatctcgtaagttgaaaaatatcccactatagttgcttcatgagtatgaagtaagatggcctctgatttacactggttcaatttacaaattttcaactttatgataggtttatccgggtactaaatgcatttcaacttgatagtttcaacttatgataggtttaccaggatgtagtcccactgttgaggagcatctatttaggggttaattactttagtaataagtggaaagtaagataccttgagtaatgtttgcctataaaattgtcagcgtatttttacactattggctcaagaatgttataatgctaagggacataagttggcaaccacttggtttttggaaggactttcggtattgtattagaagtctgccctagctgttaaatttctgggtatttatcctaaggaattaattaaagagttaattgttcctttcttcagtgggccattgttttagatatttaaaaaatccaacagtttctatcataatgtaactgtaaaaatgtaaacacattattagcatggacttttaaataaagatttaaagaaagcaaaaaaaaaaaaaaaaaaaa

SEQ ID NO: 534 - protein, 1288 aa, Homo sapien
MPRKGTQPSTARRREEGPPPPSPDGASSDAEPEPPSGRTESPATAAETASEELDNRSLEEILNSIPPPPPPAMTNEAGAPRLMITHIVNQNFKSYAGEKILGPFHKRFSCIIGPNGSGKSNVIDSMLFVFGYRAQKIRSKKLSVLIHNSDEHKDIQSCTVEVHFQKIIDKEGDDYEVIPNSNFYVSRTACRDNTSVYHISGKKKTFKDVGNLLRSHGIDLDHNRFLILQGEVEQIAMMKPKGQTEHDEGMLEYLEDIIGCGRLNEPIKVLCRRVEILNEHRGDKLNRVKMVEKEKDALEGEKNIAIEFLTLENEIFRKKNHVCQYYIYELQKRIAEMETQKEKIHEDTKEINEKSNILSNEMKAKNKDVKDTEKKLNKITKFIEENKEKFTQLDLEDVQVREKLKHATSKAKKLEKQLQKDKEKVEEFKSIPAKSNNIINETTTRNNALEKEKEKEEKKLKEVMDSLKQETQGLQKEKESREKELMGFSKSVNEARSKMDVAQSELDIYLSRHNTAVSQLTKAKEALIAASETLKERKAAIRDIEGKLPQTEQELKEKEKELQKLTQEETNFKSLVHDLFQKVEEAKSSLAMNRSRGKVLDAIIQEKKSGRIPGIYGRLGDLGAIDEKYDVAISSCCHALDYIVVDSIDIAQECVNFLKRQNIGVATFIGLDKMAVWAKKMTEIQTPENTPRLFDLVKVKDEKIRQAFYFALRDTLVADNLDQATRVAYQKDRRWRVVTLQGQIIEQSGTMTGGGSKVMKGRMGSSLVIEISEEEVNKMESQLQNDSKKAMQIQEQKVQLEERVVKLRHSEREMRNTLEKFTASIQRLIEQEEYLNVQVKELEANVLATAPDKKKQKLLEENVSAFKTEYDAVAEKAGKVEAEVKRLHNTIVEINNHKLKAQQDKLDKINKQLDECASAITKAQVAIKTADRNLQKAQDSVLRTEKEIKDTEKEVDDLTAELKSLEDKAAEVVKNTNAAEESLPEIQKEHRNLLQELKVIQENEHALQKDALSIKLKLEQIDGHIAEHNSKIKYWHKEISKISLHPIEDNPIEEISVLSPEDLEAIKNPDSITNQIALLEARCHEMKPNLGAIAEYKKKEELYLQRVAELDKITYERDSFRQAYEDLRKQRLNEFMAGFYIITNKLKENYQMLTLGGDAELELVDSLDPFSEGIMFSVRPPKKSWKKIFNLSGGEKTLSSLALVFALHHYKPTPLYFMDEIDAALDFKNVSIVAFYIYEQTKNAQFIIISLRNNMFEISDRLIGIYKTYNITKSVAVNPKEIASKGLC

SEQ ID NO: 535 - DNA, 5261 bp, Homo sapien; identical to SEQ ID NO: 533

SEQ ID NO: 536 - protein, 1288 aa, Homo sapien; identical to SEQ ID NO: 534

SEQ ID NO: 537 - DNA, 2589 bp, Homo sapien
caaccagggagatttctccattttcctcttgtctacagtgcggctacaaatctgggatttttttattacttctttttttttcgaactacacttgggctcctttttttgtgctcgacttttccaccctttttccctccctcctgtgctgctgctttttgatctcttcgactaaaatttttttatccggagtgtatttaatcggttctgttctgtcctctccaccacccccacccccctccctccggtgtgtgtgccgctgccgctgttgccgccgccgctgctgctgctgctcgccccgtcgttacaccaacccgaggctctttgtttcccctcttggatctgttgagtttctttgttgaagaagccagcatgggtgcccagttctccaagaccgcagcgaagggagaagccgccgcggagaggcctggggaggcggctgtggcctcgtcgccttccaaagcgaacggacaggagaatggccacgtgaaggtaaacggcgacgcttcgcccgcggccgccgagtcgggcgccaaggaggagctgcaggccaacggcagcgccccggccgccgacaaggaggagcccgcggccgccgggagcggggcggcgtcgccctcctcggccgagaaaggtgagccggccgccgccgctgcccccgaggccggggccagcccggtagagaaggaggcccccgcggaaggcgaggctgccgagcccggctcggccacggccgcggagggagaggccgcgtcggccgcctcctcgacttcttcgcccaaggccgaggacggggccacgccctcgcccagcaacgagaccccgaaaaaaaaaaagaagcgcttttccttcaagaagtctttcaagctgagcggcttctccttcaagaagaacaagaaggaggctggagaaggcggtgaggctgaggcgcccgctgccgaaggcggcaaggacgaggccgccgggggcgcagctgcggccgccgccgaggcgggcgcggcctccggggagcaggcagcggcgccgggcgaggaggcggcagcgggcgaggagggggcggcgggtggcgacccgcaggaggccaagccccaggaggccgctgtcgcgccagagaagccgcccgccagcgacgagaccaaggccgccgaggagcccagcaaggtggaggagaaaaaggccgaggaggccggggccagcgccgccgcctgcgaggccccctccgccgccgggcccggcgcgcccccggagcaggaggcagcccccgcggaggagcccgcggccgccgcagcctcgtcagcctgcgcagccccctcacaggaggcccagcccgagtgcagtccagaagcccccccagcggaggcggcagagtaaaagagcaagcttttgtgagataatcgaagaacttttctcccccgtttgtttgttggagtggtgccaggtactgttttggagaacttgtctacaaccagggattgattttaaagatgtctttttttattttacttttttttaagcaccaaattttgttgtttttttttttctcccctccccacagatcccatctcaaatcattctgttaaccaccattccaacaggtcgaggagagcttaaacaccttcttcctctgccttgtttctcttttattttttattttttcgcatcagtattaatgtttttgcatactttgcatctttattcaaaagtgtaaactttctttgtcaatctatggacatgcccatatatgaaggagatgggtgggtcaaaaagggatatcaaatgaagtgataggggtcacaatggggaaattgaagtggtgcataacattgccaaaatagtgtgccactagaaatggtgtaaaggctgtctttttttttttttttaaagaaaagttattaccatgtattttgtgaggcaggtttacaacactacaagtcttgagttaagaaggaaagaggaaaaaagaaaaaacaccaatacccagatttaaaaaaaaaaaaacgatcatagtcttaggagttcatttaaaccataggaacttttcacttatctcatgttagctgtaccagtcagtgattaagtagaactacaagttgtataggctttattgtttattgctggtttatgaccttaataaagtgtaattatgtattaccagcagggtgtttttaactgtgactattgtataaaaacaaatcttgatatccagaagcacatgaagtttgcaactttccaccctgcccatttttgtaaaactgcagtcatcttggaccttttaaaacacaaattttaaactcaaccaagctgtgataagtggaatggttactgtttatactgtggtatgtttttgattacagcagataatgctttcttttccagtcgtctttgagaataaaggaaaaaaaatcttcagatgcaatggttttgtgtagcatcttgtctatcatgttttgtaaatactggagaagctttgaccaatttgacttagagatggaatgtaactttgcttacaaaaattgctattaaactcctgcttaaggtgttctaattttctgtgagcacactaaaagcgaaaaataaatgtgaataaaatgt

SEQ ID NO: 538 - protein, 332 aa, Homo sapien
MGAQFSKTAAKGEAAAERPGEAAVASSPSKANGQENGHVKVNGDASPAAAESGAKEELQANGSAPAADKEEPAAAGSGAASPSSAEKGEPAAAAAPEAGASPVEKEAPAEGEAAEPGSATAAEGEAASAASSTSSPKAEDGATPSPSNETPKKKKKRFSFKKSFKLSGFSFKKNKKEAGEGGEAEAPAAEGGKDEAAGGAAAAAAEAGAASGEQAAAPGEEAAAGEEGAAGGDPQEAKPQEAAVAPEKPPASDETKAAEEPSKVEEKKAEEAGASAAACEAPSAAGPGAPPEQEAAPAEEPAAAAASSACAAPSQEAQPECSPEAPPAEAAE

SEQ ID NO: 539 - DNA, 2589 bp, Homo sapien; identical to SEQ ID NO: 537

SEQ ID NO: 540 - protein, 332 aa, Homo sapien; identical to SEQ ID NO: 538

SEQ ID NO: 541 - DNA, 1418 bp, Homo sapien
aactgtgcgaaccagacccggcagccttgctcagttcagcatagcggagcggatccgatcggatcggagcacaccggagcaggctcatcgagaaggcgtctgcgagaccatggagaacggatacacctatgaagattataagaacactgcagaatggcttctgtctcatactaagcaccgacctcaagttgcaataatctgtggttctggattaggaggtctgactgataaattaactcaggcccagatctttgactacagtgaaatccccaactttcctcgaagtacagtgccaggtcatgctggccgactggtgtttgggttcctgaatggcagggcctgtgtgatgatgcagggcaggttccacatgtatgaagggtacccactctggaaggtgacattcccagtgagggttttccaccttctgggtgtggacaccctggtagtcaccaatgcagcaggagggctgaaccccaagtttgaggttggagatatcatgctgatccgtgaccatatcaacctacctggtttcagtggtcagaaccctctcagagggcccaatgatgaaaggtttggagatcgtttccctgccatgtctgatgcctacgaccggactatgaggcagagggctctcagtacctggaaacaaatgggggagcaacgtgagctacaggaaggcacctatgtgatggtggcaggccccagctttgagactgtggcagaatgtcgtgtgctgcagaagctgggagcagacgctgttggcatgagtacagtaccagaagttatcgttgcacggcactgtggacttcgagtctttggcttctcactcatcactaacaaggtcatcatggattatgaaagcctggagaaggccaaccatgaagaagtcttagcagctggcaaacaagctgcacagaaattggaacagtttgtctccattcttatggccagcattccactccctgacaaagccagttgacctgccttggagtcgtctggcatctcccacacaagacccaagtagctgctaccttctttggccccttgctggagtcatgtgcctctgtccttaggttgtagcagaaaggaaaagattcctgtccttcacctttcccactttcttctaccagacccttctggtgccagatcctcttctcaaagctgggattacaggtgtgagcatagtgagaccttggcgctacaaaataaagctgttctcattcctgttctttcttacacaagagctggagcccgtgccctaccacacatctgtggagatgcccaggatttgactcgggccttagaactttgcatagcagctgctactagctctttgagataatacattccgaggggctcagttctgccttatctaaatcaccagagaccaaacaaggactaatccaatacctcttgga

SEQ ID NO: 542 - protein, 289 aa, Homo sapien
MENGYTYEDYKNTAEWLLSHTKHRPQVAIICGSGLGGLTDKLTQAQIFDYSEIPNFPRSTVPGHAGRLVFGFLNGRACVMMQGRFHMYEGYPLWKVTFPVRVFHLLGVDTLVVTNAAGGLNPKFEVGDIMLIRDHINLPGFSGQNPLRGPNDERFGDRFPAMSDAYDRTMRQRALSTWKQMGEQRELQEGTYVMVAGPSFETVAECRVLQKLGADAVGMSTVPEVIVARHCGLRVFGFSLITNKVIMDYESLEKANHEEVLAAGKQAAQKLEQFVSILMASIPLPDKAS

SEQ ID NO: 543 - DNA, 1560 bp, Homo sapien
gagacggcttctcatcatggcggaccctagagataaggcgcttcaggactaccgcaagaagttgcttgaacacaaggagatcgacggccgtcttaaggagttaagggaacaattaaaagaacttaccaagcagtatgaaaagtctgaaaatgatctgaaggccctacagagtgttgggcagatcgtgggtgaagtgcttaaacagttaactgaagaaaaattcattgttaaagctaccaatggaccaagatatgttgtgggttgtcgtcgacagcttgacaaaagtaagctgaagccaggaacaagagttgctttggatatgactacactaactatcatgagatatttgccgagagaggtggatccactggtttataacatgtctcatgaggaccctgggaatgtttcttattctgagattggagggctatcagaacagatccgggaattaagagaggtgatagaattacctcttacaaacccagagttatttcagcgtgtaggaataatacctccaaaaggctgtttgttatatggaccaccaggtacgggaaaaacactcttggcacgagccgttgctagccagctggactgcaatttcttaaaggttgtatctagttctattgtagacaagtacattggtgaaagtgctcgtttgatcagagaaatgtttaattatgctagagatcatcaaccatgcatcatttttatggatgaaatagatgctattggtggtcgtcggttttctgagggtacttcagctgacagagagattcagagaacgttaatggagttactgaatcaaatggatggatttgatactctgcatagagttaaaatgaccatggctacaaacagaccagatacactggatcctgctttgctgcgtccaggaagattagatagaaaaatacatattgatttgccaaatgaacaagcaagattagacatactgaaaatccatgcaggtcccattacaaagcatggtgaaatagattatgaagcaattgtgaagctttcggatggctttaatggagcagatctgagaaatgtttgtactgaagcaggtatgttcgcaattcgtgctgatcatgattttgtagtacaggaagacttcatgaaagcagtcagaaaagtggctgattctaagaagctggagtctaaattggactacaaacctgtgtaatttactgtaagatttttgatggctgcatgacagatgttggcttattgtaaaaataaagttaaagaaaataatgtatgtattggcaatgatgtcattaaaagtatatgaataaaaatatgagtaacatcataaaaattagtaattcaacttttaagatacagaagaaatttgtatgtttgttaaagttgcatttattgcagcaagttacaaagggaaagtgttgaagcttttcatatttgctgcgtgagcattttgtaaaatattgaaagtggtttgagatagtggtataagaaagcatttcttatgacttattttgtatcatttgttttcctcatctaaaaagttgaataaaatctgtttgattcagttctcct

SEQ ID NO: 544 - protein, 389 aa, Homo sapien [sequence omitted]

SEQ ID NO: 545 - DNA, 2095 bp, Homo sapien
gcgcctgtcagggaagcggcgcgcgcgcgcgggcggcgggcgggctggggatccgccgcgcagtgccagcgccagcgccagacccgcgccccgcgctctccggcccgtcgcctgccttgggactcgcgagcccgcactcccgccctgcctgttcgctgcccgagtatggagctgctgtgttgcgaaggcacccggcacgcgccccgggccgggccggacccgcggctgctgggggaccagcgtgtcctgcagagcctgctccgcctggaggagcgctacgtaccccgcgcctcctacttccagtgcgtgcagcgggagatcaagccgcacatgcggaagatgctggcttactggatgctggaggtatgtgaggagcagcgctgtgaggaggaagtcttccccctggccatgaactacctggatcgctacctgtcttgcgtccccacccgaaaggcgcagttgcagctcctgggtgcggtctgcatgctgctggcctccaagctgcgcgagaccacgcccctgaccatcgaaaaactgtgcatctacaccgaccacgctgtctctccccgccagttgcgggactgggaggtgctggtcctagggaagctcaagtgggacctggctgctgtgattgcacatgatttcctggccttcattctgcaccggctctctctgccccgtgaccgacaggccttggtcaaaaagcatgcccagacctttttggccctctgtgctacagattatacctttgccatgtacccgccatccatgatcgccacgggcagcattggggctgcagtgcaaggcctgggtgcctgctccatgtccggggatgagctcacagagctgctggcagggatcactggcactgaagtggactgcctgcgggcctgtcaggagcagatcgaagctgcactcagggagagcctcagggaagcctctcagaccagctccagcccagcgcccaaagccccccggggctccagcagccaagggcccagccagaccagcactcctacagatgtcacagccatacacctgtagccctggagaggccctctggagtggccactaagcagaggaggggccgctgccacccacctccctgcctccaggaaccacaccacatctaagcctgaaggggcgtctgttcccccttcacaaagcccaagggatctggtcctacccatccccgcagtgtgcactaaggggcccggccagccatgtctgcatttcggtggctagtcaagctcctcctccctgcatctgaccagcagcgcctttcccaactctagctgggggtgggccaggctgatgggacagaattggatacatacaccagcattccttttgaacgcccccccccacccctgggggctctcatgttttcaactgccaaaatgctctagtgccttctaaaggtgttgtcccttctagggttattgcatttggattggggtccctctaaaatttaatgcatgatagacacatatgagggggaatagtctagatggctcctctcagtactttggaggcccctatgtagtccgtgctgacagctgctcctagagggaggggcctaggcctcagccagagaagctataaattcctctttgctttgctttctgctcagcttctcctgtgtgattgacagctttgctgctgaaggctcattttaatttattaattgctttgagcacaactttaagaggacataatgggggcctggccatcccacaagtggtggtaaccctggtggttgctgttttcctcccttctgctactggcaaaaggatctttgtggccaaggagctgctatagcctggggtggggtcatgccctcctctcccattgtccctctgccccatcctccagcagggaaaatgcagcagggatgccctggaggtggctgagcccctgtctagagagggaggcaagccctgttgacacaggtctttcctaaggctgcaaggtttaggctggtggcccaggaccatcatcctactgtaataaagatgattgtgaaataaaactggctttggcttcttggaaaaaaaaaaaaaaaaaaaaaaaaaaaaaaaaaaaaaaaaaaaaa

SEQ ID NO: 546 - protein, 292 aa, Homo sapien
MELLCCEGTRHAPRAGPDPRLLGDQRVLQSLLRLEERYVPRASYFQCVQREIKPHMRKMLAYWMLEVCEEQRCEEEVFPLAMNYLDRYLSCVPTRKAQLQLLGAVCMLLASKLRETTPLTIEKLCIYTDHAVSPRQLRDWEVLVLGKLKWDLAAVIAHDFLAFILHRLSLPRDRQALVKKHAQTFLALCATDYTFAMYPPSMIATGSIGAAVQGLGACSMSGDELTELLAGITGTEVDCLRACQEQIEAALRESLREASQTSSSPAPKAPRGSSSQGPSQTSTPTDVTAIHL

SEQ ID NO: 547 - DNA, 1568 bp, Homo sapien
cgcaacgccggtgcctgaggagcgatgccgagggaaatcatcaccctacagttgggccagtgcggcaatcagattgggttcgagttctggaaacagctgtgcgccgagcatggtatcagccccgaggcgatcgtggaggagttcgccaccgagggcactgaccgcaaggacgtctttttctaccaggcagacgatgagcactacatcccccgggccgtgctgctggacttggaaccccgggtgatccactccatcctcaactccccctatgccaagctctacaacccagagaacatctacctgtcggaacatggaggaggagctggcaacaactgggccagcggattctcccagggagaaaagatccatgaggacatttttgacatcatagaccgggaggcagatggtagtgacagtctagagggctttgtgctgtgtcactccattgctggggggacaggctctggactgggttcctacctcttagaacggctgaatgacaggtatcctaagaagctggtgcagacatactcagtgtttcccaaccaggacgagatgagcgatgtggtggtccagccttacaattcactcctcacactcaagaggctgacgcagaatgcagactgtctggtggtgctggacaacacagccctgaaccggattgccacagaccgcctgcacatccagaacccatccttctcccagatcaaccagctggtgtctaccatcatgtcagccagcaccaccaccctgcgctaccctggctacatgaacaatgacctcatcggcctcatcgcctcgctcattcccaccccacggctccacttcctcatgaccggctacacccctctcactacggaccagtcagtggccagcgtgaggaagaccacggtcctggatgtcatgaggcggctgctgcagcccaagaacgtgatggtgtccacaggccgagaccgccagaccaaccactgctacatcgccatcctcaacatcatccagggagaggtggaccccacccaggtccacaagagcttgcagaggatccgggaacgcaagttggccaacttcatcccgtggggccccgccagcatccaggtggccctgtcgaggaagtctccctacctgccctcggcccaccgggtcagcgggctcatgatggccaaccacaccagcatctcctcgctcttcgagagaacctgtcgccagtatgacaagctgcgtaagcgggaggccttcctggagcagttccgcaaggaggacatgttcaaggacaactttgatgagatggacacatccagggagattgtgcagcagctcatcgatgagtaccatgcggccacacggccagactacatctcctggggcacccaggagcagtgagtcccccaggacaggggaccctcatctgccttactggttggcccaagccctgcctgactgaccaccccctcagagcacagatcagggacctcacgcatctctttctcatatacatggactctctgttggcctgcaaacacatttacttctcctcttatgagactatttatctttaataaagcactggg

SEQ ID NO: 548 - protein, 451 aa, Homo sapien
MPREIITLQLGQCGNQIGFEFWKQLCAEHGISPEAIVEEFATEGTDRKDVFFYQADDEHYIPRAVLLDLEPRVIHSILNSPYAKLYNPENIYLSEHGGGAGNNWASGFSQGEKIHEDIFDIIDREADGSDSLEGFVLCHSIAGGTGSGLGSYLLERLNDRYPKKLVQTYSVFPNQDEMSDVVVQPYNSLLTLKRLTQNADCLVVLDNTALNRIATDRLHIQNPSFSQINQLVSTIMSASTTTLRYPGYMNNDLIGLIASLIPTPRLHFLMTGYTPLTTDQSVASVRKTTVLDVMRRLLQPKNVMVSTGRDRQTNHCYIAILNIIQGEVDPTQVHKSLQRIRERKLANFIPWGPASIQVALSRKSPYLPSAHRVSGLMMANHTSISSLFERTCRQYDKLRKREAFLEQFRKEDMFKDNFDEMDTSREIVQQLIDEYHAATRPDYISWGTQEQ

SEQ ID NO: 549 - DNA, 4336 bp, Homo sapien
ggcgggtcccgcggcgaggcagctcctgggcataagctgtggccatgactactgaagtaggctctgtgtctgaagtgaagaaggactctagccagttaggaacagatgcaaccaaggaaaaacctaaagaagtagcagaaaatcagcagaatcagtcttccgatccagaggaggaaaaaggttcccagccacctcctgcagctgaaagccaaagtagtctacgccgccagaagagagagaaggaaacatcggagagcaggggtatttctcggttcataccgccatggcttaagaagcaaaagtcatataccttagtagtggccaaagatggaggagataaaaaagagcctacccaagctgttgttgaagaacaggtcttagataaagaggaaccccttccagaagaacagagacaggctaagggtgatgctgaagaaatggctcagaagaaacaagagattaaagttgaagtcaaggaagaaaaaccctcagtgagcaaggaagaaaaaccctcagtgagcaaagtggagatgcagcctactgaattagtaagtaaggagagagaagagaaggtaaaagaaacacaggaagacaaattagaaggaggagcagcaaaaagggagaccaaggaagtgcagaccaatgagctgaaagcagagaaggcatctcaaaaagtcaccaagaagaccaaaactgtccagtgtaaagtgaccctcttagatggcaccgaatacagctgtgacctggagaaacatgccaagggacaagtgttatttgacaaagtgtgtgaacacctcaatctcttggagaaagactactttggacttttgtttcaggaaagccctgagcagaaaaactggttagatcctgctaaagaaataaagagacaactgagaaaccttccatggctattcacttttaatgtgaagttttatcctcctgatccttctcaattgactgaagatatcaccagatacttcttgtgccttcagctccggcaggacattgcctctggccgcctgccctgctcttttgtgactcatgctctcctgggatcctacaccctgcaggctgaacttggtgactatgacccagaagaacatggcagcatcgacctcagtgaattccagtttgcccctactcagactaaggagctggaagagaaggtggcagagctgcacaaaacccacaggggcttatcgccagcacaagctgattcccagttcttagaaaatgcaaagaggctttccatgtatggtgttgacctacatcatgccaaggactcagaaggtgtggacatcaagctgggcgtgtgtgctaatggacttctcatttacaaagacagactgcgaatcaatcgttttgcttggccgaaaatcttaaaaatttcctataaacgcagtaacttctacattaaagtcagaccggcagagctggaacagtttgagagtaccattggattcaaactgccaaaccaccgggcagcgaaaagactatggaaagtgtgcgtggagcatcatactttctacaggcttgtttctccagagcagccaccaaaagccaagttcctgaccttggggtccaaatttcgctatagtggccgcacccaagcacagacccgccaggccagcaccctcatagataggccagcaccacactttgagcgcacttctagtaaacgggtctccaggagtctagatggagctccgattggtgtcatggaccaaagtcttatgaaggattttcctggcgctgctggggagatttcagcctatggacctggacttgtcagcattgccgtggtacaagatggggacggcaggagggaagtgagaagcccaactaaagccccacatttgcagctcattgaaggaaagaaaaattccttgagagtagaaggggataatatttatgtcagacatagcaatttaatgttggaggaactggataaggcccaggaggacatactgaaacatcaggctagcattagtgaactcaagcgcaattttatggaatccacacctgagccgcgccctaatgaatgggaaaaacgacgtatcacacctctgtccctacagacacaagggagttcacatgagactctgaatatagtggaggagaagaagcgggcagaggttgggaaagacgaaagagtaatcacagaagaaatgaatggtaaagagatatcacctgggagtggtcctggggagattcgtaaggtggagcctgtgacacaaaaagactccacctccctgtcttctgagagcagcagcagcagcagtgagagtgaggaggaagacgtgggagagtaccgtccccaccaccgagtgaccgagggcaccatcagggaggaacaggagtatgaagaagaggtggaggaagaaccccgcccggcagccaaggtagtagagagggaggaagcagtgcccgaagccagcccagtcacacaagcaggtgccagtgtaatcacagtagaaacagtgatccaggaaaatgtaggtgcccaaaagatacccggagagaagagtgtacacgaaggcgctcttaagcaagacatgggagaagaagcagaggaagagccacagaaagttaacggagaggtgtcccatgttgacattgatgttttgccacaaattatttgttgttcagagccaccagtggtaaaaacagagatggtaacaatttctgatgcctcacaaaggacagaaatctccaccaaggaagtccccattgtccaaactgagaccaaaaccatcacatatgagtctccacagattgatggcggggctggtggtgattcgggcacgttactgaccgcacaaaccatcacatctgagtccgtgtcaacaacgacaaccacacacatcaccaagactgtaaaaggtggaatttctgaaacaagaattgagaaacgcattgtgatcacaggagatggagatattgatcatgaccaggcactggctcaggcgatcagggaagccagagagcagcaccctgacatgtcggtcacaagagtggtggtacacaaagaaacagagttggctgaggaaggggaagattaagtaagaaagtcattttttaaacaacactcaactttgtgaacccctgaagattttttgaccgttccaagtcttaatgccacaccactattccagcgaatttatgctacaactggtaacaatgaccagaagcctgaagaattaaaatgccaacaccaaacctttccttaccagctctggtctatattgctcccatgcatttaatatattattttgttttataaccacttctaaatattctcagttctttctttttgttgttgttaattaaggggttttggttttgttttctgtttactttgtgtgcaactacctgcttttaatgactcactttgatcaaatgacagtgaacaaagccagcccaagctggtaaggtgctgttcacttgaacaggtgctgttgcgcagaaaggaaactctgtgactaatttagatagtggctttccttcttctggattcttttcattgaattctcacagtaaatatttacggagttttcaaattgcagcaaatatactgtatgagaaaatattaatacagattaaaagcctttcttacatcttgaaaattttctaatatttgagaatttcacagggatgttttttatattgggacccttttgactttccagtcctgtgactttctacttttagtagagagtcagaatctctggactggagaataatgaagaagttcactgactgtgcactgtgcttagagaccctgccgcaccacagtgccaatgcttgtcagacacatgcccttcggcagcattccagaacaggagggaagagaaagagaaaactttcttccctctactaaaagattcaggcagcttaaaaccttagtgctttctttcttaacatacccaaatttcaattctttccattatttgaacacttgggtagaactcttgctttgtattaaacctctttgtctacacatgtaaaacttaccttttgttattgagcaggcctatctctttcagatagttttatgattcacacaggtttgaggatgctggggagagggggagggggctgtggtggtgttctgttggttacaagaaagttataccatttaaagctggcaccagagacccgatagggacttattaactatattgaacattttttcctttgcctttgaccctatgtatagttacgatgccagattagatttatagcagcctcaagttgtattaaatgatattttgcttcctgtaatactattataaaataaagtttgtttattctctaaaaaaaaaaaaaaaaaaaa

SEQ ID NO: 550 - protein, 1005 aa, Homo sapien
MTTEVGSVSEVKKDSSQLGTDATKEKPKEVAENQQNQSSDPEEEKGSQPPPAAESQSSLRRQKREKETSESRGISRFIPPWLKKQKSYTLVVAKDGGDKKEPTQAVVEEQVLDKEEPLPEEQRQAKGDAEEMAQKKQEIKVEVKEEKPSVSKEEKPSVSKVEMQPTELVSKEREEKVKETQEDKLEGGAAKRETKEVQTNELKAEKASQKVTKKTKTVQCKVTLLDGTEYSCDLEKHAKGQVLFDKVCEHLNLLEKDYFGLLFQESPEQKNWLDPAKEIKRQLRNLPWLFTFNVKFYPPDPSQLTEDITRYFLCLQLRQDIASGRLPCSFVTHALLGSYTLQAELGDYDPEEHGSIDLSEFQFAPTQTKELEEKVAELHKTHRGLSPAQADSQFLENAKRLSMYGVDLHHAKDSEGVDIKLGVCANGLLIYKDRLRINRFAWPKILKISYKRSNFYIKVRPAELEQFESTIGFKLPNHRAAKRLWKVCVEHHTFYRLVSPEQPPKAKFLTLGSKFRYSGRTQAQTRQASTLIDRPAPHFERTSSKRVSRSLDGAPIGVMDQSLMKDFPGAAGEISAYGPGLVSIAVVQDGDGRREVRSPTKAPHLQLIEGKKNSLRVEGDNIYVRHSNLMLEELDKAQEDILKHQASISELKRNFMESTPEPRPNEWEKRRITPLSLQTQGSSHETLNIVEEKKRAEVGKDERVITEEMNGKEISPGSGPGEIRKVEPVTQKDSTSLSSESSSSSSESEEEDVGEYRPHHRVTEGTIREEQEYEEEVEEEPRPAAKVVEREEAVPEASPVTQAGASVITVETVIQENVGAQKIPGEKSVHEGALKQDMGEEAEEEPQKVNGEVSHVDIDVLPQIICCSEPPVVKTEMVTISDASQRTEISTKEVPIVQTETKTITYESPQIDGGAGGDSGTLLTAQTITSESVSTTTTTHITKTVKGGISETRIEKRIVITGDGDIDHDQALAQAIREAREQHPDMSVTRVVVHKETELAEEGED

SEQ ID NO: 551 - DNA, 2232 bp, Homo sapien
cttccccttctctgccctgctccaggcaccaggctctttccccttcagtgtctcagaggaggggacggcagcaccatggacccccgcttgtccactgtccgccagacctgctgctgcttcaatgtccgcatcgcaaccaccgccctggccatctaccatgtgatcatgagcgtcttgttgttcatcgagcactcagtagaggtggcccatggcaaggcgtcctgcaagctctcccagatgggctacctcaggatcgctgacctgatctccagcttcctgctcatcaccatgctcttcatcatcagcctgagcctactgatcggcgtagtcaagaaccgggagaagtacctgctgcccttcctgtccctgcaaatcatggactatctcctgtgcctgctcaccctgctgggctcctacattgagctgcccgcctacctcaagttggcctcccggagccgtgctagctcctccaagttccccctgatgacgctgcagctgctggacttctgcctgagcatcctgaccctctgcagctcctacatggaagtgcccacctatctcaacttcaagtccatgaaccacatgaattacctccccagccaggaggatatgcctcataaccagttcatcaagatgatgatcatcttttccatcgccttcatcactgtccttatcttcaaggtctacatgttcaagtgcgtgtggcggtgctacagattgatcaagtgcatgaactcggtggaggagaagagaaactccaagatgctccagaaggtggtcctgccgtcctacgaggaagccctgtctttgccatcgaagaccccagaggggggcccagcaccacccccatactcagaggtgtgaccctcgccaggccccagccccagtgctgggaggggtggagctgcctcataatctgcttttttgctttggtggcccctgtggcctgggtgggccctcccgcccctccctggcaggacaatctgcttgtgtctccctcgctggcctgctcctcctgcagggcctgtgagctgctcacaactgggtcaacgctttaggctgagtcactcctcgggtctctccataattcagcccaacaatgcttggtttatttcaatcagctctgacacttgtttagacgattggccattctaaagttggtgagtttgtcaagcaactatcgacttgatcagttcagccaagcaactgacaaatcaaaaacccacttgtcagttcagtaaaataatttggtcaaacaacagtctattgcattgatttataaatagttgtcagttcacatagcaatttaatcaagtaatcattaattagttaccccctatatataaatatatgtaatcaatttcttcaaatagcttgcttacatgataatcaattagccaaccatgagtcatttagaatagtgataaatagaatacacagaatagtgatgaaattcaatttaaaaaatcacgttagcctccaaaccatttaattcaaatgaacccatcaactggatgccaactctggcgaatgtaggacctctgagtggctgtataattgttaattcaaatgaaattcatttaaacagttgacaaactgtcattcaacaattagctccaggaaataacagttatttcatcataaaacagtcccttcaaacacacaattgttctgctgaagagttgtcatcaacaatccaatgctcacctattcagttgctctgtggtcagtgtggctgcatagcagtggattccatgaaaggagtcattttagtgatgagctgccagtccattcccaggccaggctgtcgctggccatccattcagtcgattcagtcataggcgaatctgttctgcccgaggcttgtggtcaagcaaaaattcagccctgaaatcaggcacatctgttcgttggactaaacccacaggttagttcagtcaaagcaggcaacccccttgtgggcactgaccctgccactggggtcatggcggttgtggcagctggggaggtttggccccaacagccctcctgtgcctgcttccctgtgtgtcggggtcctccagggagctgacccagaggtggaggccacggaggcagggtctctggggactgtcggggggtacagagggagaaggctctgcaagagctccctggcaatacccccttgtgtaattgctttgtgtgcgacagggaggaagtttcaataaagcaacaacaagcttcaaggaattc

SEQ ID NO: 552 - protein, 262 aa, Homo sapien
MDPRLSTVRQTCCCFNVRIATTALAIYHVIMSVLLFIEHSVEVAHGKASCKLSQMGYLRIADLISSFLLITMLFIISLSLLIGVVKNREKYLLPFLSLQIMDYLLCLLTLLGSYIELPAYLKLASRSRASSSKFPLMTLQLLDFCLSILTLCSSYMEVPTYLNFKSMNHMNYLPSQEDMPHNQFIKMMIIFSIAFITVLIFKVYMFKCVWRCYRLIKCMNSVEEKRNSKMLQKVVLPSYEEALSLPSKTPEGGPAPPPYSEV

SEQ ID NO: 553 - DNA, 2232 bp, Homo sapien; identical to SEQ ID NO: 551

SEQ ID NO: 554 - protein, 262 aa, Homo sapien; identical to SEQ ID NO: 552

SEQ ID NO: 555 - DNA, 2369 bp, Homo sapien
cggacgcgtgggccgtcgccgccaccgccgccaccgctaccgaggccgagcggagccgttagcgccgcgccgccgccgcctcccgcccgccccggagcagccccgggcccgcccgcccgcatccagatttttgaaaaatacaatgtctaatggttatgaagaccacatggccgaagactgcaggggtgacatcgggagaacgaatttgatcgtcaactacctccctcagaacatgacccaggatgagttacgaagcctgttcagcagcattggtgaagttgaatctgcaaaacttattcgggataaagtagcaggacacagcttgggctatggctttgtgaactacgtgaccgcgaaggatgcagagagagcgatcaacacgctgaacggcttgaggctccagtcaaaaaccattaaggtgtcgtatgctcgcccgagctcagaggtgatcaaagacgccaacttgtacatcagcgggctcccgcggaccatgacccagaaggacgtagaagacatgttctctcggtttgggcggatcatcaactcgcgggtcctcgtggatcagactacaggtttgtccagaggggttgcgtttatccggtttgacaaacggtcggaggcagaagaggcaattaccagtttcaatggtcataaacccccaggttcctctgagcccatcacagtgaagtttgcagccaaccccaaccagaacaaaaacgtggcactcctctcgcagctgtaccactcgccagcgcgacggttcggaggccccgttcaccaccaggcgcagagattcaggttctcccccatgggcgtcgatcacatgagcgggctctctggcgtcaacgtgccaggaaacgcctcctccggctggtgcattttcatctacaacctggggcaggatgccgacgaggggatcctctggcagatgtttgggccgtttggtgccgtcaccaatgtgaaagtgatccgcgacttcaacaccaacaagtgcaaagggtttggctttgtgaccatgacaaactatgaagaagccgcgatggccatagccagcctgaacggctaccgcctgggggacaaaatcttacaggtttccttcaaaaccaacaagtcccacaaataactcgctcatgcttttttttgtacggaatagataattaagagtgaaggagttgaaacttttcttgttagtgtacaactcattttgcgccaattttcacaagtgtttgtctttgtctgaatgagaagtgagaaggtttttatactctgggatgcaaccgacatgttcaaatgtttgaaatcccacaatgttagaccaatcttaagtttcgtaagttatttcctttaagatatatattaaacagaaatctaagtagaactgcattgactaaccagtccctctggatggtggtgaacctgaagcatgctttaacctctaagactgtctaacacgcgtttcattcaatgtctccacagactgggtagcaaaaaaatcaccttttagttttagtttttaatctaaagatgttagacagatgctgagtgtgcgttttctcaaccgcttcaacattgtaagcgatgtatgctttggttgacaggaagttccttttccaggcaggtcccgttgccacctcctgctcactcagtcccgggctctgccgagtggtcctgggaatggcggcgggcccgtccagcgtgggccaccactggggccgggggccacgggctgcatgctgggcgggccctccagagaaggacacaaacgtgtttcgtaagcccaggcaccaatgggaatggaccaaagagtttcagggaaactccagtatattccagagtcagatctaagctccaggcacgcctgaagatgtgttgctactctgacatcccgagtttctgtccacacattgcatgcacagcgccccacacattggatactgttgttcacgataatttctcccgttttccagagcatttaacatagcttggaggcgtaaaatggctctgtattttaataacacagaaacatttgagcattgtatttctcgcatcccttctcgtgagcgcttagacctttttctattttagtcggattttgttttggaattttgcttttgtatgaacactcagcagaaaagtacttacttcttgccagttatctattaaccaaaacctttgatttgtagttttaaagattaaccctcaaagttctcttcataactgccttgacattttgggttgttctgttctgttaattttcttttgcttttttgtgttttttgtttgtttttacttttgcatttaagaccattaaatttgattttgttttgctcgaaaaaaaaaaaaaaaaaaaaaaaaaaaaaaaaaaaaaa

SEQ ID NO: 556 - protein, 326 aa, Homo sapien
MSNGYEDHMAEDCRGDIGRTNLIVNYLPQNMTQDELRSLFSSIGEVESAKLIRDKVAGHSLGYGFVNYVTAKDAERAINTLNGLRLQSKTIKVSYARPSSEVIKDANLYISGLPRTMTQKDVEDMFSRFGRIINSRVLVDQTTGLSRGVAFIRFDKRSEAEEAITSFNGHKPPGSSEPITVKFAANPNQNKNVALLSQLYHSPARRFGGPVHHQAQRFRFSPMGVDHMSGLSGVNVPGNASSGWCIFIYNLGQDADEGILWQMFGPFGAVTNVKVIRDFNTNKCKGFGFVTMTNYEEAAMAIASLNGYRLGDKILQVSFKTNKSHK

SEQ ID NO: 557 - DNA, 2370 bp, Homo sapien
cacgagggagcgctaacgtctttctgtctccccgcggtggtgatgacggtgaaaactgaggctgctaagggcaccctcacttactccaggatgaggggcatggtggcaattctcatcgctttcatgaagcagaggaggatgggtctgaacgactttattcagaagattgccaataactcctatgcatgcaaacaccctgaagttcagtccatcttgaagatctcccaacctcaggagcctgagcttatgaatgccaacccttctcctccaccaagtccttctcagcaaatcaaccttggcccgtcgtccaatcctcatgctaaaccatctgactttcacttcttgaaagtgatcggaaagggcagttttggaaaggttcttctagcaagacacaaggcagaagaagtgttctatgcagtcaaagttttacagaagaaagcaatcctgaaaaagaaagaggagaagcatattatgtcggagcggaatgttctgttgaagaatgtgaagcaccctttcctggtgggccttcacttctctttccagactgctgacaaattgtactttgtcctagactacattaatggtggagagttgttctaccatctccagagggaacgctgcttcctggaaccacgggctcgtttctatgctgctgaaatagccagtgccttgggctacctgcattcactgaacatcgtttatagagacttaaaaccagagaatattttgctagattcacagggacacattgtccttactgatttcggactctgcaaggagaacattgaacacaacagcacaacatccaccttctgtggcacgccggagtatctcgcacctgaggtgcttcataagcagccttatgacaggactgtggactggtggtgcctgggagctgtcttgtatgagatgctgtatggcctgccgcctttttatagccgaaacacagctgaaatgtacgacaacattctgaacaagcctctccagctgaaaccaaatattacaaattccgcaagacacctcctggagggcctcctgcagaaggacaggacaaagcggctcggggccaaggatgacttcatggagattaagagtcatgtcttcttctccttaattaactgggatgatctcattaataagaagattactcccccttttaacccaaatgtgagtgggcccaacgagctacggcactttgaccccgagtttaccgaagagcctgtccccaactccattggcaagtcccctgacagcgtcctcgtcacagccagcgtcaaggaagctgccgaggctttcctaggcttttcctatgcgcctcccacggactctttcctctgaaccctgttagggcttggttttaaaggattttatgtgtgtttccgaatgttttagttagccttttggtggagccgccagctgacaggacatcttacaagagaatttgcacatctctggaagcttagcaatcttattgcacactgttcgctggaattttttgaagagcacattctcctcagtgagctcatgaggttttcatttttattcttccttccaacgtggtgctatctctgaaacgagcgttagagtgccgccttagacggaggcaggagtttcgttagaaagcggacctgttctaaaaaaggtctcctgcagatctgtctgggctgtgatgacgaatattatgaaatgtgccttttctgaagagattgtgttagctccaaagcttttcctatcgcagtgtttcagttctttattttcccttgtggatatgctgtgtgaaccgtcgtgtgagtgtggtatgcctgatcacagatggattttgttataagcatcaatgtgacacttgcaggacactacaacgtgggacattgtttgtttcttccatatttggaagataaatttatgtgtagacttttttgtaagatacggttaataactaaaatttattgaaatggtcttgcaatgactcgtattcagatgcctaaagaaagcattgctgctacaaatatttctatttttagaaagggtttttatggaccaatgccccagttgtcagtcagagccgttggtgtttttcattgtttaaaatgtcacctgtaaaatgggcattatttatgtttttttttttgcattcctgataattgtatgtattgtataaagaacgtctgtacattgggttataacactagtatatttaaacttacaggcttatttgtaatgtaaaccaccattttaatgtactgtaattaacatggttataatacgtacaatccttccctcatcccatcacacaactttttttgtgtgtgataaactgattttggtttgcaataaaaccttgaaaaataaaaaaaaaaaaaaaaaaaaaaa

SEQ ID NO: 558 - protein, 431 aa, Homo sapien [sequence omitted]

SEQ ID NO: 559 - DNA, 2708 bp, Homo sapien
ggcctgttctcgagtccgcgcttttcgtcaccgccatgtcgggaggtggtgtgattcgtggccccgcagggaacaacgattgccgcatctacgtgggtaacttacctccagacatccgaaccaaggacattgaggacgtgttctacaaatacggcgctatccgcgacatcgacctcaagaatcgccgcgggggaccgcccttcgccttcgttgagttcgaggacccgcgagacgcggaagacgcggtgtatggtcgcgacggctatgattacgatgggtaccgtctgcgggtggagtttcctcgaagcggccgtggaacaggccgaggcggcggcgggggtggaggtggcggagctccccgaggtcgctatggccccccatccaggcggtctgaaaacagagtggttgtctctggactgcctccaagtggaagttggcaggatttaaaggatcacatgcgtgaagcaggtgatgtatgttatgctgatgtttaccgagatggcactggtgtcgtggagtttgtacggaaagaagatatgacctatgcagttcgaaaactggataacactaagtttagatctcatgagggagaaactgcctacatccgggttaaagttgatgggcccagaagtccaagttatggaagatctcgatctcgaagccgtagtcgtagcagaagccgtagcagaagcaacagcaggagtcgcagttactccccaaggagaagcagaggatcaccacgctattctccccgtcatagcagatctcgctctcgtacataagatgattggtgacactttttgtagaacccatgttgtatacagttttcctttattcagtacaatcttttcattttttaattcaaactgttttgttcagaatgggctaaagtgttgaattgcattcttgtaatatccccttgctcctaacatctacattcccttcgtgtctttgataaattgtattttaagtgatgtcatagacaggattgtttaaatttagttaactccatactcttcagactgtgatattgtgtaaatgtctatctgccctggtttgtgtgaactgggatgttgggggtgtttgtggttatcttacctggggaagttcttatgtttatcttgcttttcatgtgtctttctgtagacatatctgaagagatggattaagaatgctttggattaaggattgtggagcacatttcaatcattttaggattgtcaaaaggaggattgaggaggatcagatcaataatggaggcaatggtatgactccaagtgctattgtcacagatgaaattggcagtattgaccttatactaaaaggcaggggttaaaaatgattatatacattttccttaaaacacttgcaaacattttattcagttgtctttagctacaattgctttgctttttaaaccttggcaattgtggcaaaattatattgcccattttgtagcaacttattttgctcccttccccccatttttgttttaatagggactaatgtgggaagaactggctaatttgtcacagtgcttagttacaactgttaatgtgtgacctgctgttggtgtacatgtgggtacagggtgtttttaaatccaacaagatagagtataatatcaatactgctaaatctgcatgtcctctgtgtgactgatagagcgttgctatttcatttttttaagacaaaatgaaagcaaaatatagagttccaatgtattggtgtagataatctagttgggaatacttttaagtctcaccttcccctttaaactaatattcataattggttcatatgtttaaaagactttaatttacaaattaaattgcaaatgggagcattagatttagttttagacttaggtgggtagcaatgccagtaaacttaaattacgtaacttcttgcaaccacgaaacctgtaatacgctgtacagtaacaagtgttggcattatcagttgaactgtaaatacaaaatgcttcttccaattagtctctatgatgattaagtttctaaaatttatctgaacaccattcagaaacttgttttggggaatttgatagttattgatgtgcatctgttaaactgatgacagacataactcatcattccccagaaaccttttttgattacagtatctaacattttgcctcctcttttttggttttgctggttataaaggtttggattggagagggctcactggatcccaatccttggagctggatcattggattcaaatcataatgtggataggatagggaggatgaattaccaggattcatggagcgggatcagattaccaggaacataggagtggattcctgccccaaccaaaccgcattcgtgtggatttttttattcaacttaattggctattccaaagattttttttttcctatttttgacgattggagcccttaagatgcacgatggaattgtgttttgcgttttttggtaaaaggagcaaagcgaggacctggagataaacgctggagcaatctccttggaaggattcagcacgagtagatggtaaacatttaaaggggaaagggggggtttgtttaaaatagtaaatcagtaagtcacttctaaatttaaagaaaacaaaattggagttgaagaataagtaggtttccaattggctattgccgttttctttgaaaaaataaacattttttaaaaaacaaaaaaaaaaaaaaa

SEQ ID NO: 560 - protein, 248 aa, Homo sapien
MSGGGVIRGPAGNNDCRIYVGNLPPDIRTKDIEDVFYKYGAIRDIDLKNRRGGPPFAFVEFEDPRDAEDAVYGRDGYDYDGYRLRVEFPRSGRGTGRGGGGGGGGGAPRGRYGPPSRRSENRVVVSGLPPSGSWQDLKDHMREAGDVCYADVYRDGTGVVEFVRKEDMTYAVRKLDNTKFRSHEGETAYIRVKVDGPRSPSYGRSRSRSRSRSRSRSRSNSRSRSYSPRRSRGSPRYSPRHSRSRSRT

SEQ ID NO: 561 - DNA, 2864 bp, Homo sapien
agataacaagagtaatccacagacttaaaacatgagctcagatgccagccaaggcgtgattaccactcctcctcctcccagcatgcctcacaaagagagatattttgaccgcatcaatgaaaatgacccagaatacattagggagaggaacatgtctcctgatctacgacaagacttcaacatgatggagcagaggaaacgagttactcagatcctgcaaagtcctgcctttcgggaagacttggaatgccttattcaagaacagatgaagaaaggccacaacccaactggattactagcattacagcagattgcagattacatcatggccaattctttctcgggtttttcttcacctcctctcagtcttggcatggtcacacctatcaatgaccttcctggtgcagatacatcctcatatgtgaagggagaaaaacttactcgctgtaaacttgccagcctgtacagacttgtagacttgtttggatgggcacacctggcaaatacctatatctcagtaagaataagtaaggagcaagaccacattataataattcccagaggcctatctttttctgaagctacagcctccaatttggtgaaagtcaatataataggagaagtggttgaccagggaagtaccaatttgaaaattgaccatacaggattcagtccccatgctgcaatctattcaacacgtcctgatgttaagtgtgtcatacacatccatacccttgcaacagcagctgtatcctccatgaaatgtgggatccttccaatttctcaagagtctcttcttctgggagatgttgcctattatgactaccaagggtcacttgaagaacaggaggagagaattcaactgcagaaggttctgggaccaagttgtaaggtgctggtactcaggaatcatggtgtggttgcacttggagaaacattagaggaggcttttcattatatttttaatgtgcaactagcctgtgagattcaggtgcaggccctagcaggtgcaggtggagtagacaatctccatgtactggactttcagaagtataaagctttcacttacactgtagcagcgtctggtggaggaggtgtgaatatgggttcccatcaaaaatggaaggttggcgaaattgagtttgaagggcttatgaggactctggacaacttggggtatagaacaggctatgcttacaggcatcctctcattcgagagaagcctaggcacaagagtgatgtggaaatcccagcaactgtgactgctttttcctttgaagacgatacagtgccactctctcctctcaaatacatggcacagaggcaacagcgtgaaaaaacaagatggctgaactcaccaaatacttacatgaaagtgaatgtgcctgaggagtctcggaacggagaaaccagtccccgaaccaaaatcacgtggatgaaagcagaagactcatctaaagttagtggtggaacacctatcaaaattgaagatccaaatcagtttgttcctttaaacacaaacccgaatgaggtactagaaaagagaaataagattcgggaacaaaatcgatatgacttgaaaacagcaggaccacaatctcagttgcttgctggaattgttgtggataagccaccttctactatgcaatttgaagatgatgatcatggcccaccagctcctcctaacccatttagtcatctcacagaaggagaacttgaagagtataagaggacaatcgaacgtaaacaacaaggcctagaagatgctgagcaggaattactctcagatgacgcttcatctgtttcacaaattcagtctcaaactcagtcaccgcaaaatgtccctgaaaaattagaagaaaaccatgagctgttttccaagagcttcatctccatggaagtgcctgtcatggtagtaaatggcaaggatgatatgcatgatgttgaagatgagcttgctaagcgagtgagtaggttaagcacaagtacaaccatagaaaacatcgagattactattaagtctccagagaaaatcgaagaagtcctgtcacctgaaggctccccttcaaaatcgccatccaagaaaaagaagaaattccgcactccttcttttctgaaaaagaacaaaaaaaaggagaaagttgaggcctaaataaagtctttttataattattattataacaatgtgacattgcacatctaaataccacatttaagttgatcattaatatgcaatggtagatcagattgggggatgtagcaaactggactttaagaactggaaagaggttttacaaaagaaaaactttcagattcatctctcattttatatgtccagaaatggctttgaattttaagcaattactagttttaattagctctgccctcatgaagtattattataattcaccataaacagctatctgtctgaattacttcaggccttctccataatatctgttagaaagaaattgccagtgagcaagtgagaatttttatttctcaatacctgcttcacttgataatcatattataattttttatcatgattattgactatatttttggagtcccattgtttcagtgggcattaacagaatgctttaaaaacttctaagacaagaatctatagcattagtatacactggcacataattttttaaaaagttttaagaaaagattcatttggaattttattcacagtataaaatttcctcacctgaagtaactttgtttgccaaaaaagttgttttaataaactataatttttgaaaacttccttttttattagtttagaaagccccttatttttcaacaaaggggattttgtacacataacatgggttatttagtttaactctggc

SEQ ID NO: 562 - protein, 706 aa, Homo sapien
MSSDASQGVITTPPPPSMPHKERYFDRINENDPEYIRERNMSPDLRQDFNMMEQRKRVTQILQSPAFREDLECLIQEQMKKGHNPTGLLALQQIADYIMANSFSGFSSPPLSLGMVTPINDLPGADTSSYVKGEKLTRCKLASLYRLVDLFGWAHLANTYISVRISKEQDHIIIIPRGLSFSEATASNLVKVNIIGEVVDQGSTNLKIDHTGFSPHAAIYSTRPDVKCVIHIHTLATAAVSSMKCGILPISQESLLLGDVAYYDYQGSLEEQEERIQLQKVLGPSCKVLVLRNHGVVALGETLEEAFHYIFNVQLACEIQVQALAGAGGVDNLHVLDFQKYKAFTYTVAASGGGGVNMGSHQKWKVGEIEFEGLMRTLDNLGYRTGYAYRHPLIREKPRHKSDVEIPATVTAFSFEDDTVPLSPLKYMAQRQQREKTRWLNSPNTYMKVNVPEESRNGETSPRTKITWMKAEDSSKVSGGTPIKIEDPNQFVPLNTNPNEVLEKRNKIREQNRYDLKTAGPQSQLLAGIVVDKPPSTMQFEDDDHGPPAPPNPFSHLTEGELEEYKRTIERKQQGLEDAEQELLSDDASSVSQIQSQTQSPQNVPEKLEENHELFSKSFISMEVPVMVVNGKDDMHDVEDELAKRVSRLSTSTTIENIEITIKSPEKIEEVLSPEGSPSKSPSKKKKKFRTPSFLKKNKKKEKVEA

SEQ ID NO: 563 - DNA, 2768 bp, Homo sapien
agataacaagagtaatccacagacttaaaacatgagctcagatgccagccaaggcgtgattaccactcctcctcctcccagcatgcctcacaaagagagatattttgaccgcatcaatgaaaatgacccagaatacattagggagaggaacatgtctcctgatctacgacaagacttcaacatgatggagcagaggaaacgagttactcagatcctgcaaagtcctgcctttcgggaagacttggaatgccttattcaagaacagatgaagaaaggccacaacccaactggattactagcattacagcagattgcagattacatcatggccaattctttctcgggtttttcttcacctcctctcagtcttggcatggtcacacctatcaatgaccttcctggtgcagatacatcctcatatgtgaagggagaaaaacttactcgctgtaaacttgccagcctgtacagacttgtagacttgtttggatgggcacacctggcaaatacctatatctcagtaagaataagtaaggagcaagaccacattataataattcccagaggcctatctttttctgaagctacagcctccaatttggtgaaagtcaatataataggagaagtggttgaccagggaagtaccaatttgaaaattgaccatacaggattcagtccccatgctgcaatctattcaacacgtcctgatgttaagtgtgtcatacacatccatacccttgcaacagcagctgtatcctccatgaaatgtgggatccttccaatttctcaagagtctcttcttctgggagatgttgcctattatgactaccaagggtcacttgaagaacaggaggagagaattcaactgcagaaggttctgggaccaagttgtaaggtgctggtactcaggaatcatggtgtggttgcacttggagaaacattagaggaggcttttcattatatttttaatgtgcaactagcctgtgagattcaggtgcaggccctagcaggtgcaggtggagtagacaatctccatgtactggactttcagaagtataaagctttcacttacactgtagcagcgtctggtggaggaggtgtgaatatgggttcccatcaaaaatggaaggttggcgaaattgagtttgaagggcttatgaggactctggacaacttggggtatagaacaggctatgcttacaggcatcctctcattcgagagaagcctaggcacaagagtgatgtggaaatcccagcaactgtgactgctttttcctttgaagacgatacagtgccactctctcctctcaaatacatggcacagaggcaacagcgtgaaaaaacaagatggctgaactcaccaaatacttacatgaaagtgaatgtgcctgaggagtctcggaacggagaaaccagtccccgaaccaaaatcacgtggatgaaagcagaagactcatctaaagttagtggtggaacacctatcaaaattgaagatccaaatcagtttgttcctttaaacacaaacccgaatgaggtactagaaaagagaaataagattcgggaacaaaatcgatatgacttgaaaacagcaggaccacaatctcagttgcttgctggaattgttgtggataagccaccttctactatgcaatttgaagatgatgatcatggcccaccagctcctcctaacccatttagtcatctcacagaaggagaacttgaagagtataagaggacaatcgaacgtaaacaacaaggcctagaagaaaaccatgagctgttttccaagagcttcatctccatggaagtgcctgtcatggtagtaaatggcaaggatgatatgcatgatgttgaagatgagcttgctaagcgagtgagtaggttaagcacaagtacaaccatagaaaacatcgagattactattaagtctccagagaaaatcgaagaagtcctgtcacctgaaggctccccttcaaaatcgccatccaagaaaaagaagaaattccgcactccttcttttctgaaaaagaacaaaaaaaaggagaaagttgaggcctaaataaagtctttttataattattattataacaatgtgacattgcacatctaaataccacatttaagttgatcattaatatgcaatggtagatcagattgggggatgtagcaaactggactttaagaactggaaagaggttttacaaaagaaaaactttcagattcatctctcattttatatgtccagaaatggctttgaattttaagcaattactagttttaattagctctgccctcatgaagtattattataattcaccataaacagctatctgtctgaattacttcaggccttctccataatatctgttagaaagaaattgccagtgagcaagtgagaatttttatttctcaatacctgcttcacttgataatcatattataattttttatcatgattattgactatatttttggagtcccattgtttcagtgggcattaacagaatgctttaaaaacttctaagacaagaatctatagcattagtatacactggcacataattttttaaaaagttttaagaaaagattcatttggaattttattcacagtataaaatttcctcacctgaagtaactttgtttgccaaaaaagttgttttaataaactataatttttgaaaacttccttttttattagtttagaaagccccttatttttcaacaaaggggattttgtacacataacatgggttatttagtttaactctggc

SEQ ID NO: 564 - protein, 674 aa, Homo sapien
MSSDASQGVITTPPPPSMPHKERYFDRINENDPEYIRERNMSPDLRQDFNMMEQRKRVTQILQSPAFREDLECLIQEQMKKGHNPTGLLALQQIADYIMANSFSGFSSPPLSLGMVTPINDLPGADTSSYVKGEKLTRCKLASLYRLVDLFGWAHLANTYISVRISKEQDHIIIIPRGLSFSEATASNLVKVNIIGEVVDQGSTNLKIDHTGFSPHAAIYSTRPDVKCVIHIHTLATAAVSSMKCGILPISQESLLLGDVAYYDYQGSLEEQEERIQLQKVLGPSCKVLVLRNHGVVALGETLEEAFHYIFNVQLACEIQVQALAGAGGVDNLHVLDFQKYKAFTYTVAASGGGGVNMGSHQKWKVGEIEFEGLMRTLDNLGYRTGYAYRHPLIREKPRHKSDVEIPATVTAFSFEDDTVPLSPLKYMAQRQQREKTRWLNSPNTYMKVNVPEESRNGETSPRTKITWMKAEDSSKVSGGTPIKIEDPNQFVPLNTNPNEVLEKRNKIREQNRYDLKTAGPQSQLLAGIVVDKPPSTMQFEDDDHGPPAPPNPFSHLTEGELEEYKRTIERKQQGLEENHELFSKSFISMEVPVMVVNGKDDMHDVEDELAKRVSRLSTSTTIENIEITIKSPEKIEEVLSPEGSPSKSPSKKKKKFRTPSFLKKNKKKEKVEA

SEQ ID NO: 565 - DNA, 2525 bp, Homo sapien
ttttcccgcgaaactcggcggctgagcgtggaggttcttgtctcccctggtttgtgaagtgcggaaaaccagaggcgcagtcatgtcgggattcgacgatcctggcattttctacagcgacagcttcgggggcgacgcccaggccgacgaggggcaggcccgcaaatcgcagctgcagaggcgcttcaaggagttcctgcggcagtaccgagtgggcaccgaccgcacgggcttcaccttcaaatacagggatgaactcaagcggcattacaacctgggggagtactggattgaggtggagatggaggatctggccagctttgatgaggacctggccgactacttgtacaagcagccagccgagcacctgcagctgctggaggaagctgccaaggaggtagctgatgaggtgacccggccccggccttctggggaggaggtgctccaggacatccaggtcatgctcaagtcggacgccagcccttccagcattcgtagcctgaagtcggacatgatgtcacacctggtgaagatccctggcatcatcatcgcggcctctgcggtccgtgccaaggccacccgcatctctatccagtgccgcagctgccgcaacaccctcaccaacattgccatgcgccctggcctcgagggctatgccctgcccaggaagtgcaacacagatcaggctggacgccccaaatgcccattggacccgtacttcatcatgcccgacaaatgcaaatgcgtggacttccagaccctgaagctgcaggagctgcctgatgcagtcccccacggggagatgcccagacacatgcagctctactgcgacaggtacctgtgtgacaaggtcgtccctgggaacagggttaccatcatgggcatctactccatcaagaagtttggcctgactaccagcaggggccgtgacagggtgggcgtgggcatccgaagctcctacatccgtgtcctgggcatccaggtggacacagatggctctggccgcagctttgctggggccgtgagcccccaggaggaggaggagttccgtcgcctggctgccctcccaaatgtctatgaggtcatctccaagagcatcgccccctccatctttgggggcacagacatgaagaaggccattgcctgcctgctctttgggggctcccgaaagaggctccctgatggacttactcgccgaggagacatcaacctgctgatgctaggggaccctgggacagccaagtcccagcttctgaagtttgtggagaagtgttctcccattggggtatacacgtctgggaaaggcagcagcgcagctggactgacagcctcggtgatgagggacccttcgtcccggaatttcatcatggagggcggagccatggtcctggccgatggtggggtcgtctgtattgacgagtttgacaagatgcgagaagatgaccgtgtggcaatccacgaagccatggagcagcagaccatctctatcgccaaggctgggatcaccaccaccctgaactcccgctgctccgtcctggctgctgccaactcagtgttcggccgctgggatgagacgaagggggaggacaacattgacttcatgcccaccatcttgtcgcgcttcgacatgatcttcatcgtcaaggatgagcacaatgaggtgagggatgtgatgctggccaagcatgtcatcactctgcacgtgagtgcactgacacagacacaggctgtggagggcgagattgacctggccaagctgaagaagtttattgcctactgccgagtgaagtgtggcccccggctgtcagcagaggctgcagagaaactgaagaaccgctacatcatcatgcggacggggcccgtcagcacgagagggacagtgaccgcgtccagcatccccatcactgtgcggcagttggaggccattgtgcgcatcgcggaagccctcagcaagatgaagctgcagcccttcgccacagaggcagatgtggaggaggccctgcggctcttccaagtgtccacgttggatgctgccttgtccggtaccctgtcaggggtggagggcttcaccagccaggaggaccaggagatgctgagccgcatcgagaagcagctcaagcgccgctttgccattggctcccaggtgtctgagcacagcatcatcaaggacttcaccaagcagaaatacccggagcacgccatccacaaggtgctgcagctcatgctgcggcgcggcgagatccagcatcgcatgcagcgcaaggttctctaccgcctcaagtgagtcgcgccgctcactggactcatggactcgccacgctcgccctccttgccgctgcctgccattgacaatgttgctgggacctctgcctccccactgcagccctcgaacttcccaggcaccctcctttctgccccagaggaaggagctgtagtgtcctgctgcctctgggcgcccgctctagcgggttctgggaagtgtgcttttggcatccgttaataataaagccacggtgtgttcaggt

SEQ ID NO: 566 - protein, 733 aa, Homo sapien
MSGFDDPGIFYSDSFGGDAQADEGQARKSQLQRRFKEFLRQYRVGTDRTGFTFKYRDELKRHYNLGEYWIEVEMEDLASFDEDLADYLYKQPAEHLQLLEEAAKEVADEVTRPRPSGEEVLQDIQVMLKSDASPSSIRSLKSDMMSHLVKIPGIIIAASAVRAKATRISIQCRSCRNTLTNIAMRPGLEGYALPRKCNTDQAGRPKCPLDPYFIMPDKCKCVDFQTLKLQELPDAVPHGEMPRHMQLYCDRYLCDKVVPGNRVTIMGIYSIKKFGLTTSRGRDRVGVGIRSSYIRVLGIQVDTDGSGRSFAGAVSPQEEEEFRRLAALPNVYEVISKSIAPSIFGGTDMKKAIACLLFGGSRKRLPDGLTRRGDINLLMLGDPGTAKSQLLKFVEKCSPIGVYTSGKGSSAAGLTASVMRDPSSRNFIMEGGAMVLADGGVVCIDEFDKMREDDRVAIHEAMEQQTISIAKAGITTTLNSRCSVLAAANSVFGRWDETKGEDNIDFMPTILSRFDMIFIVKDEHNEVRDVMLAKHVITLHVSALTQTQAVEGEIDLAKLKKFIAYCRVKCGPRLSAEAAEKLKNRYIIMRTGPVSTRGTVTASSIPITVRQLEAIVRIAEALSKMKLQPFATEADVEEALRLFQVSTLDAALSGTLSGVEGFTSQEDQEMLSRIEKQLKRRFAIGSQVSEHSIIKDFTKQKYPEHAIHKVLQLMLRRGEIQHRMQRKVLYRLK

SEQ ID NO: 567 - DNA, 1550 bp, Homo sapien
gtagtggtgccgacttcctgttgtttgaggccgggttgggggtgtgcgattgtgtgggacggtctggggcagcccagcagcggctgaccctctgcctgcggggaagggagtcgccaggcggccgtcatggcggtgtcggagagccagctcaagaaaatggtgtccaagtacaaatacagagacctaactgtacgtgaaactgtcaatgttattactctatacaaagatctcaaacctgttttggattcatatgtttttaacgatggcagttccagggaactaatgaacctcactggaacaatccctgtgccttatagaggtaatacatacaatattccaatatgcctatggctactggacacatacccatataatccccctatctgttttgttaagcctactagttcaatgactattaaaacaggaaagcatgttgatgcaaatgggaagatatatcttccttatctacatgaatggaaacacccacagtcagacttgttggggcttattcaggtcatgattgtggtatttggagatgaacctccagtcttctctcgtcctatttcggcatcctatccgccataccaggcaacggggccaccaaatacttcctacatgccaggcatgccaggtggaatctctccatacccatccggataccctcccaatcccagtggttacccaggctgtccttacccacctggtggtccatatcctgccacaacaagttctcagtacccttctcagcctcctgtgaccactgttggtcccagtagggatggcacaatcagcgaggacaccatccgagcctctctcatctctgcggtcagtgacaaactgagatggcggatgaaggaggaaatggatcgtgcccaggcagagctcaatgccttgaaacgaacagaagaagacctgaaaaagggtcaccagaaactggaagagatggttacccgtttagatcaagaagtagccgaggttgataaaaacatagaacttttgaaaaagaaggatgaagaactcagttctgctctggaaaaaatggaaaatcagtctgaaaacaatgatatcgatgaagttatcattcccacagctcccttatacaaacagatcctgaatctgtatgcagaagaaaacgctattgaagacactatcttttacttgggagaagccttgagaaggggcgtgatagacctggatgtcttcctgaagcatgtacgtcttctgtcccgtaaacagttccagctgagggcactaatgcaaaaagcaagaaagactgccggtctcagtgacctctactgacttctctgataccagctggaggttgagctcttcttaaagtattcttctcttccttttatcagtaggtgcccagaataagttattgcagtttatcattcaagtgtaaaatattttgaatcaataatatattttctgttttcttttggtaaagactggcttttattaatgcactttctatcctctgtaaactttttgtgctgaatgttgggactgctaaataaaatttgttgcataaaaaaaaaaaaaaaaaa

SEQ ID NO: 568 - protein, 390 aa, Homo sapien
MAVSESQLKKMVSKYKYRDLTVRETVNVITLYKDLKPVLDSYVFNDGSSRELMNLTGTIPVPYRGNTYNIPICLWLLDTYPYNPPICFVKPTSSMTIKTGKHVDANGKIYLPYLHEWKHPQSDLLGLIQVMIVVFGDEPPVFSRPISASYPPYQATGPPNTSYMPGMPGGISPYPSGYPPNPSGYPGCPYPPGGPYPATTSSQYPSQPPVTTVGPSRDGTISEDTIRASLISAVSDKLRWRMKEEMDRAQAELNALKRTEEDLKKGHQKLEEMVTRLDQEVAEVDKNIELLKKKDEELSSALEKMENQSENNDIDEVIIPTAPLYKQILNLYAEENAIEDTIFYLGEALRRGVIDLDVFLKHVRLLSRKQFQLRALMQKARKTAGLSDLY

SEQ ID NO: 569 - DNA, 2610 bp, Homo sapien
cggacgcgtggggcccggggggctgaggcgcccgccgcctgccgcgggggccgctcgcgtcctccatggaggccggagaggaaccgctgctgctggccgaactcaagcccgggcgcccccaccagtttgattggaagtccagctgtgaaacctggagcgtcgccttctccccagatggctcctggtttgcttggtctcaaggacactgcatcgtcaaactgatcccctggccgttggaggagcagttcatccctaaagggtttgaagccaaaagccgaagtagcaaaaatgagacgaaagggcggggcagcccaaaagagaagacgctggactgtggtcagattgtctgggggctggccttcagcccgtggccttccccacccagcaggaagctctgggcacgccaccacccccaagtgcccgatgtctcttgcctggttcttgctacgggactcaacgatgggcagatcaagatctgggaggtgcagacagggctcctgcttttgaatctttccggccaccaagatgtcgtgagagatctgagcttcacacccagtggcagtttgattttggtctccgcgtcacgggataagactcttcgcatctgggacctgaataaacacggtaaacagattcaagtgttatcgggccacctgcagtgggtttactgctgttccatctccccagactgcagcatgctgtgctctgcagctggagagaagtcggtctttctatggagcatgaggtcctacacgttaattcggaagctagagggccatcaaagcagtgttgtctcttgtgacttctcccccgactctgccctgcttgtcacggcttcttacgataccaatgtgattatgtgggacccctacaccggcgaaaggctgaggtcactccaccacacccaggttgaccccgccatggatgacagtgacgtccacattagctcactgagatctgtgtgcttctctccagaaggcttgtaccttgccacggtggcagatgacagactcctcaggatctgggccctggaactgaaaactcccattgcatttgctcctatgaccaatgggctttgctgcacattttttccacatggtggagtcattgccacagggacaagagatggccacgtccagttctggacagctcctagggtcctgtcctcactgaagcacttatgccggaaagcccttcgaagtttcctaacaacttaccaagtcctagcactgccaatccccaagaaaatgaaagagttcctcacatacaggactttttaagcaacaccacatcttgtgcttctttgtagcagggtaaatcgtcctgtcaaagggagttgctggaataatgggccaaacatctggtcttgcattgaaatagcatttctttgggattgtgaatagaatgtagcaaaaccagattccagtgtactagtcatggatctttctctccctggcatgtgaaagtcagtcttagaggaagagattccacttgcacggcaacagagccttacgttaaattttcagtccagttatgaacagcaagtgttgaactctttctgcttgttttgattcaaagtgcagttactgatgttgttttgattatgcaactaagtaggcctccagagcctctctagtggcagagcagctcacactccctccgctgggaacgatggcttctgcctagtacctatccttgtgtttctgatgcagtggtagcattggttcaagttctctcctgctgtggtcagagttgcttcgatgttggccaagtgcttttcttcttgggctcccttctgacctgcaggacagttttcctggagccatttggtatgaggtattaatttagcttaactaaattacaggggactcagaggccgtgctcctgaccgatccagacactattactggcttttttttttttttaacaatggtgtgcatgtgcaggaaatgacaaatttgtatgtcagattatacaaggatgtattcttaaaccgcatgactattcagatggctactgagttatcagtggccatttattagcatcatatttatttgtattttctcaacagatgttaaggtacaactgtgtttttctcgattatctaaaaaccatagtacttaaattgaacagttgcaaagatgtcttaattgtgtaaagaattggtgtagtcatgactttagctgatactcttatgtacgagatctgtctctgctgtttaacttcattggattaatcagctggtttcaactctactgcgaaacaaaaatagctccttaaaagtactgttctccttcagtggcatgtagttatctaatcaagacacctcattcaaacaaaacctgccttaggaaaatttaatatattttaaattattttaaaagaaatacaacatcttattctttagctttcttaatcggtgctttatggaggccagtgtaacgttacatgactcgttgagaaagttgaggaatttcctctaccacctttgttgcttgaagaaaaacatgtcttttcaaaatgagaggctttcattgaagaaaagaaaaaaacaacagttaaaaaaaaaaaaaaaaaaaaaaaaaaaaaaaaaaaaaaaaaaaaaaaaaa

SEQ ID NO: 570 - protein, 404 aa, Homo sapien
MEAGEEPLLLAELKPGRPHQFDWKSSCETWSVAFSPDGSWFAWSQGHCIVKLIPWPLEEQFIPKGFEAKSRSSKNETKGRGSPKEKTLDCGQIVWGLAFSPWPSPPSRKLWARHHPQVPDVSCLVLATGLNDGQIKIWEVQTGLLLLNLSGHQDVVRDLSFTPSGSLILVSASRDKTLRIWDLNKHGKQIQVLSGHLQWVYCCSISPDCSMLCSAAGEKSVFLWSMRSYTLIRKLEGHQSSVVSCDFSPDSALLVTASYDTNVIMWDPYTGERLRSLHHTQVDPAMDDSDVHISSLRSVCFSPEGLYLATVADDRLLRIWALELKTPIAFAPMTNGLCCTFFPHGGVIATGTRDGHVQFWTAPRVLSSLKHLCRKALRSFLTTYQVLALPIPKKMKEFLTYRTF

SEQ ID NO: 571 - DNA, 2154 bp, Homo sapien
atataaccgcgtggcccgcgcgcgcgcttccctcccggcgcagtcaccggcgcggtctatggctgcgacttctctaatgtctgctttggctgcccggctgctgcagcccgcgcacagctgctcccttcgccttcgccctttccacctcgcggcagttcgaaatgaagctgttgtcatttctggaaggaaactggcccagcagatcaagcaggaagtgcggcaggaggtagaagagtgggtggcctcaggcaacaaacggccacacctgagtgtgatcctggttggcgagaatcctgcaagtcactcctatgtcctcaacaaaaccagggcagctgcagttgtgggaatcaacagtgagacaattatgaaaccagcttcaatttcagaggaagaattgttgaatttaatcaataaactgaataatgatgataatgtagatggcctccttgttcagttgcctcttccagagcatattgatgagagaaggatctgcaatgctgtttctccagacaaggatgttgatggctttcatgtaattaatgtaggacgaatgtgtttggatcagtattccatgttaccggctactccatggggtgtgtgggaaataatcaagcgaactggcattccaaccctagggaagaatgtggttgtggctggaaggtcaaaaaacgttggaatgcccattgcaatgttactgcacacagatggggcgcatgaacgtcccggaggtgatgccactgttacaatatctcatcgatatactcccaaagagcagttgaagaaacatacaattcttgcagatattgtaatatctgctgcaggtattccaaatctgatcacagcagatatgatcaaggaaggagcagcagtcattgatgtgggaataaatagagttcacgatcctgtaactgccaaacccaagttggttggagatgtggattttgaaggagtcagacaaaaagctgggtatatcactccagttcctggaggtgttggccccatgacagtggcaatgctaatgaagaataccattattgctgcaaaaaaggtgctgaggcttgaagagcgagaagtgctgaagtctaaagagcttggggtagccactaattaactactgtgtcttctgtgtcacaaacagcactccaggccagctcaagaagcaaagcaggccaatagaaatgcaatatttttaatttattctactgaaatggtttaaaatgatgccttgtatttattgaaagcttaaatgggtgggtgtttctgcacatacctctgcagtacctcaccagggagcattccagtatcatgcagggtcctgtgatctagccaggagcagccattaacctagtgattaatatgggagacattaccatatggaggatggatgcttcactttgtcaagcacctcagttacacattcgccttttctaggattgcatttcccaagtgctattgcaataacagttgatactcattttaggtaccagaccttttgagttcaactgatcaaaccaaaggaaaagtgttgctagagaaaattggggaaaaggtgaaaaagaaaaaatggtagtaattgagcagaaaaaaattaatttatatatgtattgattggcaaccagatttatctaagtagaactgaattggctaggaaaaaagaaaaactgcatgttaatcattttcctaagctgtccttttgaggcttagtcagtttattgggaaaatgtttaggattattccttgctattagtactcattttatgtatgttacccttcagtaagttctccccattttagttttctaggactgaaaggattcttttctacattatacatgtgtgttgtcatatttggcttttgctatatactttaacttcattgttaaatttttgtattgtatagtttctttggtgtatcttaaaacctatttttgaaaaacaaacttggcttgataatcatttgggcagcttgggtaagtacgcaacttacttttccaccaaagaactgtcagcagctgcctgcttttctgtgatgtatgtatcctgttgacttttccagaaattttttaagagtttgagttactattgaatttaatcagactttctgattaaagggttttctttcttttttaataaaacacatctgtctggtatggta

SEQ ID NO: 572 - protein, 344 aa, Homo sapien
MSALAARLLQPAHSCSLRLRPFHLAAVRNEAVVISGRKLAQQIKQEVRQEVEEWVASGNKRPHLSVILVGENPASHSYVLNKTRAAAVVGINSETIMKPASISEEELLNLINKLNNDDNVDGLLVQLPLPEHIDERRICNAVSPDKDVDGFHVINVGRMCLDQYSMLPATPWGVWEIIKRTGIPTLGKNVVVAGRSKNVGMPIAMLLHTDGAHERPGGDATVTISHRYTPKEQLKKHTILADIVISAAGIPNLITADMIKEGAAVIDVGINRVHDPVTAKPKLVGDVDFEGVRQKAGYITPVPGGVGPMTVAMLMKNTIIAAKKVLRLEEREVLKSKELGVATN

SEQ ID NO: 573 - DNA, 828 bp, Homo sapien
gggggagtgaaagcgaaagcccgggcgactagccgggagaccagagatctagcgactgaagcagcatggccaagccgtgtggggtgcgcctgagcggggaagcccgcaaacaggtggaggtcttcaggcagaatcttttccaggaggctgaggaattcctctacagattcttgccacagaaaatcatatacctgaatcagctcttgcaagaggactccctcaatgtggctgacttgacttccctccgggccccactggacatccccatcccagaccctccacccaaggatgatgagatggaaacagataagcaggagaagaaagaagtccctaagtgtggatttctccctgggaatgagaaagtcctgtccctgcttgccctggttaagccagaagtctggactctcaaagagaaatgcattctggtgattacatggatccaacacctgatccccaagattgaagatggaaatgattttggggtagcaatccaggagaaggtgctggagagggtgaatgccgtcaagaccaaagtggaagctttccagacaaccatttccaagtacttctcagaacgtggggatgctgtggccaaggcctccaaggagactcatgtaatggattaccgggccttggtgcatgagcgagatgaggcagcctatggggagctcagggccatggtgctggacctgagggccttctatgctgagctttatcatatcatcagcagcaacctggagaaaattgtcaccccaaagggtgaagaaaagccatctatgtactgaacccgggactagaaggaaaataaatgatctatatgttgtgtgg

SEQ ID NO: 574 - protein, 239 aa, Homo sapien [sequence omitted]

SEQ ID NO: 575 - DNA, 1472 bp, Homo sapien
cgctccgccgaccgaagaggctggacatgacaccagtggcatatcacggccatggggtctcagcattccgctgctgctcgcccctcctcctgcaggcgaaagcaagaagatgacagggacggtttgctggctgaacgagagcaggaagaagccattgctcagttcccatatgtggaattcaccgggagagatagcatcacctgtctcacgtgccaggggacaggctacattccaacagagcaagtaaatgagttggtggctttgatcccacacagtgatcagagattgcgccctcagcgaactaagcaatatgtcctcctgtccatcctgctttgtctcctggcatctggtttggtggttttcttcctgtttccgcattcagtccttgtggatgatgacggcatcaaagtggtgaaagtcacatttaataagcaagactcccttgtaattctcaccatcatggccaccctgaaaatcaggaactccaacttctacacggtggcagtgaccagcctgtccagccagattcagtacatgaacacagtggtcagtacatatgtgactactaacgtctcccttattccacctcggagtgagcaactggtgaattttaccgggaaggccgagatgggaggaccgttttcctatgtgtacttcttctgcacggtacctgagatcctggtgcacaacatagtgatcttcatgcgaacttcagtgaagatttcatacattggcctcatgacccagagctccttggagacacatcactatgtggattgtggaggaaattccacagctatttaacaactgctattggttcttccacacagcgcctgtagaagagagcacagcatatgttcccaaggcctgagttctggacctacccccacgtggtgtaagcagaggaggaattggttcacttaactcccagcaaacatcctcctgccacttaggaggaaacacctccctatggtaccatttatgtttctcagaaccagcagaatcagtgcctagcctgtgcccagcaaatagttggcactcaataaagatttgcagaatttaatacagatcttttcagctgttcttagggcattataaatggaaatcataacgtggttctaggttatcaaaccatggagtgatgtggagctaggattgtgagtgacctgcaggccattatcagtgcctcatctgtgcagaagtggcagcagagagggaccatccaaatacctaagagaaaacagacctagtcaggatatgaatttgtttcagctgttcccaaaggcctgggagctttttgaaaagaaagaaaaaagtgtgttggcttttttttttttttagaaagttagaattgtttttaccaagagtctatgtggggcttgattcacccttcatccattggctggaacatggattggggatttgatagaaaaataaaccctgcttttgattcaaaaaaaaaaaaaaaaaaa

SEQ ID NO: 576 - protein, 250 aa, Homo sapien
MGSQHSAAARPSSCRRKQEDDRDGLLAEREQEEAIAQFPYVEFTGRDSITCLTCQGTGYIPTEQVNELVALIPHSDQRLRPQRTKQYVLLSILLCLLASGLVVFFLFPHSVLVDDDGIKVVKVTFNKQDSLVILTIMATLKIRNSNFYTVAVTSLSSQIQYMNTVVSTYVTTNVSLIPPRSEQLVNFTGKAEMGGPFSYVYFFCTVPEILVHNIVIFMRTSVKISYIGLMTQSSLETHHYVDCGGNSTAI

SEQ ID NO: 577 - DNA, 5547 bp, Homo sapien
aagttttggagcgccggacaagctgaggtccgcgactcgtcgctaagattccccaaaactgagatttcaagaaaattcaccctttccgctttctttggcgcccttcaaccgtgaaggaaatgaaggttgagaacctggaacccgcttccaaagaccaagccctttctctgtgcctcacaacagtcttgcgctgtagctgtttttattacccctattttactactggggaggagatttgaggtcctgaaagtgaagtgacttgctggacgtcacttagcagaggagatggcgaaacctggattagaggcgatgccttctaactcccagcgtggacttgcctcctttcctgggggtgactgaatgcccagccagggacgcgacgtctctggccagcagaaatacggcctcctccccgccgactgggcaaagggggaccttgcggccaaggagggattcgcaggcgggccgggggtgggagcgggggccggagccggagccttggcccgcccccgggcggcgctgtgattggccggccgctccggcgggcgtcgcgattggccgtcctgcagccgttgagatttgaactcggtatttgtggctttgcccgcgcgttgccagactcagaggcggccctttgcctctgcctgccggggattggccggattctccgccgacttgaaaactgccttgctaattggtgcgtgttgtgcacgcgtgttttttccttttcatttcagcctgactgccggaatcagagccgcgggtgagatccccagccctgtgagcctgtaggagtagaatggctccccaaatgtatgagttccatctgccattatccccagaggagttgttgaaaagtggaggggtgaatcagtatgttgtgcaagaggtactgtccatcaaacatcttccaccacagcttagagcttttcaggctgcctttcgagctcaggggcccctggctatgctgcagcactttgatactatctacagcattttgcatcactttcgaagtatagatcctggcctcaaagaagatactctggaattcctgataaaagtggtatcccgccactcccaggagcttccagctatcctggatgatacaactttgagtggatcagatagaaacgcccatctaaatgccctcaaaatgaactgttatgctctgatacgtctcctggaatcctttgagaccatggccagccagacaaaccttgtggacctggaccttggtgggaagggtaagaaagctcggaccaaggcagcccatggctttgactgggaagaagagaggcaaccaattcttcagcttttaacacagctacttcagttggacatccgtcacctgtggaaccactcaataattgaagaagaatttgtcagtttggttactggctgttgctaccgccttctggagaatcccaccattaatcaccagaagaaccgccccactcgggaagccataacacacctgcttggtgtagccttgacccgttataaccatatgctcagtgctacagtgaagatcatccagatgctgcagcactttgaacacctggcacctgtactggttgcagccgtgagtctatgggcaactgactatggaatgaagagcatagtgggagagattgtaagagagattggacaaaagtgtccccaagagctgagtcgagacccttcagggacaaagggctttgcagcattcctgacagaactagcagaacgtgtcccagctatcctgatgtccagcatgtgcattttgctagatcacctggatggagaaaattacatgatgcgtaatgctgtgctggcagccatggcggagatggtgctgcaggttctcagtggcgatcaactggaagcagcagcccgagacaccagagaccagttcttggatactttacaagcccatggccatgatgtcaactcctttgtgcggagccgtgttttgcagctcttcacccgaattgtccagcagaaggctctccccctgacacgtttccaggcagtggtggctttagctgtgggacgtctggcagacaagtcagtgctagtatgtaaaaatgccatccagctgctggccagttttctagccaataatcctttctcctgcaagcttagtgatgctgaccttgccggaccactgcagaaggagacccagaaattacaagagatgagggcccagaggcgaactgcagcagcttctgcagtgctggacccagaggaggagtgggaagccatgctgccagagttgaagtctaccctgcagcagcttctacagcttccccagggagaggaggagattcctgagcaaattgccaatacagagacaactgaagatgtgaaaggacgcatctatcaactgcttgccaaagctagttacaaaaaggccatcattctcactcgagaagccacaggccacttccaggagtccgaacccttcagtcatatagacccagaggagtcagaggagaccaggctcttgaatatattaggacttatcttcaaaggcccagcagcttccacacaagaaaagaatccccgggagtctacaggaaacatggtcacaggacagactgtctgtaaaaataaacccaatatgtcggatcctgaggaatccaggggaaatgatgaactagtgaagcaggagatgctggtacagtatctgcaggatgcctacagcttctcccggaagattacagaggccattggcatcatcagcaagatgatgtatgaaaacacaactacagtggtgcaggaggtgattgaattctttgtgatggtcttccaatttggggtaccccaggccctgtttggggtgcgccgtatgctgcctctcatctggtctaaggagcctggtgtccgggaagccgtgcttaatgcctaccgccaactctacctcaaccccaaaggggactctgccagagccaaggcccaggctttgattcagaatctctctctgctgctagtggatgcctcggttgggaccattcagtgtcttgaggaaattctctgtgagtttgtgcagaaggatgagttgaaaccagcagtgacccagctgctgtgggagcgggccaccgagaaggtcgcctgctgtcctctggagcgctgttcctctgtcatgcttcttggcatgatggcacgaggaaagccagaaattgtgggaagcaatttagacacactggtgagcatagggctggatgagaagtttccacaggactacaggctggcccagcaggtgtgccatgccattgccaacatctcggacaggagaaagccttctctgggcaaacgtcacccccccttccggctgcctcaggaacacaggttgtttgagcgactgcgggagacagtcacaaaaggctttgtccacccagacccactctggatcccattcaaagaggtggcagtgaccctcatttaccaactggcagagggccccgaagtgatctgtgcccagatattgcagggctgtgcaaaacaggccctggagaagctagaagagaagagaaccagtcaggaggacccgaaggagtcccccgcaatgctccccactttcctgttgatgaacctgctgtccctggctggggatgtggctctgcagcagctggtccacttggagcaggcagtgagtggagagctctgccggcgccgagttctccgggaagaacaggagcacaagaccaaagatcccaaggagaagaatacgagctctgagaccaccatggaggaggagctggggctggttggggcaacagcagatgacacagaggcagaactaatccgtggcatctgcgagatggaactgttggatggcaaacagacactggctgcctttgttccactcttgcttaaagtctgtaacaacccaggcctctatagcaacccagacctctctgcagctgcttcacttgcccttggcaagttctgcatgatcagtgccactttctgcgactcccagcttcgtcttctgttcaccatcctggaaaagtctccacttcccattgtccggtctaacctcatggttgccactggggatctggccatccgctttcccaatctggtggacccctggactcctcatctgtatgctcgcctccgggaccctgctcagcaagtgcggaaaacagcggggctggtgatgacccacctgatcctcaaggacatggtgaaggtgaaggggcaggtcagcgagatggcggtgctgctcatcgaccccgagcctcagattgctgccctggccaagaacttcttcaatgagctctcccacaagggcaacgcaatctataatctccttccagatatcatcagccgcctgtcagaccccgagctgggggtggaggaagagcctttccacaccatcatgaaacagctcctctcctacatcaccaaggacaagcagacagagagcctggtggaaaagctgtgtcagcggttccgcacatccctaactgagcggcagcagcgagacctggcctactgtgtgtcacagctgcccctcacagagcgaggcctccgtaagatgcttgacaattttgactgttttggagacaaactgtcagatgagtccatcttcagtgcttttttgtcagttgtaggcaagctgcgacgtggggccaagcctgagggcaaggctataatagatgaatttgagcagaagcttcgggcctgtcataccagaggtttggatggaatcaaggagcttgagattggccaagcaggtagccagagagcgccatcagccaagaaaccatccactggttctaggtaccagcctctggcttctacagcctcagacaatgactttgtcacaccagagccccgccgtactacccgtcggcatccaaacacccagcagcgagcttccaaaaagaaacccaaagttgtcttctcaagtgatgagtccagtgaggaagatctttcagcagagatgacagaagacgagacacccaagaaaacaactcccattctcagagcatcggctcgcaggcacagatcctaggaagtctgttcctgtcctccctgtgcagggtatcctgtagggtgacctggaattcgaattctgtttcccttgtaaaatatttgtctgtctcttttttttaaaaaaaaaaaaggccgggcactgtggctcacgcctgtaatcccagcactttgcgataccaaggcgggtggataacctgaggtagggagttcgagaccagcctgaccaacatggagaaaccccatctctactaaaaataaaaaattagccgggcgtattggcgtgcgcctgtaatcccagctactcaagaggctgaggcaggagaatcgcctgaacccagaggcggaggttgtagtgagccgaaatcacaccattgcactccagcttgggcaacaatagcgaacctccatctcaaattaaaaaaaaaatgcctacacgctctttaaaatgcaaggctttctcttaaattagcctaactgaactgcgttgagctgcttcaactttggaatatatgtttgccaatctccttgttttctaatgaataaatgtttttatatactttt

SEQ ID NO: 578 - protein, 1401 aa, Homo sapien
MAPQMYEFHLPLSPEELLKSGGVNQYVVQEVLSIKHLPPQLRAFQAAFRAQGPLAMLQHFDTIYSILHHFRSIDPGLKEDTLEFLIKVVSRHSQELPAILDDTTLSGSDRNAHLNALKMNCYALIRLLESFETMASQTNLVDLDLGGKGKKARTKAAHGFDWEEERQPILQLLTQLLQLDIRHLWNHSIIEEEFVSLVTGCCYRLLENPTINHQKNRPTREAITHLLGVALTRYNHMLSATVKIIQMLQHFEHLAPVLVAAVSLWATDYGMKSIVGEIVREIGQKCPQELSRDPSGTKGFAAFLTELAERVPAILMSSMCILLDHLDGENYMMRNAVLAAMAEMVLQVLSGDQLEAAARDTRDQFLDTLQAHGHDVNSFVRSRVLQLFTRIVQQKALPLTRFQAVVALAVGRLADKSVLVCKNAIQLLASFLANNPFSCKLSDADLAGPLQKETQKLQEMRAQRRTAAASAVLDPEEEWEAMLPELKSTLQQLLQLPQGEEEIPEQIANTETTEDVKGRIYQLLAKASYKKAIILTREATGHFQESEPFSHIDPEESEETRLLNILGLIFKGPAASTQEKNPRESTGNMVTGQTVCKNKPNMSDPEESRGNDELVKQEMLVQYLQDAYSFSRKITEAIGIISKMMYENTTTVVQEVIEFFVMVFQFGVPQALFGVRRMLPLIWSKEPGVREAVLNAYRQLYLNPKGDSARAKAQALIQNLSLLLVDASVGTIQCLEEILCEFVQKDELKPAVTQLLWERATEKVACCPLERCSSVMLLGMMARGKPEIVGSNLDTLVSIGLDEKFPQDYRLAQQVCHAIANISDRRKPSLGKRHPPFRLPQEHRLFERLRETVTKGFVHPDPLWIPFKEVAVTLIYQLAEGPEVICAQILQGCAKQALEKLEEKRTSQEDPKESPAMLPTFLLMNLLSLAGDVALQQLVHLEQAVSGELCRRRVLREEQEHKTKDPKEKNTSSETTMEEELGLVGATADDTEAELIRGICEMELLDGKQTLAAFVPLLLKVCNNPGLYSNPDLSAAASLALGKFCMISATFCDSQLRLLFTILEKSPLPIVRSNLMVATGDLAIRFPNLVDPWTPHLYARLRDPAQQVRKTAGLVMTHLILKDMVKVKGQVSEMAVLLIDPEPQIAALAKNFFNELSHKGNAIYNLLPDIISRLSDPELGVEEEPFHTIMKQLLSYITKDKQTESLVEKLCQRFRTSLTERQQRDLAYCVSQLPLTERGLRKMLDNFDCFGDKLSDESIFSAFLSVVGKLRRGAKPEGKAIIDEFEQKLRACHTRGLDGIKELEIGQAGSQRAPSAKKPSTGSRYQPLASTASDNDFVTPEPRRTTRRHPNTQQRASKKKPKVVFSSDESSEEDLSAEMTEDETPKKTTPILRASARRHRS

SEQ ID NO: 579 - DNA, 2570 bp, Homo sapien
tcggaggagccagccgaaatcctgccgcctgcccgggacgaggaggaggaggaggaagaggggatggagcaggggctggaggaggaagaagaggtggatccccggatccagggagaactggagaagttaaatcagtccacggatgatatcaacagacgggagactgaacttgaggatgctcgtcagaagttccgctctgttctggttgaagcaacggtgaaactggatgaactggtgaagaaaattggcaaagctgtggaagactccaagccctactgggaggcacggagggtggcgaggcaggctcagctggaagctcagaaagccacgcaggacttccagagggccacagaggtgctccgtgccgccaaggagaccatctccctggccgagcagcggctgctggaggatgacaagcggcagttcgactccgcctggcaggagatgctgaatcacgccactcagagggtcatggaggcggagcagaccaagaccaggagcgagctggtgcataaggagacggcagccaggtacaatgccgccatgggccgcatgcgacagctggagaagaaactcaagagagccatcaacaagtccaagccttattttgaactcaaggcaaagtactatgtgcagctcgagcaactgaaaaagactgtggatgacctgcaggccaaactgaccctggcaaaaggcgagtacaagatggccctgaagaacctggagatgatctcagatgagatccacgagcggcggcgctccagtgccatggggcctcggggatgcggtgttggtgctgagggcagcagcacatctgtggaggatctgccagggagcaaacctgagcctgatgccatttctgtggcctcggaggcctttgaagatgacagctgtagcaactttgtgtctgaagatgactcggaaacccagtccgtgtccagctttagttcaggaccaacaagcccgtctgagatgcctgaccagttccctgcggttgtgaggcctggcagcctggatctgcccagccctgtgtccctgtcagagtttgggatgatgttcccagtgttgggccctcgaagtgaatgcagcggggcctcctcccctgaatgtgaagtagaacgaggagacagggcagaaggggcagagaataaaacaagtgacaaagccaacaacaaccggggcctcagcagtagcagtggcagtggtggcagcagtaagagccaaagcagcacctcccctgagggccaggccttggagaaccggatgaagcagctctccctacagtgctcaaagggaagagatggaattattgctgacataaaaatggtgcagattggctgattcatcctgggccctggccgatgtgcatatcaacatttatacatggaactggagaacattgtgccaataatcatttaatatatgccaaatcttacacgtctactctaaactgctctaatgaagtttcagtgaccttgagggctaaagattgttcttctgggtaagagctcttgggctggtttttcagagcagagttcttgttgtgggtagactgtgactaggttcacagcctttgtggaacattccgtataacggcattgtggaagcaataactagttcctatgaaagaaccagagctgggaagatggctgggaagccaggccaaagtgggggcaacagcttgcttctctttctcttctcaccctcagtttgtatgggaaaatggagatgtcctctccactttatcccacgatatctaaatgaaaaagaaagaaaacccacacacaaagcaaaaactcaagtattaagagcacatatttttgacccagtggaggcttaaaaaaaaaaaaatccaagaacacaattcattttcaccacctctggtgttcagagggggcttttaaaaaagcgtgtatgctgggatacccattaaaaccattttctagaaggctaccatgagctgcactttttggggtgggaaaggtgaatgccagtggggatgcggggggatgagggtaggagggacttatagaaggggatttgtggctgtgggggagaaggttctacagcataagccttatcctgccagccaaggggatttattctaagagaagtgcatgtgaagaatggttgccactgttattagattgacaagatgttaatttctctgtaggttgtaactttaaaaataaatgaaattatttaagggttatgctgcactagtattccttagaggaaacagttctttaaagttaggaaagggagtaggcaggcatgtgttggcaaaggctgttaatagtagttaagtgttaagactgcttttctttaacgttttcatggtaatgcatatttagagcactgtatttttgtcttgttaagaaaatttagcatttctaaaagaaaaaagcaaccctctttcaaactgttaattctgtcacagcctgtatattttagtcatttgtaaatctcttcatacaatagtgacttcttttttgactgatacagtatcttaattacaaggttattttgtacttgtcttaatacactaagtgtaataaaaacggcttgag

SEQ ID NO: 580 - protein, 425 aa, Homo sapien
MEQGLEEEEEVDPRIQGELEKLNQSTDDINRRETELEDARQKFRSVLVEATVKLDELVKKIGKAVEDSKPYWEARRVARQAQLEAQKATQDFQRATEVLRAAKETISLAEQRLLEDDKRQFDSAWQEMLNHATQRVMEAEQTKTRSELVHKETAARYNAAMGRMRQLEKKLKRAINKSKPYFELKAKYYVQLEQLKKTVDDLQAKLTLAKGEYKMALKNLEMISDEIHERRRSSAMGPRGCGVGAEGSSTSVEDLPGSKPEPDAISVASEAFEDDSCSNFVSEDDSETQSVSSFSSGPTSPSEMPDQFPAVVRPGSLDLPSPVSLSEFGMMFPVLGPRSECSGASSPECEVERGDRAEGAENKTSDKANNNRGLSSSSGSGGSSKSQSSTSPEGQALENRMKQLSLQCSKGRDGIIADIKMVQIG

SEQ ID NO: 581 - DNA, 2570 bp, Homo sapien; identical to SEQ ID NO: 579

SEQ ID NO: 582 - protein, 425 aa, Homo sapien; identical to SEQ ID NO: 580

SEQ ID NO: 583 - DNA, 487 bp, Homo sapien
  Unsure 22: Unknown base
ccgtgatgtggcgcctgcacantcctttccctttcggattcccgacgctgtggttgctgtaaggggtcctccctgcgccacacggccgtcgccatggtgaagctgagcaaagaggccaagcagagactacagcagctcttcaaggggagccagtttgccattcgctggggctttatccctcttgtgatttacctgggatttaagaggggtgcagatcccggaatgcctgaaccaactgttttgagcctactttggggataaaggattatttggtcttctggatttggaggcaatcagcggacagcatggaagatgtgtgctctggctcggataagagatgggacatcattcagtcactagttggatggcacaaggctcttcacagacgcatctgtagcagagtggaacttgtactaacttatgatagaatgtatcagaataaatgtttttaacagtgtaaaaaaaaaaaaaaaaaaaaaaaaaaaaa

SEQ ID NO: 584 - protein, 55 aa, Homo sapien
MVKLSKEAKQRLQQLFKGSQFAIRWGFIPLVIYLGFKRGADPGMPEPTVLSLLWG

SEQ ID NO: 585 - DNA, 1645 bp, Homo sapien
agtcaagatggaggagtacgcgcgagagccttgcccatggcgaattgtggatgactgtggtggggcctttacgatgggtaccattggtggtggtatctttcaagcaatcaaaggttttcgcaattctccagtgggagtaaaccacagactacgagggagtttgacagctattaaaaccagggctccacagttaggaggtagctttgcagtttggggagggctgttttccatgattgactgtagtatggttcaagtcagaggaaaggaagatccctggaactccatcacaagtggtgccttaacgggagccatactggcagcaagaaatggaccagtggccatggttgggtcagccgcaatgggtggcattctcctagctttaattgaaggagctggtatcttgttgacaagatttgcctctgcacagtttcccaatggtcctcagtttgcagaagacccctcccagttgccttcaactcagttaccttcctcaccttttggagactatcgacaatatcagtaggacttctttcctaggatttctttaacagaacgagttgtggttcgagaaggatttcagaagatcaagttacagtctgtttttaaaaccataggtgggacagctatggccaataggctataaagagacatttagcacttttttctatttaaaggaacaagcggggaagggtgctaaaagataatacgtttatttattcacacttgaattgcatttgtgatcaaaataaatgtttaaatcgctaaaggaaaatacagtaagtgcttgaaagatgaaggaccaaaaggccaaaaaacagtgaaatatgatcatcatctcttgcggacttctctgcctggttttgtgtgttctgttattcaaacaataaaaagctggtggaacttactctttcttttaagataagttgtagacttcgatgtttcatgctcatgtacttcaaataatgcatgttttatagttagtccctcatcacttgaagtgacttctgagaattatgcagagtcaacatggatcatttcacagtgagatgctttatggattgaaggatatggtaaaatgtttatagtttactttgaaagtaaaatatactatgtcttggttttgaggatattggatacaaaactctcttcctttagggctactgagtcttgattcctgatcatcagaaatttcaccagaaacaacttgcttccaatatacccaattctatatgaagaattcatggagagtgtactggcactggaagagtttagtgtttcttgtatgcttgaaaataaagtatgtactgttttgaatgtgttccaagtcctctgcataaacgatgtattttggggtctggttgggcctggaaaatggatgagcacttcagaacaggtcattttcctgatattggaagtgacatgtggccctataggaggcatgatgttagttaattacacatttgcctacatctgtgggaaatggagaacaaagccatgtgggtactgtaaacacacgtttatcttttggcccaatgccatacatatggtaggcatttaattactgattgtgtttggataatttgggaattttcgactgtggtaaaatatacataaaataatacttattaaaaaaaaaaaaaaaaaa

SEQ ID NO: 586 - protein, 171 aa, Homo sapien
MEEYAREPCPWRIVDDCGGAFTMGTIGGGIFQAIKGFRNSPVGVNHRLRGSLTAIKTRAPQLGGSFAVWGGLFSMIDCSMVQVRGKEDPWNSITSGALTGAILAARNGPVAMVGSAAMGGILLALIEGAGILLTRFASAQFPNGPQFAEDPSQLPSTQLPSSPFGDYRQYQ

SEQ ID NO: 587 - DNA, 3236 bp, Homo sapien
ctccaccgcggcgagaggcatgggcacgtggctgccgagggtggccgagctctgggaagaaaagcccgtgtgcctctgcatagcgtcgctacagcgctgactcggtgtggattgattggaaaggtttgagggagtacttgggaagcatggtggcacatgatgagactggaggtctcctacctattaaaaggaccatacgagtcctagatgtcaataaccagtccttcagagaacaagaggagccaagcaataaaagagttcgacctctggctcgtgtcacgtccttggcaaatttaatctctcctgtaagaaatggagctgtcagacgttttggtcaaacaatacagtcatttacccttcgtggtgaccacagatccccagcctctgcccagaagttttctagcaggtcaacagtcccaacacccgccaagagaaggagcagtgcactgtggtcagagatgctggacatcaccatgaaggagtctctcaccaccagggagatcagacggcaggaggcaatatatgaaatgtcccgaggtgaacaggatttaattgaggatctcaaacttgcaagaaaggcctaccatgaccccatgttaaagttgtccatcatgtcagaagaggaactcacacatatatttggtgatctggactcttacatacctctgcatgaagatttgttgacaagaataggagaagcaaccaagcctgatggaacagtggagcagattggtcacattctcgtgagctggttaccgcgcttgaatgcctacagaggttactgtagtaaccagctggcagccaaagctcttcttgatcaaaagaaacaggatccaagagtccaagacttcctccagcgatgtctcgagtctcccttcagtcgaaaactagatctttggagtttcctagatatccctcgaagtcgcctagtcaaataccctttactgttaaaagaaattcttaaacacactccaaaagagcaccctgatgttcagcttctggaggatgctatattgataatacagggagtcctctctgatatcaacttgaagaaaggtgaatccgagtgccagtattacatcgacaagctggagtacctggatgaaaagcagagggaccccagaatcgaagcgagcaaagtgctgctgtgccatggggagctgcggagcaagagtggacataaactttacattttcctgtttcaagacatcttggttctgactcggcccgtcacacggaacgaacggcactcttaccaggtttaccggcagccaatcccagtccaagagctagtcctagaagacctgcaggatggagatgtgagaatgggaggctcctttcgaggagctttcagtaactcagagaaagctaaaaatatctttagaattcgcttccatgacccctctccagcccagtctcacactctgcaagccaatgacgtgttccacaagcagcagtggttcaactgtattcgagcggccattgcccccttccagtcggcaggcagtccacctgagctgcagggcctgccggagctgcacgaagagtgtgaggggaaccacccctctgcgaggaaactcacagcccagaggagggcatccacagtttccagtgttactcaggtagaagttgatgaaaacgcttacagatgtggctctggcatgcagatggcagaggacagcaagagcttaaagacacaccagacacagcccggcatccgaagagcgagggacaaagccctttctggtggcaaacggaaagagactttggtgtagagaaggctctgtgtgttaactgatgggagagactgtttgtttataaatgtgtacagttttgttttctcgtaaggggagcatcatagggttactttataccagttgtaacattttcattgtttttggttgttcttttttctttttttaatggcagctaaagatatacagattactgttaaattgcagtcctttttttttttaaagatattttcttgaattatttagaacatggtaagcctggtattttttaatcaaacaaaatatttatgaaatgggttttctcttaattctggattcatcatggctttctaataccaattgtaatatttacaatattcaccaaaacttagaattttgcaaatgctggaattctgccagtgtttctttgctaagccttgcatgcaaaatttgaaattttaacattggcacccaaaacctacatggaatgtatgtctggagtatttcaaactttacattgaaacataatttccttggaaaacaaaccataagcctgaggaggtttttatcaactggaatgctttatattagtttgtttttcactgtacattcctcattttacattcatttaacctgccgattatttaatttttttattgtaaagtagtttttagcatttgcttttatttttttactttgatgccttttcaaattggcatgtctttaaagtatttttcttcctgattaaaaatgtgtgtgtatgtgtgtgtgtgtgtgtatatatatatatttttttaaatcacattaattttaccaagtgaaaccaagccatactgtttttgagccaattaagaaaattgccatttttaaagtgtagcatttcagggtaaagacccatgaaatggcttgatgtattctagactactgaaagaaaaccacttcaaagattttgttgaaagttttagtgttgtctgaaatgcaagagggaaggtgattggtagtgagttaaaagaaaaagagaggaaaagagagtagttttgtcttcaagtaaaatgtctggttgtgccagacatttcacaagtgtgaaaggagataggagaagctcaacttgagggcgtgtagtaagttgtagaaggctcgaggggacgtggacttatttgccttggtttgcaatacctgcaaataatgagtttgaaaagaaacaatgaaatgtgttaaaaatttgaccatattagataaattttggtggatttagtcataagatggaaaaagactggtgaatcttttattacaaaatgtttctgttaaaatgggatcatcatctttgaaaggggggaggaggagtaaaagcccgattataatggtgatcaattcaagtcagtgttgactattctgtgaaatatatttggccagtggaaatgataatcagaaaagactgtaaatagatccatccaaatgatttctctgtacaaatgaatgatactattaaaaaaaaaaaaaaaa

SEQ ID NO: 588 - protein, 542 aa, Homo sapien
MVAHDETGGLLPIKRTIRVLDVNNQSFREQEEPSNKRVRPLARVTSLANLISPVRNGAVRRFGQTIQSFTLRGDHRSPASAQKFSSRSTVPTPAKRRSSALWSEMLDITMKESLTTREIRRQEAIYEMSRGEQDLIEDLKLARKAYHDPMLKLSIMSEEELTHIFGDLDSYIPLHEDLLTRIGEATKPDGTVEQIGHILVSWLPRLNAYRGYCSNQLAAKALLDQKKQDPRVQDFLQRCLESPFSRKLDLWSFLDIPRSRLVKYPLLLKEILKHTPKEHPDVQLLEDAILIIQGVLSDINLKKGESECQYYIDKLEYLDEKQRDPRIEASKVLLCHGELRSKSGHKLYIFLFQDILVLTRPVTRNERHSYQVYRQPIPVQELVLEDLQDGDVRMGGSFRGAFSNSEKAKNIFRIRFHDPSPAQSHTLQANDVFHKQQWFNCIRAAIAPFQSAGSPPELQGLPELHEECEGNHPSARKLTAQRRASTVSSVTQVEVDENAYRCGSGMQMAEDSKSLKTHQTQPGIRRARDKALSGGKRKETLV

SEQ ID NO: 589 - DNA, 3236 bp, Homo sapien; identical to SEQ ID NO: 587

SEQ ID NO: 590 - protein, 542 aa, Homo sapien; identical to SEQ ID NO: 588

SEQ ID NO: 591 - DNA, 1985 bp, Homo sapien
cgccgagctttcggcacctctgccgggtggtaccgagccttcccggcgccccctcctctcctcccaccggcctgcccttccccgcgggactatcgcccccacgtttccctcagcccttttctctcccggccgagccgcggcggcagcagcagcagcagcagcagcaggaggaggagcccggtggcggcggtggccggggagcccatggcgtacagtcaaggaggcggcaaaaaaaaagtctgctactactacgacggtgatattggaaattattattatggacagggtcatcccatgaagcctcatagaatccgcatgacccataacttgctgttaaattatggcttatacagaaaaatggaaatatataggccccataaagccactgccgaagaaatgacaaaatatcacagtgatgagtatatcaaatttctacggtcaataagaccagataacatgtctgagtatagtaagcagatgcatatatttaatgttggagaagattgtccagcgtttgatggactctttgagttttgtcagctctcaactggcggttcagttgctggagctgtgaagttaaaccgacaacagactgatatggctgttaattgggctggaggattacatcatgctaagaaatacgaagcatcaggattctgttacgttaatgatattgtgcttgccatccttgaattactaaagtatcatcagagagtcttatatattgatatagatattcatcatggtgatggtgttgaagaagctttttatacaacagatcgtgtaatgacggtatcattccataaatatggggaatactttcctggcacaggagacttgagggatattggtgctggaaaaggcaaatactatgctgtcaattttccaatgtgtgatggtatagatgatgagtcatatgggcagatatttaagcctattatctcaaaggtgatggagatgtatcaacctagtgctgtggtattacagtgtggtgcagactcattatctggtgatagactgggttgtttcaatctaacagtcaaaggtcatgctaaatgtgtagaagttgtaaaaacttttaacttaccattactgatgcttggaggaggtggctacacaatccgtaatgttgctcgatgttggacatatgagactgcagttgcccttgattgtgagattcccaatgagttgccatataatgattactttgagtattttggaccagacttcaaactgcatattagtccttcaaacatgacaaaccagaacactccagaatatatggaaaagataaaacagcgtttgtttgaaaatttgcgcatgttacctcatgcacctggtgtccagatgcaagctattccagaagatgctgttcatgaagacagtggagatgaagatggagaagatccagacaagagaatttctattcgagcatcagacaagcggatagcttgtgatgaagaattctcagattctgaggatgaaggagaaggaggtcgaagaaatgtggctgatcataagaaaggagcaaagaaagctagaattgaagaagataagaaagaaacagaggacaaaaaaacagacgttaaggaagaagataaatccaaggacaacagtggtgaaaaaacagataccaaaggaaccaaatcagaacagctcagcaacccctgaatttgacagtctcaccaatttcagaaaatcattaaaaagaaaatattgaaaggaaaatgttttctttttgaagacttctggcttcattttatactactttggcatggactgtatttattttcaaatgggactttttcgtttttgtttttctgggcaagttttattgtgagattttctaattatgaagcaaaatttcttttctccaccatgctttatgtgatagtatttaaaattgatgtgagttattatgtcaaaaaaactgatctattaaagaagtaattggcctttctgagctgaaaaaaaaaaaaaaaaag

SEQ ID NO: 592 - protein, 488 aa, Homo sapien
MAYSQGGGKKKVCYYYDGDIGNYYYGQGHPMKPHRIRMTHNLLLNYGLYRKMEIYRPHKATAEEMTKYHSDEYIKFLRSIRPDNMSEYSKQMHIFNVGEDCPAFDGLFEFCQLSTGGSVAGAVKLNRQQTDMAVNWAGGLHHAKKYEASGFCYVNDIVLAILELLKYHQRVLYIDIDIHHGDGVEEAFYTTDRVMTVSFHKYGEYFPGTGDLRDIGAGKGKYYAVNFPMCDGIDDESYGQIFKPIISKVMEMYQPSAVVLQCGADSLSGDRLGCFNLTVKGHAKCVEVVKTFNLPLLMLGGGGYTIRNVARCWTYETAVALDCEIPNELPYNDYFEYFGPDFKLHISPSNMTNQNTPEYMEKIKQRLFENLRMLPHAPGVQMQAIPEDAVHEDSGDEDGEDPDKRISIRASDKRIACDEEFSDSEDEGEGGRRNVADHKKGAKKARIEEDKKETEDKKTDVKEEDKSKDNSGEKTDTKGTKSEQLSNP

SEQ ID NO: 593 - DNA, 4700 bp, Homo sapien
  Unsure 4356: Unknown base
  Unsure 4371: Unknown base
  Unsure 4405: Unknown base
gcggggactagtctcgtccggagactggcggcggcggcggcggcggcggccggagctcgagccccagcggctgagggcgggcgggcgggcgcgggggagggaggggggccggtccgcgacgactccccggacggcgtttctcctccgagcggcgccggtttcggcttggggggggcggggtacagcccatccatgaccatgggcgacaagaagagcccgaccaggccaaaaagacaagcgaaacctgccgcagacgaagggttttgggattgtagcgtctgcaccttcagaaacagtgctgaagcctttaaatgcagcatctgcgatgtgaggaaaggcacctccaccagaaaacctcggatcaattctcagctggtggcacaacaagtggcacaacagtatgccaccccaccaccccctaaaaaggagaagaaggagaaagttgaaaagcaggacaaagagaaacctgagaaagacaaggaaattagtcctagtgttaccaagaaaaataccaacaagaaaaccaaaccaaagtctgacattctgaaagatcctcctagtgaagcaaacagcatacagtctgcaaatgctacaacaaagaccagcgaaacaaatcacacctcaaggccccggctgaaaaacgtggacaggagcactgcacagcagttggcagtaactgtgggcaacgtcaccgtcattatcacagactttaaggaaaagactcgctcctcatcgacatcctcatccacagtgacctccagtgcagggtccgaacagcagaaccagagcagctcggggtctgagagcacagacaagggctcctcccgttcctccacgccaaagggcgacatgtcagcagtcaatgatgaatctttctgaaattgcacatggaattgtgaaaactatgaatcagggtatgaaattcaaaacctccacctgcccatgctgcttgcatccctggagaatcttctgtggacatcgacctcttagtgatgctgccaggataatttctgcttgccatgggcatctggccaccaaggaatttcgcaccctgacgattactcttgacacttttatgtattccattgttttatatgattttcctaacaatcatttataattggatgtgctcctgaatctactttttataaaaaaaaaaaaatctgctgtgcacaattttccatgtacattacaactggttttttgtttttgttttgttgccggtggggagggctgggagggggagggaacttttatttattgtgaacacaaactccatcctttcagcatatccttttaagtttagttctttcttccagttatactatgtactatcagttttgatataactatatatatataaatataaaattatatataaagggttatttgaaaccaatccatggcaaacgctggtgcttgatacactgtgaagtgaatacaacattgaacagttacagatctgggacagtcccttctatgaaagtgctgaaatttaattaaaatcagtcttacatgaagtatgttccaatccatgtgggaacttgactctctcatctgtctaaagagtactggacgatataaaaatatatattttttaaacaatgtgatctcaaatttaaagactgctccagatagcctgcatttgcaatggaataactgacaaatcacaagtggtttagttgggcagggctttgatcattcaaaagtaactaaagtagctccagaatgccaagtattcgtgtaaattacggttacatgttatcatttgctgttcttacataagcactcatgaaaatatggtattctgtaacttgaattccatccattttccagacgtctactcatgtctgaggtaaatctagaaattgtcttagttttaggattgaaacagtctataaactgtatttttggtccatccaggaagctagtccctggtttctcctttctacatgacattgcagtggtggtttctgtaattaaaatttgtttgcctcatgtccctttgtctgataaaccttcactctaccgattcagttgtgagcattctttttttccttctcaaaacctactatgatttgttttactgaacaaaggttatcaaccacacatccagtcctgacatggagcttttcagtgttggagacatttctcaatcccctgctgtggtaggaactccagtggtgaacggcttgcgcgcctgcagccagagttgcaggggaaagctcgtacttactgcgagcagcatgtaatcttttttcttcctggacataaagatagcttgagtaaactgttctatttcattctcttcactctttttactgtcttgcaaaaaaaaaaaaaataataataataatcaaagaccactaataagattccacctctccttattaaaataattttttaaaattttggttttgcttttgttttggattgggtctctcttctatttgacttttacatttagatacagagtttgtagtacttcagagacatttcaagcatgagaatttgaggttacctctctttatttgacctttagggactcacgggagggcagcctgatttgtaatgaagcaccacattttggtgttaagaacctggtttgcttaataatagcagtaatttctgtgtgtggaggcaacaaataaaaaaattaacagcttgaattgagtagccaacaggaaaggttcctttcacatttacattaaaactattctgtagtcactaatgtaccataatttaaattcttttctcaaaggtatagattataaagcagtgccatttgttgctgtggtcctattctcaaatgcatggacaatgttcccccctttttaaaataatgcttgtgtctgggatgcaagctttgcttatctttttaaatacatttttaaagtatttattaatgaaccaaaggaaatcagatgctttctataagcatcagaatatataatacatagtgatttgactatgaattttaaatccacattttaatattggtgggatattgcaaagacattccttctaaagttttaatattccttttattaagggtctcagggagggtaaattagtcagccatatttattttccagaggtttaagaaattgctgtttttaactttttgaaaaaacttaaatgccaccaaactcatgtaggttgcactgcttattgaaccaataactgttggtatgcactttgttcagacacactgtgtactttttcaaaaactagtttcatgtaaagtgattggaccccatagattagtggaaaaagctgattaaccagctactcataggctgctaattcattcatgccaatgttttggtttttcagttttgcctccgtgataaattaaagaatggggaggggtgaaggaaggggaagaagattgctttagaacaagtggcatgaaattaccatctttgtagaaaccgcagctaacagtgggagttatctaagcaatcagatgttacagggccagcccctttagctgctgtggtgtattctgttgggtagtgaggtagtaggtactttatagacttttaattttggaaattgatgacatccctcaggcatgtattctggaaatggaattcctgtaacttcctgtgtctgcagtatgccctacaattagtaggcagcgtgtaaaaacactagtgtagattataaagatatacattaaaagaggaccagaaatacttggtattcagtggcacagaaagcaggttaaacaaacaaaaagcacagtgttacgcttgcaagtttccatttgttttaataccacgcaatctttcacactcgtgcgtgtgcgcgcacacagagcttacctgacttgctctgcttgagtcatgcagttacaaaaaaaaagacatcttgacacccacacaatattctaatcaaaacctttcagtttcaatctggatatttaaaaacattggcagaagcctctgtgagtttagttccactaagatgtttcacctgccttatcaagaccattctcagtctacttttttaagctaccgtatcttaaattattgaaaatttattaattgctgaatatataataacctttgcttgtatgtaaccgaaaatggtttaagagccaacatttagagtatgacaatggagctgaacagtttttaatgcgcaagcagttctgttcttgtgtatgacttgtaaccttaatttactgtgtaaagatggttacattatttccttagctttgtttgttggagacaaatagagaatgcttgttaagtatgtcaaaacaatcttatcttgtgaatttttgttaatgtattatacgagctatatttttcatttgcccagaaagacagcttgtataacgctttnggaagtttctgctcngtaatgtctttagagctgacagtctgttaggttngtttttttcttcatgctaaagtgtcagttggtggttttgtgaactggtcaaaaattcacaggtcttaaatgttttgggggaaatttatattggacactgctctttgtctagcaaataaaagatgttaatatattcctgttactggcatgtgcacgactatgttattagaagccactttatcattttcctgctttaaatagaaatgtctatttatgaattctgcttgtagttttttcacaaataaaatagtaaaatttaaaaaaaaaaaaaacaaaaaaaaaaaaaaaaaaaaaaa

SEQ ID NO: 594 - protein, 226 aa, Homo sapien
MGDKKSPTRPKRQAKPAADEGFWDCSVCTFRNSAEAFKCSICDVRKGTSTRKPRINSQLVAQQVAQQYATPPPPKKEKKEKVEKQDKEKPEKDKEISPSVTKKNTNKKTKPKSDILKDPPSEANSIQSANATTKTSETNHTSRPRLKNVDRSTAQQLAVTVGNVTVIITDFKEKTRSSSTSSSTVTSSAGSEQQNQSSSGSESTDKGSSRSSTPKGDMSAVNDESF

SEQ ID NO: 595 - DNA, 1535 bp, Homo sapien
cctccgctcagtccgggagcgcacgtgggccgcggcgctccgacctccgctttcccaccgcccgcagctgaagcacatcccgcagcccggcgcggactccgatcgccgcagttgccctctggcgccatgtcgcagaacggagcgcccgggatgcaggaggagagcctgcagggctcctgggtagaactgcacttcagcaataatgggaacgggggcagcgttccagcctcggtttctatttataatggagacatggaaaaaatactgctggacgcacagcatgagtctggacggagtagctccaagagctctcactgtgacagcccacctcgctcgcagacaccacaagataccaacagggcttctgaaacagatacccatagcattggagagaaaaacagctcacagtctgaggaagatgatattgaaagaaggaaagaagttgaaagcatcttgaagaaaaactcagattggatatgggattggtcaagtcggccggaaaatattccccccaaggagttcctctttaaacacccgaagcgcacggccaccctcagcatgaggaacacgagcgtcatgaagaaagggggcatattctctgcagaatttctgaaagttttccttccatctctgctgctctctcatttgctggccatcggattggggatctatattggaaggcgtctgacaacctccaccagcaccttttgatgaagaactggagtctgacttggttcgttagtggattacttctgagcttgcaacatagctcactgaagagctgttagatcctggggtggccacgtcacttgtgtttatttgttctgtaaatgctgcgttcctaatttagtaaaataaaagaatagacactaaaatcatgttgatctataattacacctatgggatcaataagcatgtcagactgattaatgtctactgtgaaaatttggtagtaaattttcatttgatattagatataaatatctgaatataaataattttaatatactagtcatgatgtgtgttgtattttaaaaattatctgcaaccttaattcagctgaagtactttatatttcaaaagaatgaataacattgataataaaatcgctactttaaggggtttgtccaaaataaatattgtggccttatatatcacactattgtagaaagtattatttaatttaaatggatgcaggttgtctactaaagaaagattatatataactatgctaattgttcataatcaacagaaaccaagatagagctacaaactcagctgtacagttcgtacactaaactcttcttgcttttgcattataaggaattaagtctccgattattaggtgatcaccctggatgatcagttttctgctgaaggcacctactcagtatcttttcctctttatcactctgcattggtgaatttaatcctctcctttgtgttcaacttttgtgtgcttttaaaatcagctttattctaagcaaatctgtgtctactttaaaaaactggaaatggaaaaaaaaataaatctt

SEQ ID NO: 596 - protein, 194 aa, Homo sapien
MSQNGAPGMQEESLQGSWVELHFSNNGNGGSVPASVSIYNGDMEKILLDAQHESGRSSSKSSHCDSPPRSQTPQDTNRASETDTHSIGEKNSSQSEEDDIERRKEVESILKKNSDWIWDWSSRPENIPPKEFLFKHPKRTATLSMRNTSVMKKGGIFSAEFLKVFLPSLLLSHLLAIGLGIYIGRRLTTSTSTF

SEQ ID NO: 597 - DNA, 1535 bp, Homo sapien; identical to SEQ ID NO: 595

SEQ ID NO: 598 - protein, 194 aa, Homo sapien; identical to SEQ ID NO: 596

SEQ ID NO: 599 - DNA, 3195 bp, Homo sapien
agaggcttccctggctggtgcctgagcccggcgtccctcgccccccgccctccccgcatccctctcctccctcgcgcctggccctgtggctcttcctccctccctccttccccccccccccacccctcgcccgctgcctccctcggcccagccagctgtgccggcgtttgttggctgccctgcgcccggccctccagccagccttctgccggccccgccgcgatggaggtgccccagccggagcccgcgccaggctcggctctcagtccagcaggcgtgtgcggtggcgcccagcgtccgggccacctcccgggcctcctgctgggatctcatggcctcctggggtccccggtgcgggcggccgcttcctcgccggtcaccaccctcacccagaccatgcacgacctcgccgggctcggcagccgcagccgcctgacgcacctatccctgtctcgacgggcatccgaatcctccctgtcgtctgaatcctccgaatcttctgatgcaggtctctgcatggattcccccagccctatggacccccacatggcggagcagacgtttgaacaggccatccaggcagccagccggatcattcgaaacgagcagtttgccatcagacgcttccagtctatgccggtgaggctgctgggccacagccccgtgcttcggaacatcaccaactcccaggcgcccgacggccggaggaagagcgaggcgggcagtggagctgccagcagctctggggaagacaaggagaatgtgcgcttctggaaggccggggtgggagctctccgggaagaggagggggcatgctggggtggttccctggcatgtgaggaccctcctctcccatcttggctgcaggatggatttgtcttcaagatgccatggaagcccacacatcccagctccacccatgctctggcagagtgggccagccgcagggaagcctttgcccagagacccagctcggcccccgacctgatgtgtctcagtcctgaccggaagatggaagtggaggagctcagccccctggccctaggtcgcttctctctgacccctgcagagggggatactgaggaagatgatggatttgtggacatcctagagagtgacttaaaggatgatgatgcagttcccccaggcatggagagtctcattagtgccccactggtcaagaccttggaaaaggaagaggaaaaggacctcgtcatgtacagcaagtgccagcggctcttccgctctccgtccatgccctgcagcgtgatccggcccatcctcaagaggctggagcggccccaggacagggacacgcccgtgcagaataagcggaggcggagcgtgacccctcctgaggagcagcaggaggctgaggaacctaaagcccgcgtcctccgctcaaaatcactgtgtcacgatgagatcgagaacctcctggacagtgaccaccgagagctgattggagattactctaaggccttcctcctacagacagtagacggaaagcaccaagacctcaagtacatctcaccagaaacgatggtggccctattgacgggcaagttcagcaacatcgtggataagtttgtgattgtagactgcagatacccctatgaatatgaaggcgggcacatcaagactgcggtgaacttgcccctggaacgcgacgccgagagcttcctactgaagagccccatcgcgccctgtagcctggacaagagagtcatcctcattttccactgtgaattctcatctgagcgtgggccccgcatgtgccgtttcatcagggaacgagaccgtgctgtcaacgactaccccagcctctactaccctgagatgtatatcctgaaaggcggctacaaggagttcttccctcagcacccgaacttctgtgaaccccaggactaccggcccatgaaccacgaggccttcaaggatgagctaaagaccttccgcctcaagactcgcagctgggctggggagcggagccggcgggagctctgtagccggctgcaggaccagtgaggggcctgcgccagtcctgctacctcccttgcctttcgaggcctgaagccagctgccctatgggcctgccgggctgagggcctgctggaggcctcaggtgctgtccatgggaaagatggtgtggtgtcctgcctgtctgccccagcccagattcccctgtgtcatcccatcattttccatatcctggtgccccccacccctggaagagcccagtctgttgagttagttaagttgggttaataccagcttaaaggcagtattttgtgtcctccaggagcttcttgtttccttgttagggttaacccttcatcttcctgtgtcctgaaacgctcctttgtgtgtgtgtcagctgaggctggggagagccgtggtccctgaggatgggtcagagctaaactccttcctggcctgagagtcagctctctgccctgtgtacttcccgggccagggctgcccctaatctctgtaggaaccgtggtatgtctgccatgttgcccctttctcttttcccctttcctgtcccaccatacgagcacctccagcctgaacagaagctcttactctttcctatttcagtgttacctgtgtgcttggtctgtttgactttacgcccatctcaggacacttccgtagactgtttaggttcccctgtcaaatatcagttacccactcggtcccagttttgttgccccagaaagggatgttattatccttgggggctcccagggcaagggttaaggcctgaatcatgagcctgctggaagcccagcccctactgctgtgaaccctggggcctgactgctcagaacttgctgctgtcttgttgcggatggatggaaggttggatggatgggtggatggccgtggatggccgtggatgcgcagtgccttgcatacccaaaccaggtgggagcgttttgttgagcatgacacctgcagcaggaatatatgtgtgcctatttgtgtggacaaaaatatttacacttagggtttggagctattcaagaggaaatgtcacagaagcagctaaaccaaggactgagcaccctctggattctgaatctcaagatgggggcagggctgtgcttgaaggccctgctgagtcatctgttagggccttggttcaataaagcactgagcaagttgagaaaaaaaaaaaaaaaaaaa

SEQ ID NO: 600 - protein, 601 aa, Homo sapien
MEVPQPEPAPGSALSPAGVCGGAQRPGHLPGLLLGSHGLLGSPVRAAASSPVTTLTQTMHDLAGLGSRSRLTHLSLSRRASESSLSSESSESSDAGLCMDSPSPMDPHMAEQTFEQAIQAASRIIRNEQFAIRRFQSMPVRLLGHSPVLRNITNSQAPDGRRKSEAGSGAASSSGEDKENVRFWKAGVGALREEEGACWGGSLACEDPPLPSWLQDGFVFKMPWKPTHPSSTHALAEWASRREAFAQRPSSAPDLMCLSPDRKMEVEELSPLALGRFSLTPAEGDTEEDDGFVDILESDLKDDDAVPPGMESLISAPLVKTLEKEEEKDLVMYSKCQRLFRSPSMPCSVIRPILKRLERPQDRDTPVQNKRRRSVTPPEEQQEAEEPKARVLRSKSLCHDEIENLLDSDHRELIGDYSKAFLLQTVDGKHQDLKYISPETMVALLTGKFSNIVDKFVIVDCRYPYEYEGGHIKTAVNLPLERDAESFLLKSPIAPCSLDKRVILIFHCEFSSERGPRMCRFIRERDRAVNDYPSLYYPEMYILKGGYKEFFPQHPNFCEPQDYRPMNHEAFKDELKTFRLKTRSWAGERSRRELCSRLQDQ

SEQ ID NO: 601 - DNA, 3568 bp, Homo sapien
ccggtcctgagacacgctgtgtggctgaaaagtgaaggcaagagctcatttggcctctgtgctcccctccgcaagggatcgtttctccagaagagctggatattctttcgcccagttatggcagacaagttaacgagaattgctattgtcaaccatgacaaatgtaaacctaagaaatgtcgacaggaatgcaaaaagagttgtcctgtagttcgaatgggaaaattatgcatagaggttacaccccagagcaaaatagcatggatttccgaaactctttgtattggttgtggtatctgtattaagaaatgcccctttggcgccttatcaattgtcaatctaccaagcaacttggaaaaagaaaccacacatcgatattgtgccaatgccttcaaacttcacaggttgcctatccctcgtccaggtgaagttttgggattagttggaactaatggtattggaaagtcagctgctttaaaaattttagcaggaaaacaaaagccaaaccttggaaagtacgatgatcctcctgactggcaggagattttgacttatttccgtggatctgaattacaaaattactttacaaagattctagaagatgacctaaaagccatcatcaaacctcaatatgtagccagattcctaaggctggcaaaggggacagtgggatctattttggaccgaaaagatgaaacaaagacacaggcaattgtatgtcagcagcttgatttaacccacctaaaagaacgaaatgttgaagatctttcaggaggagagttgcagagatttgcttgtgctgtcgtttgcatacagaaagctgatattttcatgtttgatgagccttctagttacctagatgtcaagcagcgtttaaaggctgctattactatacgatctctaataaatccagatagatatatcattgtggtggaacatgatctaagtgtattagactatctctccgacttcatctgctgtttatatggtgtaccaagcgcctatggagttgtcactatgccttttagtgtaagagaaggcataaacatttttttggatggctatgttccaacagaaaacttgagattcagagatgcatcacttgtttttaaagtggctgagacagcaaatgaagaagaagttaaaaagatgtgtatgtataaatatccaggaatgaagaaaaaaatgggagaatttgagctagcaattgtagctggagagtttacagattctgaaattatggtgatgctgggggaaaatggaacgggtaaaacgacatttatcagaatgcttgctggaagacttaaacctgatgaaggaggagaagtaccagttctaaatgtcagttataagccacagaaaattagtcccaaatcaactggaagtgttcgccagttactacatgaaaagataagagatgcttatactcacccacaatttgtgaccgatgtaatgaagcctctgcaaattgaaaacatcattgatcaagaggtgcagacattatctggtggtgaactacagcgagtacgtttacgcctttgcttgggcaaacctgctgatgtctatttaattgatgaaccatctgcatatttggattctgagcaaagactgatggcagctcgagttgtcaaacgtttcatactccatgcaaaaaagacagcctttgttgtggaacatgacttcatcatggccacctatctagcggatcgcgtcatcgtttttgatggtgttccatctaagaacacagttgcaaacagtcctcaaacccttttggctggcatgaataaatttttgtctcagcttgaaattacattcagaagagatccaaacaactataggccacgaataaacaaacttaattcaattaaggatgtagaacaaaagaagagtggaaactactttttcttggatgattagactgactctgagaatattgataagccatttattaaaaggagtatttactagaattttttgtcatataaaacttgaatcaggattttatgccccacatactctggaacttgaagtataatatacttaatataacataaaaagccagttgggttctaaattgtagttgaaacacagaaaatgccacttttctgttcctgaagaggctcttttgtgcataatattctaaaatgaagacatttcaagctatacaaattacttccaagttttcatgatgtatgggaagattttcagtaggtgtattatattcacggtaccaaatgctgaccagtgttgctccattttttaaatcttgaaaagggtttctgtacttacctggtttgccaagtatgccagtgtaatgaaactgcccttattttaaaagccagtcaaagattccactgattgacatttgataaataaacatcaggattatgtttattgtttgttttcagtctttgcactatattaccagtatatggtttccgaggaagattatctactgcaaaacaccactgttggaaaaataggtatttttaaattgtttttaatccttttttggtgcttttaaacatgtttaagcaaaaaccaattcagtccattccccgcaaaaaacccctaactttactctgaactttttttgtttttgcattccatgaggttctgtattcagtcattctctaggtaatgtcatttttgtacacatatatttatataatcactgattgagatttaggaaaaagcatttctaaagaatatttgcttcccttagaactacagactcgaaatctttaaagatggtgcctaagcatctatgtattttttttaagttccacagatttttctgttgggcaggccaaggattataaaccacttccctaaaggcaacattaatgcaaaagtccccagatggcaatacaaagtatcccctggtaccacatatattcatttgtgagtttggatatagagcacattatctaaaccattttgtagttccaaaaacccatctaaatttcttgagttcctgaattttgaacaggattacctggagcctggagccactttaagttgtacttctgactaaactggaattatgagtgaggaagagtgtttactaaataaatgactggggcaagcaaaattgaggaggaaattagaaactgtttgacaaactttaagagctacttgaaataacagaagtcttgattaatatgcaaataatggctagaaagtatggtttaactggaccctattatgccttttaaaaataatttcagtaacccataaatacatgttgtaaaaaattcaaatatacagaatggaataaaaaaatgatctccctttattaccctcccaaaggttaccagcgtttgaatttaataatgtatattctttcatgcttttttctgtgcacttacctaagtgtgaatatgtaaagggtttgttttgtatacaaatgggattatactaaaataagtaatgcctatttttaaggataggttaaatttgtgaatgatcatttcaaatatattgaataaaataagcaaaagctattgttatttactgatcctgaaaaaaaaaaaaaaaaaaaaaaaaaaaaaaaaaaaaaaaaaaa

SEQ ID NO: 602 - protein, 599 aa, Homo sapien
MADKLTRIAIVNHDKCKPKKCRQECKKSCPVVRMGKLCIEVTPQSKIAWISETLCIGCGICIKKCPFGALSIVNLPSNLEKETTHRYCANAFKLHRLPIPRPGEVLGLVGTNGIGKSAALKILAGKQKPNLGKYDDPPDWQEILTYFRGSELQNYFTKILEDDLKAIIKPQYVARFLRLAKGTVGSILDRKDETKTQAIVCQQLDLTHLKERNVEDLSGGELQRFACAVVCIQKADIFMFDEPSSYLDVKQRLKAAITIRSLINPDRYIIVVEHDLSVLDYLSDFICCLYGVPSAYGVVTMPFSVREGINIFLDGYVPTENLRFRDASLVFKVAETANEEEVKKMCMYKYPGMKKKMGEFELAIVAGEFTDSEIMVMLGENGTGKTTFIRMLAGRLKPDEGGEVPVLNVSYKPQKISPKSTGSVRQLLHEKIRDAYTHPQFVTDVMKPLQIENIIDQEVQTLSGGELQRVRLRLCLGKPADVYLIDEPSAYLDSEQRLMAARVVKRFILHAKKTAFVVEHDFIMATYLADRVIVFDGVPSKNTVANSPQTLLAGMNKFLSQLEITFRRDPNNYRPRINKLNSIKDVEQKKSGNYFFLDD

SEQ ID NO: 603 - DNA, 2475 bp, Homo sapien
ccggaggagtccgagaggaagcggaggcgcgagctggaggcggcggctcccgtcggcctccggcaggactgagcgctgggaggccggaaggcgggcgcgcacggcggagaggcgggcgggaggccggagcatattaatgaaaagtgccataaactgaaaaaccaaacatgagggtagcaggtgctgcaaagttggtggtagctgtggcagtgtttttactgacattttatgttatttctcaagtatttgaaataaaaatggatgcaagtttaggaaatctatttgcaagatcagcattggacacagctgcacgttctacaaagcctcccagatataagtgtgggatctcaaaagcttgccctgagaagcattttgcttttaaaatggcaagtggagcagccaacgtggtgggacccaaaatctgcctggaagataatgttttaatgagtggtgttaagaataatgttggaagagggatcaatgttgccttggcaaatggaaaaacaggagaagtattagacactaaatattttgacatgtggggaggagatgtggcaccatttattgagtttctgaaggccatacaagatggaacaatagttttaatgggaacatacgatgatggagcaaccaaactcaatgatgaggcacggcggctcattgctgatttggggagcacatctattactaatcttggttttagagacaactgggtcttctgtggtgggaagggcattaagacaaaaagcccttttgaacagcacataaagaacaataaggatacaaacaaatatgaaggatggcctgaagttgtagaaatggaaggatgcatcccccagaagcaagactaatggaaatgtggagagaattgaagaaagcgcactttcactcttaatgggagagctataaatggcagagctatgtgtaaatattttaagagcatgcagccatcttggtgtgtgcatgagtattgtctcttttgatatcaggattatttattgctaacgtaaatagatagcattgtaaataatcatcacaatgatcaaatcactgaaccatgtctccgcacatttccctaaaagtacaatgtttagactgctatggtaatacatattttaaattctaaaagcatacacaatgtgtaactgaatggtttgtgaaaaatatattgatatatatactagttgctatgaaaatatcatggaataatagggattttagggtggatactttattttcttttatgtttctatatgttgcgttgtgatgacattatcttttaaattaaaaagagatttggctagttgtgtgtgtaatgttactttacagtccgactctcctgatgtacctcttttcatgatctttttctttccttcccaagaaactgaggaatgtttaatatgaaaacatacatcggatatgtgaaaagcacaacaaaattcttaatgtacacagtaaaaaagtaaatatataaatgtagatggcatttaggaccacagcttgctggatttgtgttagctatgggaataacttgattttgtataagctatttagagtgaggctggaggtggcagcttcacagaactggagaaccaggccaagtcccctccccaacctaattaggtcattcaggacagctaagtcagtatatttagagcaatactagcatacgtttttcttaattgttatcagcattgaccaagtggtttggaaggaggcatgctttaatatcacaataattttgatttgtaaaccaagaaattaatcctgtgtttatctaacttcataatagcaattattgcccgaagctatagtggcatatttacaaaagttcttattactgggcggactgataacatttaaaaaataattgtgtttgaccccaaatgactttatacccaattctacataaaaatatagaagatctatctttttttgttaccttcagatgttcactaaataactcagtttttaagcagaagttttcagggcattaaatatatgttgtgtatgaagtatctcaaactggaacataaatttagtgatcaaactgccattcacagtgtaaggcagcacttaaatttcgaacctaaagtttagatgcattgtataaaaaaacctaaaagcagtatctgttatttagctgtaaaccaagttggaagctattcggataatttcttaaatattgatgaactttggagtactgtttcttccttcaaactgaatgtaattaattcatgaataaatgcaccttatatgtttaaacaatctttgtatacttttgggatttttggtgcttatatgctaaatcacattcagcatgtgtattttgacatttaaaatacttccctcaattctgtaaattaaaagaatagttattttacagttccagggattgtgaaataaatgttgcagttttttaaaataatgaaaataaatactcttggttttgctttgtgaaaaaaaaaaaaaaaa

SEQ ID NO: 604 - protein, 227 aa, Homo sapien
MRVAGAAKLVVAVAVFLLTFYVISQVFEIKMDASLGNLFARSALDTAARSTKPPRYKCGISKACPEKHFAFKMASGAANVVGPKICLEDNVLMSGVKNNVGRGINVALANGKTGEVLDTKYFDMWGGDVAPFIEFLKAIQDGTIVLMGTYDDGATKLNDEARRLIADLGSTSITNLGFRDNWVFCGGKGIKTKSPFEQHIKNNKDTNKYEGWPEVVEMEGCIPQKQD

SEQ ID NO: 605 - DNA, 3393 bp, Homo sapien
cccaggcgcagccaatgggaagggtcggaggcatggcacagccaatgggaagggccggggcaccaaagccaatgggaagggccgggagcgcgcggcgcgggagatttaaaggctgctggagtgaggggtcgcccgtgcaccctgtcccagccgtcctgtcctggctgctcgctctgcttcgctgcgcctccactatgctctccctccgtgtcccgctcgcgcccatcacggacccgcagcagctgcagctctcgccgctgaaggggctcagcttggtcgacaaggagaacacgccgccggccctgagcgggacccgcgtcctggccagcaagaccgcgaggaggatcttccaggagcccacggagccgaaaactaaagcagctgcccccggcgtggaggatgagccgctgctgagagaaaacccccgccgctttgtcatcttccccatcgagtaccatgatatctggcagatgtataagaaggcagaggcttccttttggaccgccgaggaggttgacctctccaaggacattcagcactgggaatccctgaaacccgaggagagatattttatatcccatgttctggctttctttgcagcaagcgatggcatagtaaatgaaaacttggtggagcgatttagccaagaagttcagattacagaagcccgctgtttctatggcttccaaattgccatggaaaacatacattctgaaatgtatagtcttcttattgacacttacataaaagatcccaaagaaagggaatttctcttcaatgccattgaaacgatgccttgtgtcaagaagaaggcagactgggccttgcgctggattggggacaaagaggctacctatggtgaacgtgttgtagcctttgctgcagtggaaggcattttcttttccggttcttttgcgtcgatattctggctcaagaaacgaggactgatgcctggcctcacattttctaatgaacttattagcagagatgagggtttacactgtgattttgcttgcctgatgttcaaacacctggtacacaaaccatcggaggagagagtaagagaaataattatcaatgctgttcggatagaacaggagttcctcactgaggccttgcctgtgaagctcattgggatgaattgcactctaatgaagcaatacattgagtttgtggcagacagacttatgctggaactgggttttagcaaggttttcagagtagagaacccatttgactttatggagaatatttcactggaaggaaagactaacttctttgagaagagagtaggcgagtatcagaggatgggagtgatgtcaagtccaacagagaattcttttaccttggatgctgacttctaaatgaactgaagatgtgcccttacttggctgattttttttttccatctcataagaaaaatcagctgaagtgttaccaactagccacaccatgaattgtccgtaatgttcattaacagcatctttaaaactgtgtagctacctcacaaccagtcctgtctgtttatagtgctggtagtatcaccttttgccagaaggcctggctggctgtgacttaccatagcagtgacaatggcagtcttggctttaaagtgaggggtgaccctttagtgagcttagcacagcgggattaaacagtcctttaaccagcacagccagttaaaagatgcagcctcactgcttcaacgcagattttaatgtttacttaaatataaacctggcactttacaaacaaataaacattgttttgtactcacggcggcgataatagcttgatttatttggtttctacaccaaatacattctcctgaccactaatgggagccaattcacaattcactaagtgactaaagtaagttaaacttgtgtagactaagcatgtaatttttaagttttattttaatgaattaaaatatttgttaaccaactttaaagtcagtcctgtgtatacctagatattagtcagttggtgccagatagaagacaggttgtgtttttatcctgtggcttgtgtagtgtcctgggattctctgccccctctgagtagagtgttgtgggataaaggaatctctcagggcaaggagcttcttaagttaaatcactagaaatttaggggtgatctgggccttcatatgtgtgagaagccgtttcattttatttctcactgtattttcctcaacgtctggttgatgagaaaaaattcttgaagagttttcatatgtgggagctaaggtagtattgtaaaatttcaagtcatccttaaacaaaatgatccacctaagatcttgcccctgttaagtggtgaaatcaactagaggtggttcctacaagttgttcattctagttttgtttggtgtaagtaggttgtgtgagttaattcatttatatttactatgtctgttaaatcagaaattttttattatctatgttcttctagattttacctgtagttcatacttcagtcacccagtgtcttattctggcattgtctaaatctgagcattgtctagggggatcttaaactttagtaggaaaccatgagctgttaatacagtttccattcaaatattaatttcagaatgaaacataattttttttttttttttgagatggagtctcgctctgttgcccaggctggagtgcagtggcgcgattttggctcactgtaacctccatctcctgggttcaagcaattctcctgtctcagcctccctagtagctgggactgcaggtatgtgctaccacacctggctaatttttgtatttttagtagagatggagtttcaccatattggtcaggctggtcttgaactcctgacctcaggtgatccacccacctcggcctcccaaagtgctggggattgcaggcgtgataaacaaatattcttaatagggctactttgaattaatctgcctttatgtttgggagaagaaagctgagacattgcatgaaagatgatgagagataaatgttgatcttttggccccatttgttaattgtattcagtatttgaacgtcgtcctgtttattgttagttttcttcatcatttattgtatagacaatttttaaatctctgtaatatgatacattttcctatcttttaagttattgttacctaaagttaatccagattatatggtccttatatgtgtacaacattaaaatgaaaggctttgtcttgcattgtgaggtacaggcggaagttggaatcaggttttaggattctgtctctcattagctgaataatgtgaggattaacttctgccagctcagaccatttcctaatcagttgaaagggaaacaagtatttcagtctcaaaattgaataatgcacaagtcttaagtgattaaaataaaactgttcttatgtc

SEQ ID NO: 606 - protein, 389 aa, Homo sapien
MLSLRVPLAPITDPQQLQLSPLKGLSLVDKENTPPALSGTRVLASKTARRIFQEPTEPKTKAAAPGVEDEPLLRENPRRFVIFPIEYHDIWQMYKKAEASFWTAEEVDLSKDIQHWESLKPEERYFISHVLAFFAASDGIVNENLVERFSQEVQITEARCFYGFQIAMENIHSEMYSLLIDTYIKDPKEREFLFNAIETMPCVKKKADWALRWIGDKEATYGERVVAFAAVEGIFFSGSFASIFWLKKRGLMPGLTFSNELISRDEGLHCDFACLMFKHLVHKPSEERVREIIINAVRIEQEFLTEALPVKLIGMNCTLMKQYIEFVADRLMLELGFSKVFRVENPFDFMENISLEGKTNFFEKRVGEYQRMGVMSSPTENSFTLDADF

SEQ ID NO: 607 - DNA, 1654 bp, Homo sapien
gaattcgggcggtcctcggagacacgcggcggtgtcctgtgttggccatggccgactacctgattagtgggggcacgtcctacgtgccagacgacggactcacagcacagcagctcttcaactgcggagacggcctcacctacaatgactttctcattctccctgggtacatcgacttcactgcagaccaggtggacctgacttctgctctgaccaagaaaatcactcttaagaccccactggtttcctctcccatggacacagtcacagaggctgggatggccatagcaatggcgcttacaggcggtattggcttcatccaccacaactgtacacctgaattccaggccaatgaagttcggaaagtgaagaaatatgaacagggattcatcacagaccctgtggtcctcagccccaaggatcgcgtgcgggatgtttttgaggccaaggcccggcatggtttctgcggtatcccaatcacagacacaggccggatggggagccgcttggtgggcatcatctcctccagggacattgattttctcaaagaggaggaacatgactgtttcttggaagagataatgacaaagagggaagacttggtggtagccccccgcagcatcacactgaaggaggcaaatgaaattctgcagcgcagcaagaagggaaagttgcccattgtaaatgaagatgatgagcttgtggccatcattgcccggacagacctgaagaagaatcgggactacccactagcctccaaagatgccaagaaacagctgctgtgtggggcagccattggcactcatgaggatgacaagtataggctggacttgctcgcccaggctggtgtggatgtagtggttttggactcttcccagggaaattccatcttccagatcaatatgatcaagtacatcaaagacaaataccctaatctccaagtcattggaggcaatgtggtcactgctgcccaggccaagaacctcattgatgcaggtgtggatgccctgcgggtgggcatgggaagtggctccatctgcattacgcaggaagtgctggcctgtgggcggccccaagcaacagcagtgtacaaggtgtcagagtatgcacggcgctttggtgttccggtcattgctgatggaggaatccaaaatgtgggtcatattgcgaaagccttggcccttggggcctccacagtcatgatgggctctctcctggctgccaccactgaggcccctggtgaatacttcttttccgatgggatccggctaaagaaatatcgcggtatgggttctctcgatgccatggacaagcacctcagcagccagaacagatatttcagtgaagctgacaaaatcaaagtggcccagggagtgtctggtgctgtgcaggacaaagggtcaatccacaaatttgtcccttacctgattgctggcatccaacactcatgccaggacattggtgccaagagcttgacccaagtccgagccatgatgtactctggggagcttaagtttgagaagagaacgtcctcagcccaggtggaaggtggcgtccatagcctccattcgtatgagaagcggcttttctgaaaagggatccagcacacctcctcggtttttttttcaataaaagtttagaaagacccgaattc

SEQ ID NO: 608 - protein, 514 aa, Homo sapien
MADYLISGGTSYVPDDGLTAQQLFNCGDGLTYNDFLILPGYIDFTADQVDLTSALTKKITLKTPLVSSPMDTVTEAGMAIAMALTGGIGFIHHNCTPEFQANEVRKVKKYEQGFITDPVVLSPKDRVRDVFEAKARHGFCGIPITDTGRMGSRLVGIISSRDIDFLKEEEHDCFLEEIMTKREDLVVAPRSITLKEANEILQRSKKGKLPIVNEDDELVAIIARTDLKKNRDYPLASKDAKKQLLCGAAIGTHEDDKYRLDLLAQAGVDVVVLDSSQGNSIFQINMIKYIKDKYPNLQVIGGNVVTAAQAKNLIDAGVDALRVGMGSGSICITQEVLACGRPQATAVYKVSEYARRFGVPVIADGGIQNVGHIAKALALGASTVMMGSLLAATTEAPGEYFFSDGIRLKKYRGMGSLDAMDKHLSSQNRYFSEADKIKVAQGVSGAVQDKGSIHKFVPYLIAGIQHSCQDIGAKSLTQVRAMMYSGELKFEKRTSSAQVEGGVHSLHSYEKRLF

SEQ ID NO: 609 - DNA, 717 bp, Mus musculus
agagcgatcatgtcgcacaaacaaatttactattcggacaaatacgacgacgaggagtttgagtatcgacatgtcatgctgcccaaggacatagccaagctggtccctaaaacccatctgatgtctgaatctgaatggaggaatcttggcgttcagcagagtcagggatgggtccattatatgatccatgaaccagaacctcacatcttgctgttccggcgcccactacccaagaaaccaaagaaatgaagctggcaagctacttttcagcctcaagctttacacagctgtccttacttcctaacatctttctgataacattattatgttgccttcttgtttctcactttgatatttaaaagatgttcaatacactgtttgaatgtgctggtaactgctttgcttcttgagtagagccaccaccaccatagcccagccagatgagtgctctgtggacccacagcctaagctgagtgtgaccccagaagccacgatgtgctctgtatccagaacacacttggcagatggaggaagcatctgagtttgagaccatggctgttacagggatcatgtaaacttgctgtttttgttttttctgccgggtgttgtatgtgtggtgacttgcggatttatgtttcagtgtactggaaactttccattttattcaagaaatctgttcatgttaaaagccttgattaaagaggaagtttttataat

SEQ ID NO: 610 - protein, 79 aa, Mus musculus [sequence omitted]

SEQ ID NO: 611 - DNA, 2001 bp, Homo sapien
gaagggcggcgcgcttaggcaggcggtggcgcggctggagtgccgcggggagggctgtgccggttgctttctgcagccgcatctcggccagctctcctcgccgtccccggggcgctgtgcgtctccagtccgggaccgaagccgcctgccgtagcgggcggccagatccgcgtcccgcctcagcggccggaggacatgcgggagagagaatgagccagagggacacgctggtgcatctgtttgccggaggatgtggtggtacagtgggagctattctgacatgtccactggaagttgtaaaaacacgactgcagtcatcttctgtgacgctttatatttctgaagttcagctgaacaccatggctggagccagtgtcaaccgagtagtgtctcccggacctcttcattgcctaaaggtgatcttggaaaaagaagggcctcgttccttgtttagaggactaggccccaatttagtgggggtagccccttccagagcaatatactttgctgcttattcaaactgcaaggaaaagttgaatgatgtatttgatcctgattctacccaagtacatatgatttcagctgcaatggcaggttttactgcaatcacagcaaccaaccccatttggcttataaagactcggttacagcttgatgcaaggaaccgcggggaaaggcgaatgggtgcttttgaatgtgttcgtaaagtgtatcagacagatggactaaaaggattttataggggcatgtctgcttcatatgctggtatatcagagactgttatccattttgttatttatgaaagtataaaacaaaaactactggaatataagactgcttctacaatggaaaatggtgaagagtctgtgaaagaagcatcagattttgtgggaatgatgctagctgctgccacctcaaaaacttgtgccacaactatagcatatccacatgttgtaagaacaagactacgtgaagagggaacaaaatacagatctttttttcagactctatctttgcttgttcaagaagaaggttatgggtctctttatcgtggtctgacaactcatctagtgagacagattccaaacacagccattatgatggccacctatgaattggtggtttacctactcaatggatagcagcacgaggactgctgtactgcaaaaaaagaagaccaaaagattacagtggaccatgggatacagaagccagcatggcagacagaagaaaaatagtttgggaacatgtaactattctaagtggaagttttgttgtaggaattatagtaatcacaccacattacttggcctttcggtaatgtgaaaaaaaaaaaaaaacctcagagcctccaaggaaatgcctttagaagcactcctctctcaaaattgccattttctctaccatgtcccccagacacagttgggttttgttgatttatggcagtcttctaaacaaagccatccttaattttacatactgtattgtaactatccaaagatagtattggcagtcataaatttataacttctggcctttgtttaattccagtaaaataacagcaatgacaatgagatcgtcagtattattttcacatttccctgagaggacctggcacaatattttaaatttaattatttggcagtagtcactgtttttgacaaccaatgaaatagcgtctaaatatcttgtatattttttagcatcaaaatgttttggtttccactgctgacaggtgcttgttgtttagcctaatgtggatatttaaattgttaacataccaaacacacatggtaatagtttgggacaaaataactagtaaaatgttgatttctcggctatttcactgactgcggcatgtcctcgtgtcttctctgattttgtggtacatgaatgaatgcatttatctttttagtgacttactagttacgaacttgaattatcacctctttgtcatacttaagtatcatttacataaagtgtaaaagattttttcacttt

SEQ ID NO: 612 - protein, 310 aa, Homo sapien
MSQRDTLVHLFAGGCGGTVGAILTCPLEVVKTRLQSSSVTLYISEVQLNTMAGASVNRVVSPGPLHCLKVILEKEGPRSLFRGLGPNLVGVAPSRAIYFAAYSNCKEKLNDVFDPDSTQVHMISAAMAGFTAITATNPIWLIKTRLQLDARNRGERRMGAFECVRKVYQTDGLKGFYRGMSASYAGISETVIHFVIYESIKQKLLEYKTASTMENGEESVKEASDFVGMMLAAATSKTCATTIAYPHVVRTRLREEGTKYRSFFQTLSLLVQEEGYGSLYRGLTTHLVRQIPNTAIMMATYELVVYLLNG

SEQ ID NO: 613 - DNA, 1470 bp, Homo sapien
agagccgccagcgaggctggggatgggggcgccgctgctctctcccggctggggagccggggctgccggccggcgctggtggatgctgctggcgcccctgctgccggcgctgctgctggtgcggcccgcgggggccctggtggaggggctctactgcggcacgcgggactgctacgaggtgctgggcgtgagccgctcggcgggcaaggcggagatcgcgcgggcctaccgccagctggcccggcgctaccaccctgaccgctaccggccccagcccggagacgagggccccgggcggacgccgcagagcgccgaggaggctttcctgctggtggcaaccgcctacgagacactcaaggtctctcaggcagctgcagagcttcaacagtactgtatgcagaatgcctgcaaggatgccctgctggtgggtgttccagctggaagtaaccccttccgggagcctagatcctgtgctttactctgaagactcgagagaagtttgctgaggaatgccttcaagcacaaagtgatgaatgactgccttcaagtctcaagaaaacacttttccctaacttttagagatatttcagccctttcctgtggcctggtcctatagccaaaatcacagatattcatgagtttctacttgagtgagaaaactgggtgaaggaatagaattttaaatagtaataactgcttgttttttttgtgcaagtacttttatacataagataaacaaaaaccttaccaccaaacataccaaaatgcacctctttcataagtgagttactaagatttctatacctggaatatcatgtatgtttcatttactggatgtttacattttaggaaggaaaatagttttgtttatttaaacaactgaatacttataaactgttgttcctggaagttatttattccataaaaaatttgttcttttgtcatgaatttataattcctaaatgaagaccagaaagtacaaattgctgggaggaagaataggctttattaatcaactgatgtcttgatttttctaaatgggaagattgctttatttttaacactaattatgggagcagattcttagcaaacttctttggaaaagttaatgttatgatgtgcattaggctgccccatcgtgtatataaatgaagcagatttgatttttgtattcttacgtttctctgctttgtagttgtggctgtacttaaagaaatacagaatttcatatatttaaaaatgtttaaaatgtgacccacagaacattgtaaatgattaaaaactaacatgaaaatattacaacctaaaagaattcttaacttcacaagtgttttacttcgacgatgtgcctttgatttaatttgggacacttttttagaaggatacattattcgtgtttgcaacggtctttgaagagcttggaaataaaatttctgcttaattaatcaaaaaaaaaaaaaaaaaaaaaaa

SEQ ID NO: 614 - protein, 153 aa, Homo sapien
MGAPLLSPGWGAGAAGRRWWMLLAPLLPALLLVRPAGALVEGLYCGTRDCYEVLGVSRSAGKAEIARAYRQLARRYHPDRYRPQPGDEGPGRTPQSAEEAFLLVATAYETLKVSQAAAELQQYCMQNACKDALLVGVPAGSNPFREPRSCALL

SEQ ID NO: 615 - DNA, 921 bp, Homo sapien
gcggcgctcgcgccaagggacgtgtttctgcgctcgcgtggtcatggaggcgctgccgctgctagccgcgacaactccggaccacggccgccaccgaaggctgcttctgctgccgctactgctgttcctgctgccggctggagctgtgcagggctgggagacagaggagaggccccggactcgcgaagaggagtgccacttctacgcgggtggacaagtgtacccgggagaggcatcccgggtatcggtcgccgaccactccctgcacctaagcaaagcgaagatttccaagccagcgccctactgggaaggaacagctgtgatcgatggagaatttaaggagctgaagttaactgattatcgtgggaaatacttggttttcttcttctacccacttgatttcacatttgtgtgtccaactgaaattatcgcttttggcgacagacttgaagaattcagatctataaatactgaagtggtagcatgctctgttgattcacagtttacccatttggcctggattaatacccctcgaagacaaggaggacttgggccaataaggattccacttctttcagatttgacccatcagatctcaaaggactatggtgtatacctagaggactcaggccacactcttagaggtctcttcattattgatgacaaaggaatcctaagacaaattactctgaatgatcttcctgtgggtagatcagtggatgagacactacgtttggttcaagcattccagtacactgacaaacacggagaagtctgccctgctggctggaaacctggtagtgaaacaataatcccagatccagctggaaagctgaagtatttcgataaactgaattgagaaatacttcttcaagttatgatgcttgaaagttctcaataaagttcacggtttcattacca

SEQ ID NO: 616 - protein, 271 aa, Homo sapien
MEALPLLAATTPDHGRHRRLLLLPLLLFLLPAGAVQGWETEERPRTREEECHFYAGGQVYPGEASRVSVADHSLHLSKAKISKPAPYWEGTAVIDGEFKELKLTDYRGKYLVFFFYPLDFTFVCPTEIIAFGDRLEEFRSINTEVVACSVDSQFTHLAWINTPRRQGGLGPIRIPLLSDLTHQISKDYGVYLEDSGHTLRGLFIIDDKGILRQITLNDLPVGRSVDETLRLVQAFQYTDKHGEVCPAGWKPGSETIIPDPAGKLKYFDKLN

SEQ ID NO: 617 - DNA, 2917 bp, Homo sapien
ggaaaaaagcgacttgtggcggtcgagcgtggcgcaggcgaatcctcggcactaagcaaatatggacctcgcggcggcagcggagccgggcgccggcagccagcacctggaggtccgcgacgaggtggccgagaagtgccagaaactgttcctggacttcttggaggagtttcagagcagcgatggagaaattaaatacttgcaattagcagaggaactgattcgtcctgagagaaacacattggttgtgagttttgtggacctggaacaatttaaccagcaactttccaccaccattcaagaggagttctatagagtttacccttacctgtgtcgggccttgaaaacattcgtcaaagaccgtaaagagatccctcttgccaaggatttttatgttgcattccaagacctgcctaccagacacaagattcgagagctcacctcatccagaattggtttgctcactcgcatcagtgggcaggtggtgcggactcacccagttcacccagagcttgtgagcggaacttttctgtgcttggactgtcagacagtgatcagggatgtagaacagcagttcaaatacacacagccaaacatctgccgaaatccagtttgtgccaacaggaggagattcttactggatacaaataaatcaagatttgttgattttcaaaaggttcgtattcaagagacccaagctgagcttcctcgagggagtatcccccgcagtttagaagtaattttaagggctgaagctgtggaatcagctcaagctggtgacaagtgtgactttacagggacactgattgttgtgcctgacgtctccaagcttagcacaccaggagcacgtgcagaaactaattcccgtgtcagtggtgttgatggatatgagacagaaggcattcgaggactccgggcccttggtgttagggacctttcttataggctggtctttcttgcctgctgtgttgcgccaaccaacccaaggtttggggggaaagagctcagagatgaggaacagacagctgagagcattaagaaccaaatgactgtgaaagaatgggagaaagtgtttgagatgagtcaagataaaaatctataccacaatctttgtaccagcctgttccctactatacatggcaatgatgaagtaaaacggggtgtcctgctgatgctctttggtggcgttccaaagacaacaggagaagggacctctcttcgaggggacataaatgtttgcattgttggtgacccaagtacagctaagagccaatttctcaagcacgtggaggagttcagccccagagctgtctacaccagtggtaaagcgtccagtgctgctggcttaacagcagctgttgtgagagatgaagaatctcatgagtttgtcattgaggctggagctttgatgttggctgataatggtgtgtgttgtattgatgaatttgataagatggacgtgcgggatcaagttgctattcatgaagctatggaacagcagaccatatccatcactaaagcaggagtgaaggctactctgaacgcccggacgtccattttggcagcagcaaacccaatcagtggacactatgacagatcaaaatcattgaaacagaatataaatttgtcagctcccatcatgtcccgattcgatctcttctttatccttgtggatgaatgtaatgaggttacagattatgccattgccaggcgcatagtagatttgcattcaagaattgaggaatcaattgatcgtgtctattccctcgatgatatcagaagatatcttctctttgcaagacagtttaaacccaagatttccaaagagtcagaggacttcattgtggagcaatataaacatctccgccagagagatggttctggagtgaccaagtcttcatggaggattacagtgcgacagcttgagagcatgattcgtctctctgaagctatggctcggatgcactgctgtgatgaggtccaacctaaacatgtgaaggaagctttccggttactgaataaatcaatcatccgtgtggaaacacctgatgtcaatctagatcaagaggaagagatccagatggaggtagatgagggtgctggtggcatcaatggtcatgctgacagccctgctcctgtgaacgggatcaatggctacaatgaagacataaatcaagagtctgctcccaaagcctccttaaggctgggcttctctgagtactgccgaatctctaaccttattgtgcttcacctcagaaaggtggaagaagaagaggacgagtcagcattaaagaggagcgagcttgttaactggtacttgaaggaaatcgaatcagagatagactctgaagaagaacttataaataaaaaaagaatcatagagaaagttattcatcgactcacacactatgatcatgttctaattgagctcacccaggctggattgaaaggctccacagagggaagtgagagctatgaagaagatccctacttggtagttaaccctaactacttgctcgaagattgagatagtgaaagtaactgaccagagctgaggaactgtggcacagcacctcgtggcctggagcctggctggagctctgctagggacagaagtgtttctggaagtgatgcttccaggatttgttttcagaaacaagaattgagttgatggtcctatgtgtcacattcatcacaggtttcataccaacacaggcttcagcacttcctttggtgtgtttcctgtcccagtgaagttggaaccaaataatgtgtagtctctataaccaatacctttgttttcatgtgtaagaaaaggcccattacttttaaggtatgtgctgtcctattgagcaaataactttttttcaattgccagctactgcttttattcatcaaaataaaataacttgttctg

SEQ ID NO: 618 - protein, 821 aa, Homo sapien
MDLAAAAEPGAGSQHLEVRDEVAEKCQKLFLDFLEEFQSSDGEIKYLQLAEELIRPERNTLVVSFVDLEQFNQQLSTTIQEEFYRVYPYLCRALKTFVKDRKEIPLAKDFYVAFQDLPTRHKIRELTSSRIGLLTRISGQVVRTHPVHPELVSGTFLCLDCQTVIRDVEQQFKYTQPNICRNPVCANRRRFLLDTNKSRFVDFQKVRIQETQAELPRGSIPRSLEVILRAEAVESAQAGDKCDFTGTLIVVPDVSKLSTPGARAETNSRVSGVDGYETEGIRGLRALGVRDLSYRLVFLACCVAPTNPRFGGKELRDEEQTAESIKNQMTVKEWEKVFEMSQDKNLYHNLCTSLFPTIHGNDEVKRGVLLMLFGGVPKTTGEGTSLRGDINVCIVGDPSTAKSQFLKHVEEFSPRAVYTSGKASSAAGLTAAVVRDEESHEFVIEAGALMLADNGVCCIDEFDKMDVRDQVAIHEAMEQQTISITKAGVKATLNARTSILAAANPISGHYDRSKSLKQNINLSAPIMSRFDLFFILVDECNEVTDYAIARRIVDLHSRIEESIDRVYSLDDIRRYLLFARQFKPKISKESEDFIVEQYKHLRQRDGSGVTKSSWRITVRQLESMIRLSEAMARMHCCDEVQPKHVKEAFRLLNKSIIRVETPDVNLDQEEEIQMEVDEGAGGINGHADSPAPVNGINGYNEDINQESAPKASLRLGFSEYCRISNLIVLHLRKVEEEEDESALKRSELVNWYLKEIESEIDSEEELINKKRIIEKVIHRLTHYDHVLIELTQAGLKGSTEGSESYEEDPYLVVNPNYLLED

SEQ ID NO: 619 - DNA, 1266 bp, Homo sapien
atgttccgagcggcggctccggggcagctccggcgggcggcctcattgctacgatttcagagtaccctggtaatagctgagcatgcaaatgattccctagcacccattactttaaataccattactgcagccacacgccttggaggtgaagtgtcctgcttagtagctggaaccaaatgtgacaaggtggcacaagatctctgtaaagtagcaggcatagcaaaagttctggtggctcagcatgatgtgtacaaaggcctacttccagaggaactgacaccattgattttggcaactcagaagcagttcaattacacacacatctgtgctggagcatctgccttcggaaagaaccttttgcccagagtagcagccaaacttgaggttgccccgatttctgacatcattgcaatcaagtcacctgacacatttgtgagaactatttatgcaggaaatgctctatgtacagtgaagtgtgatgagaaagtgaaagtgttttctgtccgtggaacatcctttgatgctgcagcaacaagtggcggtagtgccagttcagaaaaggcatcaagtacttcaccagtggaaatatcagagtggcttgaccagaaattaacaaaaagtgatcgaccagagctaacaggtgccaaagtggtggtatctggtggtcgaggcttgaagagtggagagaactttaagttgttatatgacttggcagatcaactacatgctgcagttggtgcttcccgtgctgctgttgatgctggctttgttcccaatgacatgcaagttggacagacgggaaaaatagtagcaccagaactttatattgctgttggaatatctggagccatccaacatttagctgggatgaaagacagcaagacaattgtggcaattaataaagacccagaagctccaattttccaagtggcagattatggaatagttgcagatttatttaaggtagttcctgaaatgactgagatattgaagaaaaaatgaatcaggatcatgccttaaaaagaaaacttttgttaaagtattccactgaaatcacagatatttgtgggtattataacaatcattggaaagcatggagagctacatttcataatttgagggaaaatttctaacagatgccagaatgcttgtttatgggattgctgtgtttccttttaattatttgtggttccaaacaattattgtttgaacttttttaattctgtactaaaatctataataaagcttttccacagctttaaaact

SEQ ID NO: 620 - protein, 333 aa, Homo sapien
MFRAAAPGQLRRAASLLRFQSTLVIAEHANDSLAPITLNTITAATRLGGEVSCLVAGTKCDKVAQDLCKVAGIAKVLVAQHDVYKGLLPEELTPLILATQKQFNYTHICAGASAFGKNLLPRVAAKLEVAPISDIIAIKSPDTFVRTIYAGNALCTVKCDEKVKVFSVRGTSFDAAATSGGSASSEKASSTSPVEISEWLDQKLTKSDRPELTGAKVVVSGGRGLKSGENFKLLYDLADQLHAAVGASRAAVDAGFVPNDMQVGQTGKIVAPELYIAVGISGAIQHLAGMKDSKTIVAINKDPEAPIFQVADYGIVADLFKVVPEMTEILKKK

SEQ ID NO: 621 - DNA, 4180 bp, Homo sapien
gcggggaagcagcagcggccaggatgaatcccaggtgctctggagctggatggtgaaggtcggcactcttcaccctcccgagccctgcccgtctcggccccatgcccccaccagtcagccccgggccacaggcagtgagcaggcacctgggagccgaggccctgtgaccaggccaaggagacgggcgctccagggtcccagccacctgtcccccccatggagctgaggccctggttgctatgggtggtagcagcaacaggaaccttggtcctgctagcagctgatgctcagggccagaaggtcttcaccaacacgtgggctgtgcgcatccctggaggcccagcggtggccaacagtgtggcacggaagcatgggttcctcaacctgggccagatcttcggggactattaccacttctggcatcgaggagtgacgaagcggtccctgtcgcctcaccgcccgcggcacagccggctgcagagggagcctcaagtacagtggctggaacagcaggtggcaaagcgacggactaaacgggacgtgtaccaggagcccacagaccccaagtttcctcagcagtggtacctgtctggtgtcactcagcgggacctgaatgtgaaggcggcctgggcgcagggctacacagggcacggcattgtggtctccattctggacgatggcatcgagaagaaccacccggacttggcaggcaattatgatcctggggccagttttgatgtcaatgaccaggaccctgacccccagcctcggtacacacagatgaatgacaacaggcacggcacacggtgtgcgggggaagtggctgcggtggccaacaacggtgtctgtggtgtaggtgtggcctacaacgcccgcattggaggggtgcgcatgctggatggcgaggtgacagatgcagtggaggcacgctcgctgggcctgaaccccaaccacatccacatctacagtgccagctggggccccgaggatgacggcaagacagtggatgggccagcccgcctcgccgaggaggccttcttccgtggggttagccagggccgaggggggctgggctccatctttgtctgggcctcggggaacgggggccgggaacatgacagctgcaactgcgacggctacaccaacagtatctacacgctgtccatcagcagcgccacgcagtttggcaacgtgccgtggtacagcgaggcctgctcgtccacactggccacgacctacagcagtggcaaccagaatgagaagcagatcgtgacgactgacttgcggcagaagtgcacggagtctcacacgggcacctcagcctctgcccccttagcagccggcatcattgctctcaccctggaggccaataagaacctcacatggcgggacatgcaacacctggtggtacagacctcgaagccagcccacctcaatgccaacgactgggccaccaatggtgtgggccggaaagtgagccactcatatggctacgggcttttggacgcaggcgccatggtggccctggcccagaattggaccacagtggccccccagcggaagtgcatcatcgacatcctcaccgagcccaaagacatcgggaaacggctcgaggtgcggaagaccgtgaccgcgtgcctgggcgagcccaaccacatcactcggctggagcacgctcaggcgcggctcaccctgtcctataatcgccgtggcgacctggccatccacctggtcagccccatgggcacccgctccaccctgctggcagccaggccacatgactactccgcagatgggtttaatgactgggccttcatgacaactcattcctgggatgaggatccctctggcgagtgggtcctagagattgaaaacaccagcgaagccaacaactatgggacgctgaccaagttcaccctcgtactctatggcaccgcccctgaggggctgcccgtacctccagaaagcagtggctgcaagaccctcacgtccagtcaggcctgtgtggtgtgcgaggaaggcttctccctgcaccagaagagctgtgtccagcactgccctccagggttcgccccccaagtcctcgatacgcactatagcaccgagaatgacgtggagaccatccgggccagcgtctgcgccccctgccacgcctcatgtgccacatgccaggggccggccctgacagactgcctcagctgccccagccacgcctccttggaccctgtggagcagacttgctcccggcaaagccagagcagccgagagtccccgccacagcagcagccacctcggctgcccccggaggtggaggcggggcaacggctgcgggcagggctgctgccctcacacctgcctgaggtggtggccggcctcagctgcgccttcatcgtgctggtcttcgtcactgtcttcctggtcctgcagctgcgctctggctttagttttcggggggtgaaggtgtacaccatggaccgtggcctcatctcctacaaggggctgccccctgaagcctggcaggaggagtgcccgtctgactcagaagaggacgagggccggggcgagaggaccgcctttatcaaagaccagagcgccctctgatgagcccactgcccaccccctcaagccaatcccctccttgggcactttttaattcaccaaagtatttttttatcttgggactgggtttggaccccagctgggaggcaagaggggtggagactgcttcccatcctaccctcgggcccacctggccacctgaggtgggcccaggaccagctggggcgtggggagggccgtaccccaccctcagcaccccttccatgtggagaaaggagtgaaacctttagggcagcttgccccggccccggccccagccagagttcctgcggagtgaagaggggcagcccttgcttgttgggattcctgacccaggccgcagctcttgcccttccctgtccctctaaagcaataatggtcccatccaggcagtcgggggctggcctaggagatatctgagggaggaggccacctctccaagggcttctgcaccctccaccctgtcccccagctctggtgagtcttggcggcagcagccatcataggaagggaccaaggcaaggcaggtgcctccaggtgtgcacgtggcatgtggcctgtggcctgtgtcccatgacccacccctgtgctccgtgcctccaccaccactggccaccaggctggcgcagccaaggccgaagctctggctgaaccctgtgctggtgtcctgaccaccctcccctctcttgcacccgcctctcccgtcagggcccaagtccctgttttctgagcccgggctgcctgggctgttggcactcacagacctggagcccctgggtgggtggtggggaggggcgctggcccagccggcctctctggcctcccacccgatgctgctttcccctgtggggatctcaggggctgtttgaggatatattttcactttgtgattatttcactttagatgctgatgatttgtttttgtatttttaatgggggtagcagctggactacccacgttctcacacccaccgtccgccctgctcctccctggctgccctggccctgaggtgtgggggctgcagcatgttgctgaggagtgaggaatagttgagccccaagtcctgaagaggcgggccagccaggcgggctcaaggaaagggggtcccagtgggaggggcaggctgacatctgtgtttcaagtggggctcgccatgccgggggttcataggtcactggctctccaagtgccagaggtgggcaggtggtggcactgagcccccccaacactgtgccctggtggagaaagcactgacctgtcatgcccccctcaaacctcctcttctgacgtgccttttgcacccctcccattaggacaatcagtcccctcccatctgggagtccccttttcttttctaccctagccattcctggtacccagccatctgcccaggggtgccccctcctctcccatccccctgccctcgtggccagcccggctggttttgtaagatgctgggttggtgcacagtgatttttttcttgtaatttaaacaggcccagcattgctggttctatttaatggacatgagataatgttagaggttttaaagtgattaaacgtgcagactatgcaaaccag

SEQ ID NO: 622 - protein, 794 aa, Homo sapien
MELRPWLLWVVAATGTLVLLAADAQGQKVFTNTWAVRIPGGPAVANSVARKHGFLNLGQIFGDYYHFWHRGVTKRSLSPHRPRHSRLQREPQVQWLEQQVAKRRTKRDVYQEPTDPKFPQQWYLSGVTQRDLNVKAAWAQGYTGHGIVVSILDDGIEKNHPDLAGNYDPGASFDVNDQDPDPQPRYTQMNDNRHGTRCAGEVAAVANNGVCGVGVAYNARIGGVRMLDGEVTDAVEARSLGLNPNHIHIYSASWGPEDDGKTVDGPARLAEEAFFRGVSQGRGGLGSIFVWASGNGGREHDSCNCDGYTNSIYTLSISSATQFGNVPWYSEACSSTLATTYSSGNQNEKQIVTTDLRQKCTESHTGTSASAPLAAGIIALTLEANKNLTWRDMQHLVVQTSKPAHLNANDWATNGVGRKVSHSYGYGLLDAGAMVALAQNWTTVAPQRKCIIDILTEPKDIGKRLEVRKTVTACLGEPNHITRLEHAQARLTLSYNRRGDLAIHLVSPMGTRSTLLAARPHDYSADGFNDWAFMTTHSWDEDPSGEWVLEIENTSEANNYGTLTKFTLVLYGTAPEGLPVPPESSGCKTLTSSQACVVCEEGFSLHQKSCVQHCPPGFAPQVLDTHYSTENDVETIRASVCAPCHASCATCQGPALTDCLSCPSHASLDPVEQTCSRQSQSSRESPPQQQPPRLPPEVEAGQRLRAGLLPSHLPEVVAGLSCAFIVLVFVTVFLVLQLRSGFSFRGVKVYTMDRGLISYKGLPPEAWQEECPSDSEEDEGRGERTAFIKDQSAL

SEQ ID NO: 623 - DNA, 1935 bp, Homo sapien
ctggtcccgagcacgagctgtgaggggattcacttgtgtgcggaactcctcggaaccatggcgtccctttcccttgcacctgttaacatctttaaggcaggagctgatgaagagagagcagagacagctcgtctgacttcttttattggtgccatcgccattggagacttggtaaagagcaccttgggacccaaaggcatggacaaaattcttctaagcagtggacgagatgcctctcttatggtaaccaatgatggtgccactattctaaaaaacattggtgttgacaatccagcagctaaagttttagttgatatgtcaagggttcaagatgatgaagttggtgatggcactacctctgttaccgttttagcagcagaattattaagggaagcagaatctttaattgcaaaaaagattcatccacagaccatcatagcgggttggagagaagccacgaaggctgcaagagaggcgctgttgagttctgcagttgatcatggttccgatgaagttaaattccgtcaagatttaatgaatattgcgggcacaacattatcctcaaaacttcttactcatcacaaagaccactttacaaagttagctgtagaagcagttctcagactgaaaggctctggcaacctggaggcaattcatattatcaagaagctaggaggaagtttggcagattcctatttagatgaaggcttcctgttggataaaaaaattggagtaaatcaaccaaaacgaattgaaaatgctaaaattcttattgcaaatactggtatggatacagacaaaataaagatatttggttcccgggtaagagttgactctacagcaaaggttgcagaaatagaacatgcggaaaaggaaaaaatgaaggagaaagttgaacgtattcttaagcatggaataaattgctttattaacaggcaattaatttataattatcctgaacagctctttggtgctgctggtgtcatggctattgagcatgcagattttgcaggtgtggaacgcctagctcttgtcacaggtggtgaaattgcctctacctttgatcacccagaactggtgaagcttggaagttgcaaacttatcgaggaagtcatgattggagaagacaaactcattcacttttctggggttgcccttggtgaggcttgtaccattgttttgcgtggtgccactcaacaaattttagatgaagcagaaagatcattgcatgatgctctttgtgttcttgcgcaaactgtaaaggactctagaacagtttatggaggaggctgttctgagatgttgatggctcatgctgtgacacagcttgccaatagaacaccaggcaaagaagctgttgcaatggagtcttatgctaaagcactgagaatgttgccaaccatcatagctgacaatgcaggctatgacagtgcagacctggtggcacagctcagggctgctcacagtgaaggcaataccactgctggattggatatgagggaaggcaccattggagatatggctatcctgggtataacagaaagttttcaagtgaagcgacaggttcttctgagtgcagctgaagcagcagaggtgattctgcgtgtggacaacatcatcaaagcggcacccaggaaacgtgtccctgatcaccacccctgttaagcattcccacgtgctgtcgatctttggaccagtttctagcaaagttgtgtttgaaagatactctattaaagaagactgtggaatctgtttatcggtgcccattatatccttaagtttggatatttagctgaccttcgctttaacataggtctaatttatttgccgtgtcattttccatacaaatcagttgatttaaaggagttcatttcgcatactgggcattaaaataaaaatttgaacaatgaaaggaaaaaaaggagaaaaaaaaaa

SEQ ID NO: 624 - protein, 535 aa, Homo sapien
MASLSLAPVNIFKAGADEERAETARLTSFIGAIAIGDLVKSTLGPKGMDKILLSSGRDASLMVTNDGATILKNIGVDNPAAKVLVDMSRVQDDEVGDGTTSVTVLAAELLREAESLIAKKIHPQTIIAGWREATKAAREALLSSAVDHGSDEVKFRQDLMNIAGTTLSSKLLTHHKDHFTKLAVEAVLRLKGSGNLEAIHIIKKLGGSLADSYLDEGFLLDKKIGVNQPKRIENAKILIANTGMDTDKIKIFGSRVRVDSTAKVAEIEHAEKEKMKEKVERILKHGINCFINRQLIYNYPEQLFGAAGVMAIEHADFAGVERLALVTGGEIASTFDHPELVKLGSCKLIEEVMIGEDKLIHFSGVALGEACTIVLRGATQQILDEAERSLHDALCVLAQTVKDSRTVYGGGCSEMLMAHAVTQLANRTPGKEAVAMESYAKALRMLPTIIADNAGYDSADLVAQLRAAHSEGNTTAGLDMREGTIGDMAILGITESFQVKRQVLLSAAEAAEVILRVDNIIKAAPRKRVPDHHPC

SEQ ID NO: 625 - DNA, 1935 bp, Homo sapien; identical to SEQ ID NO: 623

SEQ ID NO: 626 - protein, 535 aa, Homo sapien; identical to SEQ ID NO: 624

SEQ ID NO: 627 - DNA, 2331 bp, Homo sapien
cttcgcggcttggtaacataaaagtttgtttcaccacgtaagccggacctcgcactccggtcccggtctcgtcgccaagatggtgaagcccaagtacaaaggacggagcaccatcaacccgtccaaggccagcacaaacccagatcgagtgcagggagcaggaggccaaaacatgagggaccgggccaccatccggcgcctgaatatgtataggcaaaaggagcgcaggaacagtcgtggtaaaataattaaacccctgcaatatcaatcaacggtggcttctggcacagtggcaagagtagagccaaatattaaatggtttggaaacacacgtgtgattaagcagtcatcattacaaaaatttcaagaggaaatggatacagttatgaaggatccatacaaagttgtcatgaagcaaagcaagttaccaatgtctcttctccatgatcgaatccggcctcataacttgaaggtgcacattcttgatactgaaagttttgaaactacatttggccctaagtcacagaggaaacgaccaaacttatttgcaagtgatatgcagtctcttatcgaaaatgctgaaatgtccactgagagctatgaccagggcaaggatcgtgatttggtaactgaagacactggtgtgagaaatgaagctcaagaagagatctataaaaagggacagtccaaaagaatatggggtgagctctacaaggtgatagattcatcagatgttgtagttcaagttcttgatgctagagatccaatgggtactcgttcccctcacattgaaacttacctgaagaaggaaaaaccttggaaacacctcatttttgtacttaacaaatgtgaccttgttccaacctgggcaacaaaacggtgggttgctgtcctctcccaggattatccaacacttgctttccatgcaagccttactaacccgtttggcaagggagcattcattcagcttctgcggcagtttggaaagttgcacactgacaagaaacagatcagtgttgggttcattggctatccaaatgttggcaagagctctgtgataaatacattgcgttctaagaaagtttgcaacgtggctcccattgcaggtgaaacaaaggtctggcagtatattactttgatgcgtcggatattcctgattgactgtccaggtgtggtttacccctctgaggactccgagacagacattgtgctaaaaggagttgttcaagtagaaaaaattaagagtcctgaagaccacattggtgctgtacttgaacgagcaaagccagaatatatcagcaaaacatacaagattgattcttgggagaatgctgaggactttcttgagaagctcgctttccggactgggaagttactaaagggtggagagcccgacttgcagactgtgggtaagatggtcctcaatgactggcagaggggccggattcctttctttgtcaagccacccaatgcagagccacttgtggccccccagcttctaccctcctcatctttggaagttgtcccagaagcagcccagaacaatccaggggaggaagtcacagaaactgcaggtgaagggtcagaatccatcattaaggaagaaacagaagagaacagtcactgtgatgctaacacagagatgcagcagattctcacacgagttcggcagaactttggtaaaatcaacgtggtgcctcagttttctggggatgacctggttcctgtggaggtgtcagatcttgaggaagagcttgagagcttttctgatgaagaggaggaggaacaggagcaacaaagagatgatgcggaagagtcttcctcggagcctgaggaggaaaatgtgggaaacgacaccaaagccgttattaaagcactggatgagaagattgccaaatatcagaagtttctagacaaagccaaagccaaaaagttttcagcagtcagaatatccaagggactgagtgaaaagatatttgcaaaacctgaagaacaaagaaaaacactggaagaagatgtagatgacagagcaccttccaaaaagggaaagaagcggaaggcacaaagggaagaggaacaggaacattcaaataaagctcccagggcgcttacatcaaaagaacggaggcgagcagtacgacagcaacggccgaaaaaagttggtgtgcgctactatgaaacacacaacgtgaaaaataggaacaggaacaaaaagaagaccaatgactcagagggacagaaacacaaacgcaaaaaattcagacaaaagcagtaatgtttaaaaggtttttattaaattatacaaaaacaggcaaaaaaaaaaaaaaaaaa

SEQ ID NO: 628 - protein, 731 aa, Homo sapien
MVKPKYKGRSTINPSKASTNPDRVQGAGGQNMRDRATIRRLNMYRQKERRNSRGKIIKPLQYQSTVASGTVARVEPNIKWFGNTRVIKQSSLQKFQEEMDTVMKDPYKVVMKQSKLPMSLLHDRIRPHNLKVHILDTESFETTFGPKSQRKRPNLFASDMQSLIENAEMSTESYDQGKDRDLVTEDTGVRNEAQEEIYKKGQSKRIWGELYKVIDSSDVVVQVLDARDPMGTRSPHIETYLKKEKPWKHLIFVLNKCDLVPTWATKRWVAVLSQDYPTLAFHASLTNPFGKGAFIQLLRQFGKLHTDKKQISVGFIGYPNVGKSSVINTLRSKKVCNVAPIAGETKVWQYITLMRRIFLIDCPGVVYPSEDSETDIVLKGVVQVEKIKSPEDHIGAVLERAKPEYISKTYKIDSWENAEDFLEKLAFRTGKLLKGGEPDLQTVGKMVLNDWQRGRIPFFVKPPNAEPLVAPQLLPSSSLEVVPEAAQNNPGEEVTETAGEGSESIIKEETEENSHCDANTEMQQILTRVRQNFGKINVVPQFSGDDLVPVEVSDLEEELESFSDEEEEEQEQQRDDAEESSSEPEEENVGNDTKAVIKALDEKIAKYQKFLDKAKAKKFSAVRISKGLSEKIFAKPEEQRKTLEEDVDDRAPSKKGKKRKAQREEEQEHSNKAPRALTSKERRRAVRQQRPKKVGVRYYETHNVKNRNRNKKKTNDSEGQKHKRKKFRQKQ

SEQ ID NO: 629 - DNA, 3635 bp, Homo sapien
tcaacacaggacaatgcaagcccatgagctgttccggtattttcgaatgccagagctggttgacttccgacagtacgtgcgtactcttccgaccaacacgcttatgggcttcggagcttttgcagcactcaccaccttctggtacgccacgagacccaaacccctgaagccgccatgcgacctctccatgcagtcagtggaagtggcgggtagtggtggtgcacgaagatccgcactacttgacagcgacgagcccttggtgtatttctatgatgatgtcacaacattatacgaaggtttccagaggggaatacaggtgtcaaataatggcccttgtttaggctctcggaaaccagaccaaccctatgaatggctttcatataaacaggttgcagaattgtcggagtgcataggctcagcactgatccagaagggcttcaagactgccccagatcagttcattggcatctttgctcaaaatagacctgagtgggtgattattgaacaaggatgctttgcttattcgatggtgatcgttccactttatgatacccttggaaatgaagccatcacgtacatagtcaacaaagctgaactctctctggtttttgttgacaagccagagaaggccaaactcttattagagggtgtagaaaataagttaataccaggccttaaaatcatagttgtcatggatgcctacggcagtgaactggtggaacgaggccagaggtgtggggtggaagtcaccagcatgaaggcgatggaggacctgggaagagccaacagacggaagcccaagcctccagcacctgaagatcttgcagtaatttgtttcacaagtggaactacaggcaaccccaaaggagcaatggtcactcaccgaaacatagtgagcgattgttcagcttttgtgaaagcaacagagaatacagtcaatccttgcccagatgatactttgatatctttcttgcctctcgcccatatgtttgagagagttgtagagtgtgtaatgctgtgtcatggagctaaaatcggatttttccaaggagatatcaggctgctcatggatgacctcaaggtgcttcaacccactgtcttccccgtggttccaagactgctgaaccggatgtttgaccgaattttcggacaagcaaacaccacgctgaagcgatggctcttggactttgcctccaagaggaaagaagcagagcttcgcagcggcatcatcagaaacaacagcctgtgggaccggctgatcttccacaaagtacagtcgagcctgggcggaagagtccggctgatggtgacaggagccgccccggtgtctgccactgtgctgacgttcctcagagcagccctgggctgtcagttttatgaaggatacggacagacagagtgcactgccgggtgctgcctaaccatgcctggagactggaccgcaggccatgttggggccccgatgccgtgcaatttgataaaacttgttgatgtggaagaaatgaattacatggctgccgagggcgagggcgaggtgtgtgtgaaagggccaaatgtatttcagggctacttgaaggacccagcgaaaacagcagaagctttggacaaagacggctggttacacacaggggacattggaaaatggttaccaaatggcaccttgaaaattatcgaccggaaaaagcacatatttaagctggcacaaggagaatacatagcccctgaaaagattgaaaatatctacatgcgaagtgagcctgttgctcaggtgtttgtccacggagaaagcctgcaggcatttctcattgcaattgtggtaccagatgttgagacattatgttcctgggcccaaaagagaggatttgaagggtcgtttgaggaactgtgcagaaataaggatgtcaaaaaagctatcctcgaagatatggtgagacttgggaaggattctggtctgaaaccatttgaacaggtcaaaggcatcacattgcaccctgaattattttctatcgacaatggccttctgactccaacaatgaaggcgaaaaggccagagctgcggaactatttcaggtcgcagatagatgacctctattccactatcaaggtttagtgtgaagaagaaagctcagaggaaatggcacagttccacaatctcttctcctgctgatggccttcatgttgttaattttgaatacagcaagtgtagggaaggaagcgttcgtgtttgacttgtccattcggggttcttctcataggaatgctagaggaaacagaacaccgccttacagtcacctcatgttgcagaccatgtttatggtaatacacactttccaaaatgagccttaaaaattgtaaaggggatactataaatgtgctaagttatttgagacttcctcagtttaaaaagtgggttttaaatcttctgtctccctgcttttctaatcaaggggttaggactttgctatctctgagatgtctgctacttgctgcaaattctgcagctgtctgctgctctaaagagtacagtgcactagagggaagtgttccctttaaaaataagaacaactgtcctggctggagaatctcacaagcggaccagagatctttttaaatccctgctactgtcccttctcacaggcattcacagaacccttctgattcgtaagggttacgaaactcatgttcttctccagtcccctgtggtttctgttggagcataaggtttccagtaagcgggagggcagatccaactcagaaccatgcagataaggagcctctggcaaatgggtgctcatcagaacgcgtggattctctttcatggcagaatgctcttggactcggttctccaggcctgattccccgactccatcctttttcaggggttatttaaaaatctgccttagattctatagtgaagacaagcatttcaagaaagagttacctggatcagccatgctcagctgtgacgcctgaataactgtctactttatcttcactgaaccactcactctgtgtaaaggccaacagatttttaatgtggttttcatatcaaaagatcatgttgggattaacttgcctttttccccaaaaaataaactctcaggcaagcatttctttaaagctattaagggagtatatacttgagtacttattgaaatggacagtaataagcaaatgttcttataatgctacctgatttctatgaaatgtgtttgacaagccaaaattctaggatgtagaaatctggaaagttcatttcctgggattcacttctccagggattttttaaagttaatttgggaaattaacagcagttcactttattgtgagtctttgccacatttgactgaattgagctgtcatttgtacatttaaagcagctgttttggggtctgtgagagtacatgtattatatacaagcacaacagggcttgcactaaagaattgtcattgtaataacactacttggtagcctaacttcatatatgtattcttaattgcacaaaaagtcaataatttgtcaccttggggttttgaatgtttgctttaagtgttggctatttctatgttttataaaccaaaacaaaatttccaaaaacaatgaaggaaaccaaaataaatatttctgcatttcg

SEQ ID NO: 630 - protein, 698 aa, Homo sapien
MQAHELFRYFRMPELVDFRQYVRTLPTNTLMGFGAFAALTTFWYATRPKPLKPPCDLSMQSVEVAGSGGARRSALLDSDEPLVYFYDDVTTLYEGFQRGIQVSNNGPCLGSRKPDQPYEWLSYKQVAELSECIGSALIQKGFKTAPDQFIGIFAQNRPEWVIIEQGCFAYSMVIVPLYDTLGNEAITYIVNKAELSLVFVDKPEKAKLLLEGVENKLIPGLKIIVVMDAYGSELVERGQRCGVEVTSMKAMEDLGRANRRKPKPPAPEDLAVICFTSGTTGNPKGAMVTHRNIVSDCSAFVKATENTVNPCPDDTLISFLPLAHMFERVVECVMLCHGAKIGFFQGDIRLLMDDLKVLQPTVFPVVPRLLNRMFDRIFGQANTTLKRWLLDFASKRKEAELRSGIIRNNSLWDRLIFHKVQSSLGGRVRLMVTGAAPVSATVLTFLRAALGCQFYEGYGQTECTAGCCLTMPGDWTAGHVGAPMPCNLIKLVDVEEMNYMAAEGEGEVCVKGPNVFQGYLKDPAKTAEALDKDGWLHTGDIGKWLPNGTLKIIDRKKHIFKLAQGEYIAPEKIENIYMRSEPVAQVFVHGESLQAFLIAIVVPDVETLCSWAQKRGFEGSFEELCRNKDVKKAILEDMVRLGKDSGLKPFEQVKGITLHPELFSIDNGLLTPTMKAKRPELRNYFRSQIDDLYSTIKV

SEQ ID NO: 631 - DNA, 2561 bp, Homo sapien
gcctgagtgagtctctggcgtcccaaattgcctgtttttctcgcaggctctattccgttcgctggttcgccacctcaggggaacgatggccatggagtccacagccactgccgccgtcgccgcggacgtggtttctgccgacaaaattgaagatgtccctgctccttctacatctgcagataaagtggagagtctggatgtggatagtgaagctaagaaactattgggtttaggacagaaacatctggtgatgggggatattccagcagctgtcaatgcattccaggaagcagctagtcttttaggtaagaagtatggagagacagctaatgagtgtggagaagccttctttttctatgggaaatcacttctggagttggcaagaatggagaatggtgtgttgggaaacgccttggaaggtgtgcatgtggaagaggaagaaggagaaaaaacagaagatgaatctctggtagaaaataatgataacatagatgaggaagcaagggaagagttgagagaacaggtttatgacgccatgggagaaaaagaagaagccaaaaaaacagaagacaagtctttggcaaagcctgaaactgataaagaacaggacagtgaaatggagaagggtggaagagaagatatggatataagtaaatctgcagaggagccacaggaaaaagttgacttgactctagattggttaactgaaacctctgaagaggcaaaaggaggagcagcaccagaaggaccgaatgaagctgaggtcacttctgggaagccagaacaggaagtaccagatgctgaggaagaaaaatcagtttctggaactgatgtccaagaagagtgcagagaaaaaggaggtcaggagaagcagggagaggtaattgtgagcatagaggagaagccaaaagaagtttcagaagagcagcctgtggtgactctagaaaagcagggcactgcagtggaggtagaagcagagtctttagacccgacagtcaagccagtggatgtgggtggggacgagccagaggagaaggtagttacctctgaaaacgaggcaggaaaggcggttcttgaacaactggtaggtcaagaagtaccacctgctgaagagtcaccagaggtgcaaacagaggctgcagaggcctcagctgtagaggctggatcagaagtctctgaaaagcctgggcaggaggctccagttctccctaaggatggtgcagtcaatggaccgtcagttgtaggagatcagactcctattgaaccacagacttctatagaaagactgacagaaacaaaagatggctcaggactagaggagaaggtcagggcaaagctggttcctagtcaggaggagactaagctgtctgtagaagagtctgaggcagctggagatggggttgataccaaggtagcccagggagctactgagaaatcacctgaagacaaagttcagatagctgctaatgaagagacacaagagagagaagaacagatgaaagagggtgaagaaactgaaggctcggaagaggatgataaagaaaatgataagactgaagaaatgccaaatgattcagtccttgaaaacaagtctcttcaagaaaatgaggaggaggagattgggaacctagagcttgcctgggatatgctggatttagcaaagatcatttttaaaaggcaagaaacaaaagaagcacagctttatgctgcccaggcacatcttaaactcggagaagttagtgttgaatctgaaaactatgtgcaagctgtggaggagttccagtcctgccttaacctgcaggaacagtacctggaagcccacgaccgtctgcttgcagagacccactaccagctgggcttggcttatgggtacaactctcagtatgatgaggcagtggcacagttcagcaaatctattgaagtcattgagaacagaatggctgtactaaacgagcaggtgaaggaggctgaaggatcgtctgaatacaagaaagaaattgaggaactaaaggaactgctacccgaaattagagagaagatagaagatgcaaaggagtctcagcgtagtgggaatgtagctgaactggctctgaaagctactctggtggagagttctacttcaggtttcactcctggtggaggaggctcttcagtctccatgattgccagtagaaagccaacagacggtgcttcctcatcaaattgtgtgactgatatttcccaccttgtcagaaagaagaggaaaccagaggaagagagtccccggaaagatgatgcaaagaaagccaaacaagagccggaggtgaacggaggcagtggggatgctgtcccgagtggaaatgaagtttcggaaaacatggaggaggaggctgagaatcagctgaaacgcggagcagcagtggaggggacactggaggctggagctacagttgaaagcactgcatgttaagagggggcacagcctcctcccaagggaaagtgtttttgtatataatgtattttttcacttttggaggattctttttgtataacttcaataaagattgtaagcaaaaaaaaaa

SEQ ID NO: 632 - protein, 787 aa, Homo sapien [sequence omitted]

SEQ ID NO: 633 - DNA, 4567 bp, Homo sapien
gacagcctctgggtcctcggtcggtacagtctctgcacctcgcgccccagcaggtaaactaacattatggatttttccaagctacccaaaatactcgatgaagataaagaaagcacatttggttatgtgcatggggtctcaggacctgtggttacagcctgtgacatggcgggtgcagccatgtatgagctggtgagagtgggccacagcgaattggttggagagattattcgattggagggtgacatggctactattcaggtgtatgaagaaacttctggtgtgtctgttggagatcctgtacttcgcactggtaaacccctctctgtagagcttggtcctggcattatgggagccatttttgatggtattcaaagacctttgtcggatatcagcagtcagacccaaagcatctacatccccagaggagtaaacgtgtctgctcttagcagagatatcaaatgggactttacaccttgcaaaaacctacgggttggtagtcatatcactggcggagacatttatggaattgtcagtgagaactcgcttatcaaacacaaaatcatgttacccccacgaaacagaggaactgtaacttacattgctccacctgggaattatgatacctctgatgttgtcttggagcttgaatttgaaggtgtaaaggagaagttcaccatggtgcaagtatggcctgtacgtcaagttcgacctgtcactgagaagctgccagccaatcatcctctgttgactggccagagagtccttgatgccctttttccgtgtgtccagggaggaactactgctatccctggagcctttggctgtggaaagacagtgatatcacagtctctatccaagtattctaacagtgatgtaatcatctatgtaggatgtggtgaaagaggaaatgagatgtctgaagtcctccgggacttcccagagctcacaatggaggttgatggtaaggtagagtcaattatgaagaggacagctttggtagccaatacctccaatatgcctgttgctgctagagaagcctctatttatactggaatcacactgtcagagtacttccgtgacatgggctatcatgtcagtatgatggctgactctacctctagatgggctgaggcccttagagaaatctctggtcgtttagctgaaatgcctgcagatagtggatatccagcctatcttggtgcccgtctggcctcgttttatgaacgagcaggcagggtgaaatgtcttggaaatcctgaaagagaagggagtgtcagcattgtaggagcagtttctccacctggtggtgatttttctgatccagttacatctgccactcttggtatcgttcaggtgttctggggcttagataagaaactagctcaacgtaagcatttcccctctgtcaattggctcatcagctacagcaagtatatgcgtgccttggatgaatactatgacaaacacttcacagagttcgttcctctgaggacgaaagctaaggaaattctgcaggaagaagaagacctggcagaaattgtacagcttgtgggaaaggcttctttggcagaaacagataaaatcactctggaggtagcaaaacttatcaaagatgatttcctacaacaaaatggatatactccttatgacaggttctgcccattctacaagacagtagggatgctgtccaacatgattgcattttatgatatggctcgtagagctgttgaaaccactgcccagagtgacaataaaatcacatggtccattattcgtgagcacatgggagacatcctctataaactttcctccatgaaattcaaggatccactgaaagatggtgaggcaaagatcaaaagcgactatgcacaacttcttgaagacatgcagaatgcattccgtagccttgaagattagaagccttgaagattacaactgtgatttccttttcctcagcaagctcctatgtgtatattttcctgaatttctcatctcaaaccctttgcttctttattgtgcagctttgagactagtgcctatgtgtgttatttgtttccctgtttttttggtaggtcttatataaaacaaacattcctttgttctagtgttgtgaagggcctccctcttcctttatctgaagtggtgaatatagtaaatatacattctggttacactactgtaaacttgtatgtagggtgatgaccctctttgtcctaggtgtaccctttcctcatctctattaaattgtaaacaggactactgcatgtactctctttgcagtgaatttggaatggaaggccaggtttctataacttttgaacaggtactttgtgaaatgactcaatttctattgtggtaagctcattggcagcttagcattttgcaaaggaattgctttgcaggaaatatttaattttcaaaaacataatgattaatgttccaattatgcatcacttcccccagtataaatcaggaatgtttgtgagaaaccattgggaactatactctttttatttttattttttattttttttattattttttttttggggacggagtgtccctcttgttgcccaggctggagtgcaatggcgtgatcttggctcactgcagccttcgcctcccgggttcaagtgattctcctgcctcagcctcccgagtagctgggattacaggcatgctccaccatgcccagctaattttgtatttttagtagaaacggggtttcaccatattggtcaggctggtctcgaactccagacctcaggtgatccgcccacctcggcctcccaaactgctgggattacaggcgtgagccaccgcgcctggccagggactatactctttttaaaatagacatttgtggggctcacacaatatatgaaatagtaccctctaaaaaagagaaaaaaaaaatcaggcggtcaaacttagagcaacattgtcttattaaagcatagtttatttcactagaaaaaatttaatatcaaggactattacatacttcattactaggaagttctttttaaaatgacacttaaaacaatcactgaaaacttgatccacatcacaccctgtttattttccttaaacatcttggaagcctaagcttctgagaatcatgtggcaagtgtgatgggcagtaaaataccagagaagatgtttagtagcaattaaaggctgtttgcacctttaaggaccagctgggctgtagtgattcctggggccagagtggcattatgtttttacaaaataatgacatatgtcacatgtttgcatgtttgtttgcttgttgaatttttgaacagccagttgaccaatcatagaaagtattactttctttcatatggtttttggttcactggcttaagaggtttctcagaatatctatggccacagcagcataccagtttccatcctaataggaatgaaattaattttgtatctactgataacagaatctgggtcacatgaaaaaaaatcattttatccgtcttttaagtatatgtttaaaataataatttatgtgtctgcatattgcagaacagctctgagagcaacagtttcccattaactctttctgaccaatagtgctggcaccgttgcttcctctttgggaagaggaaagggtgtgtgaacatggctaacaatcttcaaatacccaaattgtgatagcataaataaagtatttattttatgcctcagtatattattatttaattttttaggtaatgcctatctcttggtctattaaggaaagaagcaatcagtagagaattcaggatagttttgtttaaattcttgcagattacatgtttttacagtggcctgctattgaggaaaggtattcttctatacaacttgttttaacctttgagaacattgacagaaattatgcaatggtttgttgagatacggacttgatggtgctgtttaatcagtttgcttccaaagtggcctactcaagaggccctaagactggtagaaattaaaaggatttcaaaaactttctattcctttcttaaacctaccagcaaactaggattgtgatagcaatgaatggtatgatgaagaaagtttgaccaaatttgtttttttgttgttgttgttgttttgaatttgaaatcattcttattccctttaagaatgtttatgtatgagtgtgaagatgctagcgaacctatgctcagatattcatcgtaagtctcccttcacctgttacagagtttcagatcggtcactgatagtatgtatttctttagtaagaatgtgttaaaattacaatgatcttttaaaaagatgatgcagttctgtatttattgtgctgtgtctggtcctaagtggagccaattaaacaagtttcatatgtatttttccagtgttgaatctcacacactgtactttgaaaatttccttccatcctgaataacgaatagaagaggccatatatattgcctccttatccttgagatttcactacctttatgttaaaagttgtgtataattgttaaaatctgtgaaagaataaaaagtggatttaaattaaaaaaaaaaaaaaaaaaaa

SEQ ID NO: 634 - protein, 617 aa, Homo sapien
MDFSKLPKILDEDKESTFGYVHGVSGPVVTACDMAGAAMYELVRVGHSELVGEIIRLEGDMATIQVYEETSGVSVGDPVLRTGKPLSVELGPGIMGAIFDGIQRPLSDISSQTQSIYIPRGVNVSALSRDIKWDFTPCKNLRVGSHITGGDIYGIVSENSLIKHKIMLPPRNRGTVTYIAPPGNYDTSDVVLELEFEGVKEKFTMVQVWPVRQVRPVTEKLPANHPLLTGQRVLDALFPCVQGGTTAIPGAFGCGKTVISQSLSKYSNSDVIIYVGCGERGNEMSEVLRDFPELTMEVDGKVESIMKRTALVANTSNMPVAAREASIYTGITLSEYFRDMGYHVSMMADSTSRWAEALREISGRLAEMPADSGYPAYLGARLASFYERAGRVKCLGNPEREGSVSIVGAVSPPGGDFSDPVTSATLGIVQVFWGLDKKLAQRKHFPSVNWLISYSKYMRALDEYYDKHFTEFVPLRTKAKEILQEEEDLAEIVQLVGKASLAETDKITLEVAKLIKDDFLQQNGYTPYDRFCPFYKTVGMLSNMIAFYDMARRAVETTAQSDNKITWSIIREHMGDILYKLSSMKFKDPLKDGEAKIKSDYAQLLEDMQNAFRSLED

SEQ ID NO: 635 - DNA, 5857 bp, Homo sapien
cggcgcaggcggcggcgtccgaggagatttaatccagagactgacttcactatagaacccacagttgtatcaatggttggggaaagatagtggcaacaggcaaaggagaaacagctctgacatacaaagaaaatgagtatgctaaagccaagtgggcttaaggcccccaccaagatcctgaagcctggaagcacagctctgaagacacctacggctgttgtagctccagtagaaaaaaccatatccagtgaaaaagcatcaagcactccatcatctgagactcaggaggaatttgtggatgactttcgagttggggagcgagtttgggtgaatggaaataagcctggatttatccagtttcttggagaaacccagtttgcaccaggccagtgggctggaattgttttagatgaacccataggcaagaacgatggttcggtggcaggagttcggtatttccagtgtgaacctttaaagggcatatttacccgaccttcaaagttaacaaggaaggtgcaagcagaagatgaagctaatggcctgcagacaacgcccgcctcccgagctacttcaccgctgtgcacttctacggccagcatggtgtcttcctccccctccaccccttcaaacatccctcagaaaccatcacagccagcagcaaaggaaccttcagctacgcctccgatcagcaaccttacaaaaactgccagtgaatctatctccaacctttcagaggctggctcaatcaagaaaggagaaagagagctcaaaatcggagacagagtattggttggtggcactaaggctggtgtagtccggtttcttggggagaccgactttgccaagggggagtggtgtggcgtggagttagatgagccacttgggaagaatgatggcgctgttgctggaacaaggtattttcagtgtcaacccaaatatggcttgttcgctcctgtccacaaagttaccaagattggcttcccttccactacaccagccaaagccaaggccaacgcagtgaggcgagtgatggcgaccacgtccgccagcctgaagcgcagcccttctgcctcttccctcagctccatgagctcagtggcctcctctgtgagcagcaggcccagtcggacaggactattgactgaaacctcctcccgttacgccaggaagatctccggtaccactgccctccaggaggccctgaaggagaagcagcagcacattgagcagctgctggcggaacgggatctggagagggcggaggtggccaaggccacgagccacgtgggggagatagagcaggagctagctctggcccgggacggacatgaccagcatgtcctggaattggaagccaaaatggaccagctgcgaacaatggtggaagctgctgacagggagaaggtggagcttctcaaccagcttgaagaggagaaaaggaaggttgaggaccttcagttccgggttgaagaagaatcaattaccaaaggtgatcttgagacgcagaccaaactggagcatgcccgcattaaggagcttgaacagagcctgctctttgaaaagaccaaagctgacaaactccagagggagttagaagacactagggtggctacagtttcagaaaagtcacgtataatggaactggagaaagacctagcattgagagtacaggaagtagctgagctccgaagaaggctagagtccaataagcctgctggggatgtggacatgtcactttcccttttgcaagagataagctctttgcaagaaaagttagaagtcacccgtactgaccaccagagagaaataacttctctgaaggagcattttggagcccgggaagaaactcatcagaaggagataaaggctctgtataccgccacggaaaagctttccaaagagaacgagtcattgaaaagcaagctggagcatgccaacaaagagaactcagatgtgatagctctatggaagtccaaactggagactgccatcgcatcccaccagcaggcgatggaagaactgaaggtatctttcagcaaagggcttggaacagagacggcagaatttgctgaactaaaaacacaaatagagaaaatgagactagattaccaacacgaaatagaaaatttgcagaatcaacaagactctgaacgggctgcccatgctaaagagatggaagccttgagggctaaactgatgaaagttattaaagaaaaggaaaacagtctggaagccatcaggtcgaaactggacaaagcagaagaccagcatctcgtagaaatggaagacacgttaaacaaattacaggaagctgaaataaaggtaaaggagctagaggtactgcaagccaaatgcaatgaacaaaccaaggttattgataattttacatcacagctcaaggctactgaagaaaagctcttggatcttgatgcacttcggaaagccagttccgaaggtaaatcggaaatgaagaaacttagacagcagcttgaggcagctgagaaacagattaaacatttagagattgaaaagaatgctgaaagtagcaaggctagtagcattaccagagagctccaggggagagagctaaagcttactaaccttcaggaaaatttgagtgaagtcagtcaagtgaaagagactttggaaaaagaacttcagattttgaaagaaaagtttgctgaagcttcagaggaggcagtctctgttcagagaagtatgcaagaaactgtaaataagttacaccaaaaggaggaacagtttaacatgctgtcttctgacttggagaagctgagagaaaacttagcagatatggaggcaaaatttagagagaaagatgagagagaagagcagctgataaaggcaaaggaaaaactggaaaatgacattgcagaaataatgaagatgtcaggagataactcttctcagctgacaaaaatgaacgatgaattacgtctgaaagaaagagatgtagaagaattacagctaaaacttacaaaggctaatgaaaatgcaagttttctgcaaaaaagtattgaggacatgactgtcaaagctgaacagagccagcaagaagcagctaaaaagcatgaggaagaaaagaaagaattggagaggaaattgtcggacctggaaaagaaaatggaaacaagccacaaccagtgtcaggagctgaaagccaggtatgagagagccacttctgagacaaaaaccaagcatgaagaaatcctacagaacctccagaagacgctgctggacacagaggacaagctgaagggcgcacgggaggagaacagtggcttgctgcaggagctggaggagctgagaaagcaagccgacaaagccaaagctgctcaaacagcggaagatgccatgcagataatggaacagatgaccaaagagaagactgagactctggcctccttggaggacaccaagcaaacaaatgcaaaactacagaatgaattggacacacttaaagaaaacaacttgaaaaatgtggaagagctgaacaaatcaaaagaactcctgactgtagagaatcaaaaaatggaagaatttaggaaagaaatagaaaccctaaagcaggcagcagctcagaagtcccagcagctttcagcgttgcaagaagagaacgttaaacttgctgaggagctggggagaagcagggacgaagtcacaagtcatcaaaagctggaagaagaaagatctgtgctcaataatcagttgttagaaatgaaaaaaagagaatccaagttcataaaagacgcagatgaagagaaagcttccttgcagaaatccatcagtataactagtgccttactcacagaaaaggatgccgagctggagaaactgagaaatgaggtcacagtgctcaggggagaaaacgcctctgccaagtccttgcattcagttgttcagactctagagtctgataaggtgaagctcgagctcaaggtaaagaacttggagcttcaactcaaagaaaacaagaggcagctcagcagctcctcaggtaatacagacactcaggcagacgaggatgaaagagcccaggagagtcagattgatttcctaaattcagtaatagtggaccttcaaaggaagaatcaagacctcaagatgaaggtggagatgatgtcagaagcagccctgaatgggaacggggatgacctaaacaattatgacagtgatgatcaggagaaacagtccaagaagaaacctcgcctcttctgtgacatttgtgactgctttgatctccacgacacagaggattgtcctacccaggcacagatgtcagaggaccctccccattccacacaccatggcagtcggggtgaggaacgcccatactgtgaaatctgtgagatgtttggacactgggccaccaactgcaatgacgacgaaaccttctgatgaagcctccagtggagaactgggcttgctcagacgcactcgcattgacacaacgtaacaccagcattgtgtgtgcagacttcaggagaactcatgttattttttaaccccgtcaacaaatctaggaaaatattttgatcttcaacaaattgccctttagtctccccgtatgagttagaataataaatatttagtaggtgagttttcacctcgaattttgttttcttgatttttacgtttgaagacattgcaccagatgccattacatttattggccccccgaccttgtagaaaaacccctaccctcacaataccttatttaagtaactttaaattatgccgttacttttcatatttgcacctaagatatttccaggctgcatttgtatatttagattttttggttaagctttgacactggaatgagttgaaaaaatgtgccattttgcattttcatctactcatttaaagtattttattcttattcaaagaaatatctgagctctttgcactacctgttatcagtagtgcctttacttcaggcttgataatacttaggtgtgattataaaatcatgaagcaggtaaagggaggggcaagccccaaactgctgtggggacattttataatctatatgctgcacccacttaatctactgtggtgttttgtttattagttttgcataatttcagcttctatatattgtatgtatatattttttaaaaatctatattttgggaaaaaaacatacacaatgtgtctttctttttggacatttacctttttgaaaaagaaaacacttaaaatgatcattaggacataacagactaggccagacatagcatcttgtggctttgcaaccattttcatttgtttgttttccttttatttcttcaccagatttaaataaaaggaggaattttctccaatttttttttccttctctggcaggtatccccagcagtcaattaacaataagccagtataaaacacctaaataaccaatctacaatctcccttcacaagtttttttactgtttttagatgaatgtacgatgagaaattcaacgttaataattctggattttcttatcacaaaaaagaaaatgaaggacctcaaagcacctgaacagtttatcgaccagtttgaatctatttatcttcatttgaatgtcttctagatatgtaaaaagtcataaaatgtatcttccatgctacatgtacaataagaacttctataattgtatatatgcctttgatgtattttcccctcaagattatcaactgtgtgttcgacagtgaatattcaatctggtaccagttgaaatttttggttataaatgtaatacgaattgtttcacaaacagaaaacatgtaaagcagtattaaaatttggccaaacaagtgttctgtatctacttttaataaatggttattcttt

SEQ ID NO: 636 - protein, 1427 aa, Homo sapien
MSMLKPSGLKAPTKILKPGSTALKTPTAVVAPVEKTISSEKASSTPSSETQEEFVDDFRVGERVWVNGNKPGFIQFLGETQFAPGQWAGIVLDEPIGKNDGSVAGVRYFQCEPLKGIFTRPSKLTRKVQAEDEANGLQTTPASRATSPLCTSTASMVSSSPSTPSNIPQKPSQPAAKEPSATPPISNLTKTASESISNLSEAGSIKKGERELKIGDRVLVGGTKAGVVRFLGETDFAKGEWCGVELDEPLGKNDGAVAGTRYFQCQPKYGLFAPVHKVTKIGFPSTTPAKAKANAVRRVMATTSASLKRSPSASSLSSMSSVASSVSSRPSRTGLLTETSSRYARKISGTTALQEALKEKQQHIEQLLAERDLERAEVAKATSHVGEIEQELALARDGHDQHVLELEAKMDQLRTMVEAADREKVELLNQLEEEKRKVEDLQFRVEEESITKGDLETQTKLEHARIKELEQSLLFEKTKADKLQRELEDTRVATVSEKSRIMELEKDLALRVQEVAELRRRLESNKPAGDVDMSLSLLQEISSLQEKLEVTRTDHQREITSLKEHFGAREETHQKEIKALYTATEKLSKENESLKSKLEHANKENSDVIALWKSKLETAIASHQQAMEELKVSFSKGLGTETAEFAELKTQIEKMRLDYQHEIENLQNQQDSERAAHAKEMEALRAKLMKVIKEKENSLEAIRSKLDKAEDQHLVEMEDTLNKLQEAEIKVKELEVLQAKCNEQTKVIDNFTSQLKATEEKLLDLDALRKASSEGKSEMKKLRQQLEAAEKQIKHLEIEKNAESSKASSITRELQGRELKLTNLQENLSEVSQVKETLEKELQILKEKFAEASEEAVSVQRSMQETVNKLHQKEEQFNMLSSDLEKLRENLADMEAKFREKDEREEQLIKAKEKLENDIAEIMKMSGDNSSQLTKMNDELRLKERDVEELQLKLTKANENASFLQKSIEDMTVKAEQSQQEAAKKHEEEKKELERKLSDLEKKMETSHNQCQELKARYERATSETKTKHEEILQNLQKTLLDTEDKLKGAREENSGLLQELEELRKQADKAKAAQTAEDAMQIMEQMTKEKTETLASLEDTKQTNAKLQNELDTLKENNLKNVEELNKSKELLTVENQKMEEFRKEIETLKQAAAQKSQQLSALQEENVKLAEELGRSRDEVTSHQKLEEERSVLNNQLLEMKKRESKFIKDADEEKASLQKSISITSALLTEKDAELEKLRNEVTVLRGENASAKSLHSVVQTLESDKVKLELKVKNLELQLKENKRQLSSSSGNTDTQADEDERAQESQIDFLNSVIVDLQRKNQDLKMKVEMMSEAALNGNGDDLNNYDSDDQEKQSKKKPRLFCDICDCFDLHDTEDCPTQAQMSEDPPHSTHHGSRGEERPYCEICEMFGHWATNCNDDETF

SEQ ID NO: 637 - DNA, 3161 bp, Homo sapien
agcgaccgcagccggggggacgcgggaggatggagcaagtggagatcctgaggaaattcatccagagggtccaggccatgaagagtcctgaccacaatggggaggacaacttcgcccgggacttcatgcggttaagaagattgtctaccaaatatagaacagaaaagatatatcccacagccactggagaaaaagaagaaaatgttaaaaagaacagatacaaggacatactgccatttgatcacagccgagttaaattgacattaaagactccttcacaagattcagactatatcaatgcaaattttataaagggcgtctatgggccaaaagcatatgtagcaactcaaggacctttagcaaatacagtaatagatttttggaggatgatatgggagtataatgttgtgatcattgtaatggcctgccgagaatttgagatgggaaggaaaaaatgtgagcgctattggcctttgtatggagaagaccccataacgtttgcaccatttaaaatttcttgtgaggatgaacaagcaagaacagactacttcatcaggacactcttacttgaatttcaaaatgaatctcgtaggctgtatcagtttcattatgtgaactggccagaccatgatgttccttcatcatttgattctattctggacatgataagcttaatgaggaaatatcaagaacatgaagatgttcctatttgtattcattgcagtgcaggctgtggaagaacaggtgccatttgtgccatagattatacgtggaatttactaaaagctgggaaaataccagaggaatttaatgtatttaatttaatacaagaaatgagaacacaaaggcattctgcagtacaaacaaaggagcaatatgaacttgttcatagagctattgcccaactgtttgaaaaacagctacaactatatgaaattcatggagctcagaaaattgctgatggagtgaatgaaattaacactgaaaacatgatcagctccatagagcctgaaaaacaagattctcctcctccaaaaccaccaaggacccgcagttgccttgttgaaggggatgctaaagaagaaatactgcagccaccggaacctcatccagtgccacccatcttgacaccttctcccccttcagcttttccaacagtcactactgtgtggcaggacaatgatagataccatccaaagccagtgttgcatatggtttcatcagaacaacattcagcagacctcaacagaaactatagtaaatcaacagaacttccagggaaaaatgaatcaacaattgaacagatagataaaaaattggaacgaaatttaagttttgagattaagaaggtccctctccaagagggaccaaaaagttttgatgggaacacacttttgaataggggacatgcaattaaaattaaatctgcttcaccttgtatagctgataaaatctctaagccacaggaattaagttcagatctaaatgtcggtgatacttcccagaattcttgtgtggactgcagtgtaacacaatcaaacaaagtttcagttactccaccagaagaatcccagaattcagacacacctccaaggccagaccgcttgcctcttgatgagaaaggacatgtaacgtggtcatttcatggacctgaaaatgccatacccatacctgatttatctgaaggcaattcctcagatatcaactatcaaactaggaaaactgtgagtttaacaccaagtcctacaacacaagttgaaacacctgatcttgtggatcatgataacacttcaccactcttcagaacacccctcagttttactaatccacttcactctgatgactcagactcagatgaaagaaactctgatggtgctgtgacccagaataaaactaatatttcaacagcaagtgccacagtttctgctgccactagtactgaaagcatttctactaggaaagtattgccaatgtccattgctagacataatatagcaggaacaacacattcaggtgctgaaaaagatgttgatgttagtgaagattcacctcctcccctacctgaaagaactcctgaatcgtttgtgttagcaagtgaacataatacacctgtaagatcggaatggagtgaacttcaaagtcaggaacgatctgaacaaaaaaagtctgaaggcttgataacctctgaaaatgagaaatgtgatcatccagcgggaggtattcactatgaaatgtgcatagaatgtccacctactttcagtgacaagagagaacaaatatcagaaaatccaacagaagccacagatattggttttggtaatcgatgtggaaaacccaaaggaccaagagatccaccttcagaatggacatgattcagggagctagaagacactttaagttatactggaaaattcaggtgccactgaaagccagatttatagtattccatctttaatatgtgggactaacagcagtgtagattgttaccttaatattttttgctgggaccatctacctgccttatactacacttaggaaaaagtattacatatggtttattttgaaacttcaagtattattgccttaatgtctcttaaccctgttacacgctgcttgtagacatgttaatatagtaatacctttatgatatattgagtttaaggactactctttttctgttttatcatgtatgcattattttgtatatgtacagggcaagtaggtatataatttgataaagttgcaattgaaatattattaacagaagatgtaagaaatttctgcatggtctaaatctttgtgtactttatttgtaaattatttgccctggagttttagaaaatagtttctgaattttaaacttgctggattcatgcagccagctttgcaggttatcagagatcaaagattgtaataataattttgtaaattgtaagcaaaaagttatttttatattatatacagtctaattgttcatcctaattgttcctgttttcatctagtcagagattcagtaagtgccttggaacaatattgaattctcttagcttgtgtgtgtttctttaatatttgaactcaagtgggattagaagactatcaaaatacatgtatgtttcaggatatttgacctgtcattaaaaaaaacaaacagttttacagtg

SEQ ID NO: 638 - protein, 780 aa, Homo sapien
MEQVEILRKFIQRVQAMKSPDHNGEDNFARDFMRLRRLSTKYRTEKIYPTATGEKEENVKKNRYKDILPFDHSRVKLTLKTPSQDSDYINANFIKGVYGPKAYVATQGPLANTVIDFWRMIWEYNVVIIVMACREFEMGRKKCERYWPLYGEDPITFAPFKISCEDEQARTDYFIRTLLLEFQNESRRLYQFHYVNWPDHDVPSSFDSILDMISLMRKYQEHEDVPICIHCSAGCGRTGAICAIDYTWNLLKAGKIPEEFNVFNLIQEMRTQRHSAVQTKEQYELVHRAIAQLFEKQLQLYEIHGAQKIADGVNEINTENMISSIEPEKQDSPPPKPPRTRSCLVEGDAKEEILQPPEPHPVPPILTPSPPSAFPTVTTVWQDNDRYHPKPVLHMVSSEQHSADLNRNYSKSTELPGKNESTIEQIDKKLERNLSFEIKKVPLQEGPKSFDGNTLLNRGHAIKIKSASPCIADKISKPQELSSDLNVGDTSQNSCVDCSVTQSNKVSVTPPEESQNSDTPPRPDRLPLDEKGHVTWSFHGPENAIPIPDLSEGNSSDINYQTRKTVSLTPSPTTQVETPDLVDHDNTSPLFRTPLSFTNPLHSDDSDSDERNSDGAVTQNKTNISTASATVSAATSTESISTRKVLPMSIARHNIAGTTHSGAEKDVDVSEDSPPPLPERTPESFVLASEHNTPVRSEWSELQSQERSEQKKSEGLITSENEKCDHPAGGIHYEMCIECPPTFSDKREQISENPTEATDIGFGNRCGKPKGPRDPPSEWT

SEQ ID NO: 639 - DNA, 1324 bp, Homo sapien
cggcacgagcgccgccgaggattcagcagcctcccccttgagccccctcgcttcccgacgttccgttcccccctgcccgccttctcccgccaccgccgccgccgccttccgcaggccgtttccaccgaggaaaaggaatcgtatcgtatgtccgctatccagaacctccactctttcgacccctttgctgatgcaagtaagggtgatgacctgcttcctgctggcactgaggattatatccatataagaattcaacagagaaacggcaggaagacccttactactgtccaagggatcgctgatgattacgataaaaagaaactagtgaaggcgtttaagaaaaagtttgcctgcaatggtactgtaattgagcatccggaatatggagaagtaattcagctacagggtgaccaacgcaagaacatatgccagttcctcgtagagattggactggctaaggacgatcagctgaaggttcatgggttttaagtgcttgtggctcactgaagcttaagtgaggatttccttgcaatgagtagaatttcccttctctcccttgtcacaggtttaaaaacctcacagcttgtataatgtaaccatttggggtccgcttttaacttggactagtgtaactccttcatgcaataaactgaaaagagccatgctgtctagtcttgaagtccctcatttaaacagaggtcaagcaataggcgcctggcagtgtcaagcctgaaaccaagcaataccgtcatgtttcagccaagcccagagccctaagattacaaacaactatggccggaacctcctcagctctccctctgcagagttccctaccctaagagaatgttaccacctgaacagtcctcggtgaatctgagaggagaggatggggtaaggcagaagcaccagctgtactactagaagggagcttttggtggtagatcccctggtgtctccaacctgactaggtggacagagctcaaagaggccctcttaccgctagcgaggtgataggacatctggcttgccacaaaggtctgttcgaccagacatatcctagctaagggatgtccaaacatcagaatgtgaggccaaccttctatcagagttaaacttttgacaagggaacaaatctcaaactgatccatcagtcatgtagctagctgtagagcttgcaacttaatagcagcagctgcccaatgccatgtgaagtaacaaactggtttttggtttttttttccccttcagttttaatgttatgtgtaatgtatttaaacccttatttaaataaaacttgttttcagaaaaaaaaaaaaaaaaaaaa

SEQ ID NO: 640 - protein, 113 aa, Homo sapien
MSAIQNLHSFDPFADASKGDDLLPAGTEDYIHIRIQQRNGRKTLTTVQGIADDYDKKKLVKAFKKKFACNGTVIEHPEYGEVIQLQGDQRKNICQFLVEIGLAKDDQLKVHGF

SEQ ID NO: 641 - DNA, 1582 bp, Homo sapien
ccgagctgtgcttgtggctgcggctgctaactggctgcgcacagggagctgtcaccatgcctcactcgtacccagccctttctgctgagcagaagaaggagttgtctgacattgccctgcggattgtagccccgggcaaaggcattctggctgcggatgagtctgtaggcagcatggccaagcggctgagccaaattggggtggaaaacacagaggagaaccgccggctgtaccgccaggtcctgttcagtgctgatgaccgtgtgaaaaagtgcattggaggcgtcattttcttccatgagaccctctaccagaaagatgataatggtgttcccttcgtccgaaccatccaggataagggcatcgtcgtgggcatcaaggttgacaagggtgtggtgcctctagctgggactgatggagaaaccaccactcaagggctggatgggctctcagaacgctgtgcccaatacaagaaggatggtgctgactttgccaagtggcgctgtgtgctgaaaatcagtgagcgtacaccctctgcacttgccattctggagaacgccaacgtgctggcccgttatgccagtatctgccagcagaatggcattgtgcctattgtggaacctgaaatattgcctgatggagaccacgacctcaaacgttgtcagtatgttacagagaaggtcttggctgctgtgtacaaggccctgagtgaccatcatgtatacctggaggggaccctgctcaagcccaacatggtgaccccgggccatgcctgtcccatcaagtataccccagaggagattgccatggcaactgtcactgccctgcgtcgcactgtgcccccagctgtcccaggagtgaccttcctgtctgggggtcagagcgaagaagaggcatcattcaacctcaatgccatcaaccgctgcccccttccccgaccctgggcgcttaccttctcctatgggcgtgccctgcaagcctctgcactcaatgcctggcgagggcaacgggacaatgctggggctgccactgaggagttcatcaagcgggctgaggtgaatgggcttgcagcccagggcaagtatgaaggcagtggagaagatggtggagcagcagcacagtcactctacattgccaaccatgcctactgagtatccactccataccacagcccttggcccagccatctgcacccacttttgcttgtagtcatggccagggccaaatagctatgcagagcagagatgccttcacctggcaccaacttgtcttcctttctctcttcccttcccctctctcattgctgcacctgggaccataggatgggaggatagggagcccctcatgactgagggcagaagaaattgctagaagtcagaacaggatggctgggtctccccctacctcttccagctcccacaattttcccatgatgaggtagcttctccctgggctctccttcttgcctgccctgtctcctgggatcagagggtagtacagaagccctgactcatgccttgagtacataccatacagcaaataaatggtagcaaaacaaaaaaaaaaaaaaaaaaaaaaaaaa

SEQ ID NO: 642 - protein, 364 aa, Homo sapien
MPHSYPALSAEQKKELSDIALRIVAPGKGILAADESVGSMAKRLSQIGVENTEENRRLYRQVLFSADDRVKKCIGGVIFFHETLYQKDDNGVPFVRTIQDKGIVVGIKVDKGVVPLAGTDGETTTQGLDGLSERCAQYKKDGADFAKWRCVLKISERTPSALAILENANVLARYASICQQNGIVPIVEPEILPDGDHDLKRCQYVTEKVLAAVYKALSDHHVYLEGTLLKPNMVTPGHACPIKYTPEEIAMATVTALRRTVPPAVPGVTFLSGGQSEEEASFNLNAINRCPLPRPWALTFSYGRALQASALNAWRGQRDNAGAATEEFIKRAEVNGLAAQGKYEGSGEDGGAAAQSLYIANHAY

SEQ ID NO: 643 - DNA, 6479 bp, Homo sapien
agtctccttgctctgggctgctccaggccaggccatgcggaaagtgtgttgttatgaggattcaatgaggagacctgtatgaagtgccttcccctgtgcctggctcatagcgaaaacagaagaacagattgcagcagaagaggcctggaatgagacggagaaggtgtggctggtccatagggacggcttctcactggccagtcaactcaaatctgaggagctcaacttgcctgaggggaaggtgcgtgtgaagctggaccacgatggggccatcctggatgtggatgaggatgacgttgagaaggctaatgctccctcctgcgaccgtctggaggatctggcctcactggtgtacctcaatgagtccagcgtcctgcacaccttgcgccagcgctatggcgctagcctgctgcacacgtatgctggccccagcctgctggttcttggcccccgtggggcccctgctgtgtactctgagaaggtgatgcacatgttcaagggttgtcggcgggaggacatggcaccccacatctatgcagtggcccagaccgcatacagggcgatgctgatgagccgtcaggatcagtcaatcatcctcctgggcagtagtggcagtggcaagaccaccagctgccagcatctggtgcagtacctggccaccatcgcgggcatcagcgggaacaaggtgttttctgtggagaagtggcaggctctgtacaccctcctggaagcctttgggaacagccccaccatcattaatggcaatgccacccgcttctcccagatcctctccctggactttgaccaagctggccaggtggcctcagcctccattcagacaatgcttctggagaagctgcgtgtggctcggcgcccagccagtgaagccacattcaacgtcttctactacctgctggcctgtggggatggcaccctcaggacagagctccacctcaaccacttggcagagaacaatgtgtttgggattgtgccactggccaagcctgaggaaaagcagaaggcagctcagcagtttagtaagctgcaggcggccatgaaggtgctgggcatctcccccgatgaacagaaggcctgctggttcattctggctgccatctaccacctgggggctgcgggagccaccaaagaagctgctgaagctgggcgcaagcagtttgcccgccatgagtgggcccagaaggctgcgtacctactgggctgcagcctggaggagctgtcctcagccatcttcaagcaccagcacaagggtggcaccctgcagcgctccacctccttccgccagggccccgaggagagtggcctgggagatgggacaggcccgaaactgagtgcactggagtgccttgagggcatggcggccggcctctacagcgagctcttcacccttctcgtctccctggtgaatagggctctcaagtccagccagcactcactctgctccatgatgattgtcgacaccccgggcttccagaaccctgagcagggtgggtcagcccgcggagcctcctttgaggagctgtgccacaactacacccaagaccggctgcagaggctcttccacgagcgcaccttcgtgcaggagttggaaagatacaaggaggagaacatcgagctggcgtttgacgacttggaaccccccacggatgactctgtggctgctgtggaccaggcctcccatcagtccctggtccgctcgctggcccgcacagacgaggcgaggggcctgctctggctattggaagaggaggctctggtgccaggggccagtgaggacaccctcctggagcgccttttctcctattatggcccccaggaaggtgacaaaaaaggccaaagcccccttctgcacagcagcaaaccacaccactttctcctgggccacagccatggcaccaactgggtagagtacaatgtgactggctggctgaactacaccaagcagaacccagccacccagaatgtcccccggctcctgcaggactcccagaaaaaaatcatcagcaacctgtttctgggccgcgcaggcagtgccacggtgctctctggctccatcgcgggcctggagggcggctcgcagctggcactgcgccgggccaccagcatgcggaaaacctttaccacaggcatggtggctgtcaaaaagaagtcactgtgcatccagatgaagctacaggtggacgccctcatcgacaccatcaagaagtcaaagctgcattttgtgcactgcttcctgcctgtagctgagggctgggctggggagccccgttccgcctcctcccgccgagtcagcagcagcagtgagctggacctgccctcgggagaccactgcgaggctgggctcctgcagctcgacgtgcccctgctccgcacccagctccgcggctcccgcctgctcgatgccatgcgcatgtaccgccaaggttaccctgaccacatggtgttttccgagttccgccgccgctttgatgtcctggccccgcacctgaccaagaaacacgggcgtaactacatcgtggtggatgaaaggcgggcagtggaggagctgctggagtgcttggatctggagaagagcagctgctgcatgggcctgagccgggtgttcttccgggcgggcaccttggcacggctggaggagcagcgggatgaacaaaccagcaggaacctaaccctgttccaagcagcctgcaggggctacctggcccgccagcacttcaagaagagaaagatccaggacctggccattcgctgtgtacagaagaacatcaagaagaacaaaggggtgaaggactggccctggtggaagctttttaccacagtgaggcccctcatcgaagtacagctgtcagaggagcagatccggaacaaagacgaggagatccagcagctgcggagcaagctcgagaaggcggagaaggagaggaacgagctgcggctcaacagtgaccggctggagagccggatctcagagctgacatcggagctgacagatgagcgtaacacaggagagtccgcctcccagctgctggacgcggagacagcagagaggctccgggctgagaaggagatgaaggaactgcagacccagtacgatgcactgaagaagcagatggaggttatggaaatggaggtgatggaggcccgtctcatccgggcagcggagatcaacggggaagtggatgatgatgatgcaggtggcgagtggcggctgaagtatgagcgggctgtgcgggaggtggacttcaccaagaaacggctccagcaggagtttgaggacaagctggaggtggagcagcagaacaagaggcagctggaacggcggctcggggacctgcaggcagatagtgaggagagtcagcgggctctgcagcagctcaagaagaagtgccagcgactgacggctgagctgcaagacaccaagctgcacctggagggccagcaggtccgcaaccacgaactggagaagaagcagaggaggtttgacagtgagctctcgcaggcacatgaggaggcccagcgggagaagctgcagcgggagaagctgcagcgggagaaggacatgctcctcgctgaggctttcagcctgaagcagcaactagaggaaaaagacatggacattgcagggttcacccagaaggttgtgtctctagaggcagagctccaggacatttcttcccaagagtccaaggatgaggcttctctggccaaggtcaagaaacagctccgggacctggaggccaaagtcaaggatcaggaagaagagctggatgagcaggcagggaccatccagatgctggaacaggccaagctgcgtctggagatggagatggagcggatgagacagacccattctaaggagatggagagtcgggatgaggaggtggaggaggcccggcagtcgtgtcagaagaagttaaaacagatggaggtgcagctagaggaagagtatgaggacaagcagaaggttctgcgagagaagcgggagctggagggcaagctcgccaccctcagcgaccaggtgaaccggcgggactttgagtcagagaagcggctgcggaaggacctgaagcgcaccaaggccctgctggcagatgcccagctcatgctggaccacctgaagaacagtgctcccagcaagcgagagattgcccagctcaagaaccagctggaggagtcagagttcacctgtgcggcagccgtgaaagcacggaaagcaatggaggtggagatcgaagacctgcacctgcagattgatgacatcgccaaagccaagacagcgctggaggagcagctgagccgccttcagcgtgagaagaatgagatccagaaccggctggaggaagatcaggaagacatgaacgaattgatgaagaagcacaaggctgccgtggctcaggcttcccgggacctggctcagataaatgatctccaagctcagctagaagaagccaacaaagagaagcaggagctgcaggagaagctacaagccctccagagccaggtggagttcctggagcagtccatggtggacaagtccctggtgagcaggcaggaagctaagatacgggagctggagacacgcctggagtttgaaaggacgcaagtgaaacggctggagagcctggctagccgtctcaaggaaaacatggagaagctgactgaggagcgggatcagcgcattgcagccgagaaccgggagaaggaacagaacaagcggctacagaggcagctccgggacaccaaggaggagatgggcgagcttgccaggaaggaggccgaggcgagccgcaagaagcacgaactggagatggatctagaaagcctggaggctgctaaccagagcctgcaggctgacctaaagttggcattcaagcgcatcggggacctgcaggctgccattgaggatgagatggagagtgatgagaatgaggacctcatcaacagtgagggagactctgatgtggactcggagctggaggaccgtgttgacggggtcaagtcctggttgtcaaaaaacaagggaccttccaaggcagcttctgatgatggcagcttaaagagttccagccccaccagctactggaagtcccttgcccctgatcggtcagatgatgagcacgaccctctcgacaacacctccagaccgcgatactcccacagttatctgagtgacagcgacacagaggccaagctgacggagactaacgcatagcccaggggagtggttggcagccctctcaccccagggcctgtggctgcctgggcacctctcccaggaagtggtggggcaccggtctcccccacccgactgctgatctgcatgggaaacaccctgaccttcttctgtcaggggcactttccaggctatgggtgtctgatgtctccacgtggaagaggtgggggaaagaggagtttctgaagagaactttttgctcctctgtctcaaaatgccagactcttggcttctaccctgtgtcaccgtgggcagtggcaggtggcctggcactgcatggagccagcacgttgacctccctctcagctccctgctcagggacggtggacaggttgcctactgggacactctaggttgctgggtccatggggaggattgggggaggagaagcagtgccttccctctcgtgtggggtgggggctctctcttcttggtgcctgctgtctttctactttttaatttaaatacccaacctctccatcacagctgcatccctgagagtgggagggggctgtagtggtagctggggctcccaagaacgactcgggaatgtcatctccatcttcacccttcagagagcagtcctttctctgtgcagctggagacgctggtgaggagagccgggtccaggttcttaagaatgaggtgcggaggggctctccggtgctgctgggctgggttgagcaagcctacgcagacaagtgtgtgtgtggaccatccgcacctccagcccccaccccaccctctttgtctcagcgtgttatgtgcaatgacctatttaaggtaaacccattccaactacagcagttcagggctgatccaagcactgcctccctcctgctctgtccaggtggtctggaccataaactcaacttgagagggaaggcttggggttgaggacttgtgatcagaaaaactgaagatggaagttttggccggtgctcattagacatgagtcctcactctgtgtcctgagcccgtgtcattcttccaacctccctgcccccacacacttatcccagacacaacaccatgtggtctggaggtcccagcccccaccctaaaaaggttatccctgagaactccaccagacttgggagcccaagtgcagtgcctggtgctgctcccatctgccgccccccttctctcctgcaattggtttgtactcactgggctgtgctctcccctgtttacccgatgtatggaaataaaggcccttttcctcctg

SEQ ID NO: 644 - protein, 1581 aa, Homo sapien [sequence omitted]

SEQ ID NO: 645 - DNA, 1717 bp, Homo sapien
gggcgcagcacactcccagccggccgcagcctgacacgccgcgcggccccccagtctcccgcggctgctcccccaggcatggcacagggcctcgcctcactatggcagcagcacggcacagcacgctcgacttcatgctcggcgccaaagctgatggtgagaccattctaaaaggcctccagtccattttccaggagcaggggatggcggagtcggtgcacacctggcaggaccatggctatttagcaacctacacaaacaagaacggcagctttgccaatttgagaatttacccacatggattggtgttgctggaccttcagagttatgatggtgatgcgcaaggcaaagaagagatcgacagtattttgaacaaagtagaggaaagaatgaaagaattgagtcaggacagtactgggcgggtgaaacgattaccacccatagtgcgaggaggagccatcgacagatactggcccaccgccgacgggcgcctggttgaatatgacatagatgaagtggtatatgacgaagattcaccttatcaaaatataaaaattctacactcgaagcagtttggaaatattctcatccttagtggggatgttaatttggcagagagtgatttggcatatacccgggccatcatgggcagtggcaaagaagattacactggcaaagatgtactcattctgggaggtggagacggaggcatattgtgtgaaatagtcaaactaaaaccaaagatggtcactatggtagagattgaccaaatggtgattgatgggtgtaagaaatacatgcgaaaaacgtgtggcgatgtcttagacaatcttaaaggagactgctatcaggttctaatagaagactgtatcccggtactgaagaggtacgccaaagaagggagagaatttgattatgtgattaatgatttgacagctgttccaatctccacgtctccagaagaagattccacatgggagtttctcagactgattcttgacctctcaatgaaagtgttgaaacaggatgggaaatattttacacaggggaactgtgtcaatctgacagaagcactgtcgctctatgaagaacagctggggcgcctgtattgtcctgtggaattttcaaaggagatcgtctgtgtcccttcatacttggaattgtgggtattttacactgtttggaagaaagctaaaccctgaagatcagtagcccctaatcacatgtgctgcaaatagccttcctgacctccatatgctgtacatgacatcaaaatgagtcaggcaattgattgtgaattccttaaagttttcctttttttaataattatttttaatttaaaaaagcaaatggaaaatgtatattttgatgagcttagggtgttttttttttgaaagtcagctgaaggatggttagacagcacagcgaagactgctaaatgcactgaccccccccattagaatgtgatttttgttcctttttatttctctgtgggcttttgtttttgtttttgttttggtagatcttcaatttggatatttggaggagtgaacatcgttgttttgctggagggaagatcttgatggtgtttctttccccaaaaattgacttagatattaaaatttggtgcttataagagagagttaaaaaaaaataggattgcttcaattaaaattacaaaagagacaaaaaaaaaaaaaaaaaaaaaaaaaaaaaa

SEQ ID NO: 646 - protein, 366 aa, Homo sapien
MAAARHSTLDFMLGAKADGETILKGLQSIFQEQGMAESVHTWQDHGYLATYTNKNGSFANLRIYPHGLVLLDLQSYDGDAQGKEEIDSILNKVEERMKELSQDSTGRVKRLPPIVRGGAIDRYWPTADGRLVEYDIDEVVYDEDSPYQNIKILHSKQFGNILILSGDVNLAESDLAYTRAIMGSGKEDYTGKDVLILGGGDGGILCEIVKLKPKMVTMVEIDQMVIDGCKKYMRKTCGDVLDNLKGDCYQVLIEDCIPVLKRYAKEGREFDYVINDLTAVPISTSPEEDSTWEFLRLILDLSMKVLKQDGKYFTQGNCVNLTEALSLYEEQLGRLYCPVEFSKEIVCVPSYLELWVFYTVWKKAKP

SEQ ID NO: 647 - DNA, 6014 bp, Homo sapien
attatgggctgtgggtgccgctgagcaagatggagctgtctgcagtgggcgagcgggtcttcgcggccgaatccatcatcaaacggcggatccgaaagggacgcatcgagtacctggtgaaatggaaggggtgggcgatcaagtacagcacttgggagcccgaggagaacatcctggactcgcggctcattgcagccttcgaacaaaaggagagggagcgtgagctgtatgggcccaagaagaggggacccaaacccaaaactttcctcctgaaggcgcgggcccaggccgaggccctccgcatcagtgatgtgcatttctctgtcaagccgagcgccagtgcctcctcgcccaagctgcactccagcgcagccgtgcaccggctcaagaaggacatccgccgctgccaccgtatgtcccgccgtcccctgccccgcccggacccgcaggggggcagccccggactgcgcccgcccatttcgcccttctcggagacggtgcgcatcatcaaccgcaaggtgaagccgcgggagcccaagcggaaccgcatcatcctgaacctgaaggtgatcgacaagggcgctggcggcgggggcgccgggcagggggccggggcgctggcccgccccaaagtcccctcgcggaaccgcgttataggcaagagcaagaagttcagcgagagcgtcctgcgtacacagatccgccacatgaagttcggcgcctttgcgctgtacaagcctccgcccgcccccctggtagccccgtcccccggcaaggctgaggcctcagccccgggccctgggctacttctggccgcccccgccgccccctacgacgcccgcagctctggctcctccggctgcccctcgcctacaccacagtcctctgaccccgacgacacgccccccaagctcctccccgagaccgtgagcccatccgcccccagctggcgcgagccggaggtgctcgacctgtccctccctcccgagtcggcagccaccagcaagcgggcaccgcctgaggtcacagctgctgccggcccggcacctcccacggcccctgagcccgccggtgcctcctccgagcccgaggctggggactggcgccccgagatgtcaccctgctccaatgtggtcgtcaccgatgtcaccagcaacctcctgacggtcacaatcaaggaattctgcaaccctgaggatttcgagaaggtggctgctggggtagcaggcgccgctgggggcggtggcagcattggggcgagcaagtgagggggctccaccaaggaggggggcttgggggggccctcctgcccgaagtcatactcttgctcccaccccacccttgcccccagccctctctccctgtgctttgcttgtctcaaatggctcggtgttgacccagggatggggctgggtagttggggtcccagaaagccgggggtaggggccaccctggaatggggcaggggaagggcacaccccctgcccatgcatggtagcccactgggtggtttctggaaagccctagaaactagggttcctctgccccttccacatcccacctgtctctctagcttgcttcctgctctcctgtgcggcgtctgatttctcggtgctaacctggcagctgtggggcccttaggagccccccaccgagggtggacacagtccctttccttcctgcagatgcctaggcaggaggagggcttcctgcctgtttggcaaagtcccaggcagaggccaaggatgaggcctgactcggctcctccctccacatcagccagggcatcagaagttgggccagggcggggtcttccctgctcgattttggacgaggcctaagtagaccccctatgccctgccccagccctggctctttcctaaccccctcaacggtgggaggaactggcagagggtgcgcctggccacagcctccccgcatctaaaggccccttcagttcttgaccaaaggtgctacgagaacctgccgtggaaacttccagttgtgcgtctgccccactcgctgtgtttgtccgtgggttcatacatgcattgggtgctaggccccaggctgccgggtggcaccctttacagttcctttgaacaggggcattgaaggcctggactgcctctcgcctcagtaggcctggggaccaggcttgggtctggaggtttgctgtggaagtcaccaggcctcccctcctggcccaggtgtgctgggggcaccgtgccccccacccccctgccctcctcagggtggtcagcccaacctgtcggaccttcacttcacatcatggtggggaccgagatagagagggagaccccattccaagctccctcttcctccgggtgtttggggaggatgctgaagaatccattcccgagggcctcccggcttgtcccagcccctcttttgcttctgaccacggaggctttctcacagcccagcctgcctgaagcaaaggaggctcccgtgtcctgggcagcttctgtttccctctgctgcctgggagctgaggcacccgtgccagtggcagaggccacagccccagccttaggccaggccctgggagggcaggcaggcaaaggggagaccagagggtctgtgttctccaggagaatgagggtgttggtcccagaattgggaccggggccccgctggccagccctgggccacttcccgggtctccattgtgcgtgggtggcgtgttccaggcgtggctggagctggcttcctggctgtgctgccatgggcccctccctcagaagcacgttggcaggaggccgatcagaaccctagcgcctttggtcctaagaatgggaggctgccttccttcccaatctccctgccagggcccacagcgtggccctagccctcccctccccgggatgtagaacggggaccctcgcagggttggggcgggggctgatactcctcggcccctccctaccctgccctgtgtgttggctttgtggccgtccaagtgccaattggcttttcgcccaaataagggctggtatttctcctctgtccttggaggtgatttccccctgaccccctcccccaggtgagtgaccacctgggtgccagttacaggtgtttccagagaccatagaaatgtgttttcctgagagttcgtgtcattcgtgacttttttgtaaagaagttgtgttttcagaggtgattttatgacaggaaagtgaaagaattagttttgcaaaaaaacaaaaacaaaaaaagaggaaaaaaaaaagaaatagaaaaaaatattgtgggattcctatgggggggtggcgggggagaaagagctatttaagaaaaaatagtaacgcagtgattgcacaggtgaggtggcaatgtcaggatggggcggaggcctgggcccagctggcaggtcccctggcatcgcaggcactgtggagagggcctggacccagatctccacacccgtgcttgctcaaagggaaggacaacagcgggcccccgggagctaacccaagctgcaggtcccggcaagctgaggtttgggagggtgggggttgtcactggtgattttctccagggggctggtgagtgggcagtttggtttcttgcccccttctgttcctttcccagttgttgggccatctggtccccaccaccgccaccctatgggggagacctccctccccacgggtcaccctaaagcccacaacctctctgagcctccctggcctgaaaggggatgcaggcttcaggaggcaagaagctgggcccctgggggtggctggggagagggaatgcatttcccttgccacaggtggtctgcttctgctggcctgagctccaagtggagcagcccgggccagccttggtgcatgaagaggcaccaggcacaccgccttgaggtgggcagtgcccatgggggcccgagtggatgggaccgagggtgagtggagcctccttcctcccctctctagtacccccgcctcccacacacttgcacggatcggcctcccttgggagatcagcctccatgggcccctcgtccacccttgctgctttccatttgcctaattaccaagcagaagttgcaatctggtttgctttatttttgtatgtgaaataacccccaaagcccaatctcctcctacgttcaatattggttggggcatccgtcatctccccttaagtgcgccccctccccacccaagtatcataggaaaccggtgaggtctggtgtctctggtttgagacggtaagttgggacccatccctgtctgggtgcccactctgacctttagtttgcccttctgtgaaatgggtgtattgggtagcaagccctcttcagaaagcgctgctggtgtcagagcagctgcccagtaccaggtggggggtcaaggttgctggtactggggcccccagctgcccacaacccctctttgttctcaccctgcaaaggggtcaaggtcaaaatgagcctcatccttcctatgatctgggaagaggtgatgatcaagtccccaacttcagtgtgaggtggacagagttggggggatggcccctttttgaagaggtgaaaatggttttggagaagcgcagctgcttcactgggggaatgcggcagggactggggcccaggatgctttggcctatggggaaaagccctttaaaaggcagggcccaggccctggagccagcacaagactggcctcgagcccctgagccaggaggtcctggaggagagccaggccggtgggcccgcccaaggctggagggtcagccccaacagggagctgggttggccagggggctggactgctaccagcctctctggcctatggggacccaagaggacacatcccccttttgcccactcttctgtgtcattttgttgttttggtttgtggtggtttttcttttttcttttgtttttcttttttctttctttctttttttttttttttttttttttttttgcacttcgcccacacaggacagtggagccccacctggtcagttccacttccgggctcccatgcacttgcccaaggcggcctctttgggacggggatggtttgaggaaacacttttaaagaaaaaaggaagacattgaaaggttttagtttcttccctatctgcatgtcctctcatatagaaagcccagaattaggggctagaactccaggagagggtctccccgactcatctcttgctgacggtcaccaggatgcagaaatagggagatggttagtgggggccaaagatgccccctcccaggccttcgtggttccctcctccgccccctgcaatctttggaggagtcagtgcctcactccagcagtgagtgcctactgtatgcaggtagtcagccaggcaaagagagactaacggtctcatgggggaaccctcttgcgggaggccgggtagctggagcgaagcgttccggctgcccttgctgctgggtggagtggagagggagacttctttttgttggttttaatttaaaaacacaaaggcctaaagaaatacgtatcttataatttttttaatttttgagacgttcatttaatgaattgtgcacgaatgaattctatatatataaaatatacatatatagctctatatttggggaggggcactgtctcttttttctctcatttttaaaatgaagtgttgttgcctttgtatgtggttcaaccatccagctcccagctggctaaactttgcctccagtggtcaaagatgggaaaagagtggggttggcaggagatggaaaacggaggtgccgccccagcatggggggcaggtcccccagtccaccctgcccctccccctgtggagaagacgcttagttgggggtgtgggtttgggctccattctggattcggcggttccgggggaggggtgggtctgtgccgattactctgtcttgtacgtttgttctgctgctcttcaatattgtatcaacgccaggaaaggggggtgaaaagcctcttttaccccccaaataaattgtcacattccgaagctga

SEQ ID NO: 648 - protein, 412 aa, Homo sapien
MELSAVGERVFAAESIIKRRIRKGRIEYLVKWKGWAIKYSTWEPEENILDSRLIAAFEQKERERELYGPKKRGPKPKTFLLKARAQAEALRISDVHFSVKPSASASSPKLHSSAAVHRLKKDIRRCHRMSRRPLPRPDPQGGSPGLRPPISPFSETVRIINRKVKPREPKRNRIILNLKVIDKGAGGGGAGQGAGALARPKVPSRNRVIGKSKKFSESVLRTQIRHMKFGAFALYKPPPAPLVAPSPGKAEASAPGPGLLLAAPAAPYDARSSGSSGCPSPTPQSSDPDDTPPKLLPETVSPSAPSWREPEVLDLSLPPESAATSKRAPPEVTAAAGPAPPTAPEPAGASSEPEAGDWRPEMSPCSNVVVTDVTSNLLTVTIKEFCNPEDFEKVAAGVAGAAGGGGSIGASK

SEQ ID NO: 649 - DNA, 5175 bp, Homo sapien
gccccgagtgcaatcgcgggaagccagggtttccagctaggacacagcaggtcgtgatccgggtcgggacactgcctggcagaggctgcgagcatggggccctggggctggaaattgcgctggaccgtcgccttgctcctcgccgcggcggggactgcagtgggcgacagatgtgaaagaaacgagttccagtgccaagacgggaaatgcatctcctacaagtgggtctgcgatggcagcgctgagtgccaggatggctctgatgagtcccaggagacgtgcttgtctgtcacctgcaaatccggggacttcagctgtgggggccgtgtcaaccgctgcattcctcagttctggaggtgcgatggccaagtggactgcgacaacggctcagacgagcaaggctgtccccccaagacgtgctcccaggacgagtttcgctgccacgatgggaagtgcatctctcggcagttcgtctgtgactcagaccgggactgcttggacggctcagacgaggcctcctgcccggtgctcacctgtggtcccgccagcttccagtgcaacagctccacctgcatcccccagctgtgggcctgcgacaacgaccccgactgcgaagatggctcggatgagtggccgcagcgctgtaggggtctttacgtgttccaaggggacagtagcccctgctcggccttcgagttccactgcctaagtggcgagtgcatccactccagctggcgctgtgatggtggccccgactgcaaggacaaatctgacgaggaaaactgcgctgtggccacctgtcgccctgacgaattccagtgctctgatggaaactgcatccatggcagccggcagtgtgaccgggaatatgactgcaaggacatgagcgatgaagttggctgcgttaatgtgacactctgcgagggacccaacaagttcaagtgtcacagcggcgaatgcatcaccctggacaaagtctgcaacatggctagagactgccgggactggtcagatgaacccatcaaagagtgcgggaccaacgaatgcttggacaacaacggcggctgttcccacgtctgcaatgaccttaagatcggctacgagtgcctgtgccccgacggcttccagctggtggcccagcgaagatgcgaagatatcgatgagtgtcaggatcccgacacctgcagccagctctgcgtgaacctggagggtggctacaagtgccagtgtgaggaaggcttccagctggacccccacacgaaggcctgcaaggctgtgggctccatcgcctacctcttcttcaccaaccggcacgaggtcaggaagatgacgctggaccggagcgagtacaccagcctcatccccaacctgaggaacgtggtcgctctggacacggaggtggccagcaatagaatctactggtctgacctgtcccagagaatgatctgcagcacccagcttgacagagcccacggcgtctcttcctatgacaccgtcatcagcagggacatccaggcccccgacgggctggctgtggactggatccacagcaacatctactggaccgactctgtcctgggcactgtctctgttgcggataccaagggcgtgaagaggaaaacgttattcagggagaacggctccaagccaagggccatcgtggtggatcctgttcatggcttcatgtactggactgactggggaactcccgccaagatcaagaaagggggcctgaatggtgtggacatctactcgctggtgactgaaaacattcagtggcccaatggcatcaccctagatctcctcagtggccgcctctactgggttgactccaaacttcactccatctcaagcatcgatgtcaatgggggcaaccggaagaccatcttggaggatgaaaagaggctggcccaccccttctccttggccgtctttgaggacaaagtattttggacagatatcatcaacgaagccattttcagtgccaaccgcctcacaggttccgatgtcaacttgttggctgaaaacctactgtccccagaggatatggtcctcttccacaacctcacccagccaagaggagtgaactggtgtgagaggaccaccctgagcaatggcggctgccagtatctgtgcctccctgccccgcagatcaacccccactcgcccaagtttacctgcgcctgcccggacggcatgctgctggccagggacatgaggagctgcctcacagaggctgaggctgcagtggccacccaggagacatccaccgtcaggctaaaggtcagctccacagccgtaaggacacagcacacaaccacccggcctgttcccgacacctcccggctgcctggggccacccctgggctcaccacggtggagatagtgacaatgtctcaccaagctctgggcgacgttgctggcagaggaaatgagaagaagcccagtagcgtgagggctctgtccattgtcctccccatcgtgctcctcgtcttcctttgcctgggggtcttccttctatggaagaactggcggcttaagaacatcaacagcatcaactttgacaaccccgtctatcagaagaccacagaggatgaggtccacatttgccacaaccaggacggctacagctacccctcgagacagatggtcagtctggaggatgacgtggcgtgaacatctgcctggagtcccgcccctgcccagaacccttcctgagacctcgccggccttgttttattcaaagacagagaagaccaaagcattgcctgccagagctttgttttatatatttattcatctgggaggcagaacaggcttcggacagtgcccatgcaatggcttgggttgggattttggtttcttcctttcctgtgaaggataagagaaacaggcccggggggaccaggatgacacctccatttctctccaggaagttttgagtttctctccaccgtgacacaatcctcaaacatggaagatgaaagggcaggggatgtcaggcccagagaagcaagtggctttcaacacacaacagcagatggcaccaacgggaccccctggccctgcctcatccaccaatctctaagccaaacccctaaactcaggagtcaacgtgtttacctcttctatgcaagccttgctagacagccaggttagcctttgccctgtcacccccgaatcatgacccacccagtgtctttcgaggtgggtttgtaccttccttaagccaggaaagggattcatggcgtcggaaatgatctggctgaatccgtggtggcaccgagaccaaactcattcaccaaatgatgccacttcccagaggcagagcctgagtcaccggtcacccttaatatttattaagtgcctgagacacccggttaccttggccgtgaggacacgtggcctgcacccaggtgtggctgtcaggacaccagcctggtgcccatcctcccgacccctacccacttccattcccgtggtctccttgcactttctcagttcagagttgtacactgtgtacatttggcatttgtgttattattttgcactgttttctgtcgtgtgtgttgggatgggatcccaggccagggaaagcccgtgtcaatgaatgccggggacagagaggggcaggttgaccgggacttcaaagccgtgatcgtgaatatcgagaactgccattgtcgtctttatgtccgcccacctagtgcttccacttctatgcaaatgcctccaagccattcacttccccaatcttgtcgttgatgggtatgtgtttaaaacatgcacggtgaggccgggcgcagtggcctcacgcctgtaatcccagcactttgggaggccgaggcgggtggatcatgaggtcaggagatcgagaccatcctggctaacaaggtgaaaccccgtctctactaaaaatacaaaaaattagccgggcgcggtggtgggcacctgtagtcccagctactcgggaggctgaggcaggagaatggtgtgaacccgggaagcggagcttgcagtgagccgagattgcgccactgcagtccgcagtctggcctgggcgacagagcgagactccgtctcaaaaaaaacaaaacaaaaaaaaaccatgcatggtgcatcagcagcccatggcctctggccaggcatggcgaggctgaggtgggaggatggtttgagctcaggcatttgaggctgtcgtgagctatgattatgccactgctttccagcctgggcaacatagtaagaccccatctcttaaaaaatgaatttggccagacacaggtgcctcacgcctgtaatcccagcactttgggaggctgagctggatcacttgagttcaggagttggagaccaggcctgagcaacaaagcgagatcccatctctacaaaaaccaaaaagttaaaaatcagctgggtatggtggcacgtgcctgtgatcccagctacttgggaggctgaggcaggaggatcgcctgagcccaggaggtggaggttgcagtgagccatgatcgagccactgcactccagcctgggcaacagatgaagaccctatttcagaaatacaactataaaaaaaataaataaatcctccagtctggatcgtttgacgggacttcaggttctttctgaaatcgccgtgttactgttgcactgatgtccggagagacagtgacagcctccgtcagactcccgcgtgaagatgtcacaagggattggcaattgtccccagggacaaaacactgtgtcccccccagtgcagggaaccgtgataagcctttctggtttcggagcacgtaaatgcgtccctgtacagatagtggggattttttgttatgtttgcactttgtatattggttgaaactgttatcacttatatatatatatacacacatatatataaaatctatttatttttgcaaaccctggttgctgtatttgttcagtgactattctcggggccctgtgtagggggttattgcctctgaaatgcctcttctttatgtacaaagattatttgcacgaactggactgtgtgcaacgctttttgggagaatgatgtccccgttgtatgtatgagtggcttctgggagatgggtgtcactttttaaaccactgtatagaaggtttttgtagcctgaatgtcttactgtgatcaattaaatttcttaaatg

SEQ ID NO: 650 - protein, 860 aa, Homo sapien [sequence omitted]

SEQ ID NO: 651 - DNA, 5175 bp, Homo sapien; identical to SEQ ID NO: 649

SEQ ID NO: 652 - protein, 860 aa, Homo sapien [sequence omitted]

SEQ ID NO: 653 - DNA, 2628 bp, Homo sapien
aagcgatggctgggcccgcgtggatctccaaggtctctcggctgctgggggcattccacaacccaaaacaggtgaccagaggttttactggtggtgttcagacagtaactttaattccaggagatggtattggcccagaaatttcagctgcagttatgaagatttttgatgctgccaaagcacctattcagtgggaggagcggaacgtcactgccattcaaggacctggaggaaagtggatgatcccttcagaggctaaagagtccatggataagaacaagatgggcttgaaaggccctttgaagaccccaatagcagccggtcacccatctatgaatttactgctgcgcaaaacatttgacctttacgcgaatgtccgaccatgtgtctctatcgaaggctataaaaccccttacaccgatgtaaatattgtgaccattcgagagaacacagaaggagaatacagtggaattgagcatgtgattgttgatggagtcgtgcagagtatcaagctcatcaccgagggggcgagcaagcgcattgctgagtttgcctttgagtatgcccggaacaaccaccggagcaacgtcacggcggtgcacaaagccaacatcatgcggatgtcagatgggctttttctacaaaaatgcagggaagttgcagaaagctgtaaagatattaaatttaatgagatgtaccttgatacagtatgtttgaatatggtacaagatccttcccaatttgatgttcttgttatgccaaatttgtatggagacatccttagtgacttgtgtgcaggattgatcggaggtctcggtgtgacaccaagtggcaacattggagccaatggggttgcaatttttgagtcggttcatgggacggctccagacattgcaggcaaggacatggcgaatcccacagccctcctgctcagtgccgtgatgatgctgcgccacatgggactttttgaccatgctgcaagaattgaggctgcgtgttttgctacaattaaggacggaaagagcttgacaaaagatttgggaggcaatgcaaaatgctcagacttcacagaggaaatctgtcgccgagtaaaagatttagattaacacttctacaactggcatttacatcagtcactctaaatggacaccacatgaacctctgtttagaatacctacgtatgtatgcattggtttgcttgtttcttgacagtacatttttagatctggccttttcttaacaaaatctgtgcaaaagatgcaggtggatgtccctaggtctgttttcaaagaactttttccaagtgcttgttttatttattaagtgtctacctggtaaatgttttttttgtaaactctgagtggactgtatcatttgctattctaaaccattttacacttaagttaaaatagtttctcttcagctgtaaataacaggatacagaattaacaagagaaaatgtctaactttttaagaaaaaccttattttcttcggtttttgaaaaacataatggaaataaaacaggatattgacataatagcacaaaatgacactcttctaaaactaaatgggcacaagagaattttcctgggaaagttcacatcaaaaagagtgaatgtggtatatttctaaatgatatggaaaatagagacagatttgtcctttacagaaattactgagtgtgaataaaaacttcagatccaagaaatatataatgagagatataatttttgttaataagacaaaggtaatatattggatacaaagacacaaatgtattgtgtgttcaattattttgttgtcttgagatttaatattctttccaagagcttttaatgaagcagagagctagtacttcattttcactggatacattttcagcatcatgagttgtcacagcctctgagcccctgatctgaagccagaagggctgagtgtattgtaaacttattcttgcatgttgctgtctgggaatggaccacactacagcaggtagttctgggggcgatactgccgaaaggcccgaacacatgtattttggctgcaattgaggaacttgggatgctattaattttgtatttcagcaactgccccttctcctatcccaaagcaccaattactgccctctgcctcagcagtaccagtataagatgacattccaaagactggaggcaactcagcctgagttaattcacaaaattatgccatgctggggcttgagcttgagcttgggcttaggcttgggctcagcttttgaccctcaggcatctccttttccttcctgtcttcctctcccttctcctctgctgcagcatgattttcttaatcttcagacactcactattttcatgaacagttaccctctgtccccacaaccaaagacaactcatggcctcctttggcccttgtgtaacattgcaaacctgtggctttgcaaaatgtacccaggtcacaaggggatttttttttttttagcaatgatatccctgtctgggtcactttttaagcttgtaaccgcccccccagacttataatcttaaatgtattttcctttgtttaagctgctgcttcctctgtttcattggattgtgccagttatcagtggctcttgggttcaaagtaataaa

SEQ ID NO: 654 - protein, 366 aa, Homo sapien
MAGPAWISKVSRLLGAFHNPKQVTRGFTGGVQTVTLIPGDGIGPEISAAVMKIFDAAKAPIQWEERNVTAIQGPGGKWMIPSEAKESMDKNKMGLKGPLKTPIAAGHPSMNLLLRKTFDLYANVRPCVSIEGYKTPYTDVNIVTIRENTEGEYSGIEHVIVDGVVQSIKLITEGASKRIAEFAFEYARNNHRSNVTAVHKANIMRMSDGLFLQKCREVAESCKDIKFNEMYLDTVCLNMVQDPSQFDVLVMPNLYGDILSDLCAGLIGGLGVTPSGNIGANGVAIFESVHGTAPDIAGKDMANPTALLLSAVMMLRHMGLFDHAARIEAACFATIKDGKSLTKDLGGNAKCSDFTEEICRRVKDLD

SEQ ID NO: 655 - DNA, 2613 bp, Homo sapien
gcgcgccttctccagtccgcggtgccatggcccccgcccgtctgttcgcgctgctgctgctcttcgtaggcggagtcgccgagtcgatccgagagactgaggtcatcgacccccaggacctcctagaaggccgatacttctccggagccctaccagacgatgaggatgtagtggggcccgggcaggaatctgatgactttgagctgtctggctctggagatctggatgacttggaagactccatgatcggccctgaagttgtccatcccttggtgcctctagataaccatatccctgagagggcagggtctgggagccaagtccccaccgaacccaagaaactagaggagaatgaggttatccccaagagaatctcacccgttgaagagagtgaggatgtgtccaacaaggtgtcaatgtccagcactgtgcagggcagcaacatctttgagagaacggaggtcctggcagctctgattgtgggtggcatcgtgggcatcctctttgccgtcttcctgatcctactgctcatgtaccgtatgaagaagaaggatgaaggcagctatgacctgggcaagaaacccatctacaagaaagcccccaccaatgagttctacgcgtgaagcttgcttgtgggcactggcttggactttagcggggagggaagccaggggattttgaagggtggacattagggtagggtgaggtcaacctaatactgacttgtcagtatctccagctctgattacctttgaagtgttcagaagagacattgtcttctactgttctgccaggttcttcttgagctttgggcctcagttgccctggcagaaaaatggattcaacttggcctttctgaaggcaagactgggattggatcacttcttaaacttccagttaagaatctaggtccgccctcaagcccatactgaccatgcctcatccagagctcctctgaagccagggggctaacggatgttgtgtggagtcctggctggaggtcctcccccagtggccttcctcccttcctttcacagccggtctctctgccaggaaatgggggaaggaactagaaccacctgcaccttgagatgtttctgtaaatgggtacttgtgatcacactacgggaatctctgtggtatatacctggggccattctaggctctttcaagtgacttttggaaatcaaccttttttatttgggggggaggatggggaaaagagctgagagtttatgctgaaatggatttatagaatatttgtaaatctatttttagtgtttgttcgtttttttaactgttcattcctttgtgcagagtgtatatctctgcctgggcaagagtgtggaggtgccgaggtgtcttcattctctcgcacatttccacagcacctgctaagtttgtatttaatggtttttgtttttgtttttgtttgtttcttgaaaatgagagaagagccggagagatgatttttattaattttttttttttttttttttttactatttatagctttagatagggcctcccttcccctcttctttctttgttctctttcattaaaccccttccccagttttttttttatactttaaaccccgctcctcatggccttggccctttctgaagctgcttcctcttataaaatagcttttgccgaaacatagtttttttttagcagatcccaaaatataatgaaggggatggtgggatatttgtgtctgtgttcttataatatattattattcttccttggttctagaaaaatagataaatatatttttttcaggaaatagtgtggtgtttccagtttgatgttgctgggtggttgagtgagtgaattttcatgtggctgggtgggtttttgcctttttctcttgccctgttcctggtgccttctgatggggctggaatagttgaggtggatggttctaccctttctgccttctgtttgggacccagctggtgttctttggtttgctttcttcaggctctagggctgtgctatccaatacagtaaccacatgcggctgtttaaagttaagccaattaaaatcacataagattaaaaattccttcctcagttgcactaaccacgtttctagaggcgtcactgtatgtagttcatggctactgtactgacagcgagagcatgtccatctgttggacagcactattctagagaactaaactggcttaacgagtcacagcctcagctgtgctgggacgacccttgtctccctgggtaggggggggggaatgggggagggctgatgaggccccagctggggcctgttgtctgggaccctccctctcctgagaggggaggcctggtggcttagcctgggcaggtcgtgtctcctcctgaccccagtggctgcggtgaggggaaccaccctcccttgctgcaccagtggccattagctcccgtcaccactgcaacccagggtcccagctggctgggtcctcttctgcccccagtgcccttccccttgggctgtgttggagtgagcacctcctctgtaggcacctctcacactgttgtctgttactgattttttttgataaaaagataataaaacctggtactttctaaaaaaaaaaaaaaaaaaa

SEQ ID NO: 656 - protein, 198 aa, Homo sapien
MAPARLFALLLLFVGGVAESIRETEVIDPQDLLEGRYFSGALPDDEDVVGPGQESDDFELSGSGDLDDLEDSMIGPEVVHPLVPLDNHIPERAGSGSQVPTEPKKLEENEVIPKRISPVEESEDVSNKVSMSSTVQGSNIFERTEVLAALIVGGIVGILFAVFLILLLMYRMKKKDEGSYDLGKKPIYKKAPTNEFYA

SEQ ID NO: 657 - DNA, 663 bp, Homo sapien
agtgcatcctgggttggcgtagccatggcgtctcgtgtcctttcagcctatgtcagccgcctgcccgcggcctttgcgccgctgccccgggtccggatgctggccgtggcccggcctctcagcactgctctctgctccgcggggacccagacgaggctcgggactttgcagccggccttagtgctcgcgcaggttcctggtagagttacacagttgtgccgccagtatagcgacatgcctcctttgacgttagagggcatccaggaccgtgttctttacgtattgaaactctatgacaagattgacccagagaagctttcagtaaattctcattttatgaaagacctgggcttagacagtttggaccaagtggagattatcatggccatggaagacgaatttgggtttgaaattcctgatatagatgctgaaaagttaatgtgtccacaagaaattgtagattacattgcagataagaaagatgtatatgaataaagtatcagaccctttggctttgctgagagaggactcagatgatagtgacgaatgtctggcagtgaggacacattttggcattcttgctgactctgacagagtgattctgatggacttgtatttaaattgtatgtgttttactctttgaaaataaatctataaaaccaa

SEQ ID NO: 658 - protein, 156 aa, Homo sapien
MASRVLSAYVSRLPAAFAPLPRVRMLAVARPLSTALCSAGTQTRLGTLQPALVLAQVPGRVTQLCRQYSDMPPLTLEGIQDRVLYVLKLYDKIDPEKLSVNSHFMKDLGLDSLDQVEIIMAMEDEFGFEIPDIDAEKLMCPQEIVDYIADKKDVYE

SEQ ID NO: 659 - DNA, 2787 bp, Homo sapien
agagcggaggccgcactccagcactgcgcagggaccgccttggaccgcagttgccggccaggaatcccagtgtcacggtggacacgcctccctcgcgcccttgccgcccacctgctcacccagctcaggggctttggaattctgtggccacactgcgaggagatcggttctgggtcggaggctacaggaagactcccactccctgaaatctggagtgaagaacgccgccatccagccaccattccaaggaggtgcaggagaacagctctgtgataccatttaacttgttgacattacttttatttgaaggaacgtatattagagcttactttgcaaagaaggaagatggttgtttccgaagtggacatcgcaaaagctgatccagctgctgcatcccaccctctattactgaatggagatgctactgtggcccagaaaaatccaggctcggtggctgagaacaacctgtgcagccagtatgaggagaaggtgcgcccctgcatcgacctcattgactccctgcgggctctaggtgtggagcaggacctggccctgccagccatcgccgtcatcggggaccagagctcgggcaagagctccgtgttggaggcactgtcaggagttgcccttcccagaggcagcgggatcgtgaccagatgcccgctggtgctgaaactgaagaaacttgtgaacgaagataagtggagaggcaaggtcagttaccaggactacgagattgagatttcggatgcttcagaggtagaaaaggaaattaataaagcccagaatgccatcgccggggaaggaatgggaatcagtcatgagctaatcaccctggagatcagctcccgagatgtcccggatctgactctaatagaccttcctggcataaccagagtggctgtgggcaatcagcctgctgacattgggtataagatcaagacactcatcaagaagtacatccagaggcaggagacaatcagcctggtggtggtccccagtaatgtggacatcgccaccacagaggctctcagcatggcccaggaggtggaccccgagggagacaggaccatcggaatcttgacgaagcctgatctggtggacaaaggaactgaagacaaggttgtggacgtggtgcggaacctcgtgttccacctgaagaagggttacatgattgtcaagtgccggggccagcaggagatccaggaccagctgagcctgtccgaagccctgcagagagagaagatcttctttgagaaccacccatatttcagggatctgctggaggaaggaaaggccacggttccctgcctggcagaaaaacttaccagcgagctcatcacacatatctgtaaatctctgcccctgttagaaaatcaaatcaaggagactcaccagagaataacagaggagctacaaaagtatggtgtcgacataccggaagacgaaaatgaaaaaatgttcttcctgatagataaaattaatgcctttaatcaggacatcactgctctcatgcaaggagaggaaactgtaggggaggaagacattcggctgtttaccagactccgacacgagttccacaaatggagtacaataattgaaaacaattttcaagaaggccataaaattttgagtagaaaaatccagaaatttgaaaatcagtatcgtggtagagagctgccaggctttgtgaattacaggacatttgagacaatcgtgaaacagcaaatcaaggcactggaagagccggctgtggatatgctacacaccgtgacggatatggtccggcttgctttcacagatgtttcgataaaaaattttgaagagttttttaacctccacagaaccgccaagtccaaaattgaagacattagagcagaacaagagagagaaggtgagaagctgatccgcctccacttccagatggaacagattgtctactgccaggaccaggtatacaggggtgcattgcagaaggtcagagagaaggagctggaagaagaaaagaagaagaaatcctgggattttggggctttccagtccagctcggcaacagactcttccatggaggagatctttcagcacctgatggcctatcaccaggaggccagcaagcgcatctccagccacatccctttgatcatccagttcttcatgctccagacgtacggccagcagcttcagaaggccatgctgcagctcctgcaggacaaggacacctacagctggctcctgaaggagcggagcgacaccagcgacaagcggaagttcctgaaggagcggcttgcacggctgacgcaggctcggcgccggcttgcccagttccccggttaaccacactctgtccagccccgtagacgtgcacgcacactgtctgcccccgttcccgggtagccactggactgacgacttgagtgctcagtagtcagactggatagtccgtctctgcttatccgttagccgtggtgatttagcaggaagctgtgagagcagtttggtttctagcatgaagacagagccccaccctcagatgcacatgagctggcgggattgaaggatgctgtcttcgtactgggaaagggattttcagccctcagaatcgctccaccttgcagctctccccttctctgtattcctagaaactgacacatgctgaacatcacagcttatttcctcatttttataatgtcccttcacaaacccagtgttttaggagcatgagtgccgtgtgtgtgcgtcctgtcggagccctgtctcctctctctgtaataaactcatttctagcag

SEQ ID NO: 660 - protein, 662 aa, Homo sapien
MVVSEVDIAKADPAAASHPLLLNGDATVAQKNPGSVAENNLCSQYEEKVRPCIDLIDSLRALGVEQDLALPAIAVIGDQSSGKSSVLEALSGVALPRGSGIVTRCPLVLKLKKLVNEDKWRGKVSYQDYEIEISDASEVEKEINKAQNAIAGEGMGISHELITLEISSRDVPDLTLIDLPGITRVAVGNQPADIGYKIKTLIKKYIQRQETISLVVVPSNVDIATTEALSMAQEVDPEGDRTIGILTKPDLVDKGTEDKVVDVVRNLVFHLKKGYMIVKCRGQQEIQDQLSLSEALQREKIFFENHPYFRDLLEEGKATVPCLAEKLTSELITHICKSLPLLENQIKETHQRITEELQKYGVDIPEDENEKMFFLIDKINAFNQDITALMQGEETVGEEDIRLFTRLRHEFHKWSTIIENNFQEGHKILSRKIQKFENQYRGRELPGFVNYRTFETIVKQQIKALEEPAVDMLHTVTDMVRLAFTDVSIKNFEEFFNLHRTAKSKIEDIRAEQEREGEKLIRLHFQMEQIVYCQDQVYRGALQKVREKELEEEKKKKSWDFGAFQSSSATDSSMEEIFQHLMAYHQEASKRISSHIPLIIQFFMLQTYGQQLQKAMLQLLQDKDTYSWLLKERSDTSDKRKFLKERLARLTQARRRLAQFPG

SEQ ID NO: 661 - DNA, 1632 bp, Homo sapien
gccggccgaacccagacccgaggttttagaagcagagtcaggcgaagctgggccagaaccgcgacctccgcaaccttgagcggcatccgtggagtgcgcctgcgcagctacgaccgcagcaggaaagcgccgccggccaggcccagctgtggccggacagggactggaagagaggacgcggtcgagtaggtgtgcaccagccctggcaacgagagcgtctaccccgaactctgctggccttgaggtggggaagccggggagggcagttgaggaccccgcggaggcgcgtgactggttgagcgggcaggccagcctccgagccgggtggacacaggttttaaaacatgaatcctacactcatccttgctgccttttgcctgggaattgcctcagctactctaacatttgatcacagtttagaggcacagtggaccaagtggaaggcgatgcacaacagattatacggcatgaatgaagaaggatggaggagagcagtgtgggagaagaacatgaagatgattgaactgcacaatcaggaatacagggaagggaaacacagcttcacaatggccatgaacgcctttggagacatgaccagtgaagaattcaggcaggtgatgaatggctttcaaaaccgtaagcccaggaaggggaaagtgttccaggaacctctgttttatgaggcccccagatctgtggattggagagagaaaggctacgtgactcctgtgaagaatcagggtcagtgtggttcttgttgggcttttagtgctactggtgctcttgaaggacagatgttccggaaaactgggaggcttatctcactgagtgagcagaatctggtagactgctctgggcctcaaggcaatgaaggctgcaatggtggcctaatggattatgctttccagtatgttcaggataatggaggcctggactctgaggaatcctatccatatgaggcaacagaagaatcctgtaagtacaatcccaagtattctgttgctaatgacaccggctttgtggacatccctaagcaggagaaggccctgatgaaggcagttgcaactgtggggcccatttctgttgctattgatgcaggtcatgagtccttcctgttctataaagaaggcatttattttgagccagactgtagcagtgaagacatggatcatggtgtgctggtggttggctacggatttgaaagcacagaatcagataacaataaatattggctggtgaagaacagctggggtgaagaatggggcatgggtggctacgtaaagatggccaaagaccggagaaaccattgtggaattgcctcagcagccagctaccccactgtgtgagctggtggacggtgatgaggaaggacttgactggggatggcgcatgcatgggaggaattcatcttcagtctaccagcccccgctgtgtcggatacacactcgaatcattgaagatccgagtgtgatttgaattctgtgatattttcacactggtaaatgttacctctattttaattactgctataaataggtttatattattgattcacttactgactttgcattttcgtttttaaaaggatgtataaatttttacctgtttaaataaaatttaatttcaaatgta

SEQ ID NO: 662 - protein, 333 aa, Homo sapien [sequence omitted]

SEQ ID NO: 663 - DNA, 2972 bp, Homo sapien
aaaacagctctccacatgttctgctccagatttttagtattctgtgatgcttgggcttaaaatgaactgtaatgtttaaatttttctctattattgtctgccgtggtctttcttacttgcttagaactgatctatttgaaatgcatgtcaatctaatctgagtctgaaatgtgcttcaaagaaaaatttcagttatattgagctaaatgtctgtctctgctcagcatcaaattagattcactgctatatgagcattaaccgccagatttgaatcgccggacccgttggcagaggtggcggcggcggcatgggtgccccgacgttgccccctgcctggcagccctttctcaaggaccaccgcatctctacattcaagaactggcccttcttggagggctgcgcctgcaccccggagcggatggccgaggctggcttcatccactgccccactgagaacgagccagacttggcccagtgtttcttctgcttcaaggagctggaaggctgggagccagatgacgaccccatagaggaacataaaaagcattcgtccggttgcgctttcctttctgtcaagaagcagtttgaagaattaacccttggtgaatttttgaaactggacagagaaagagccaagaacaaaattgagagagctctgttagcagaatgaaaaaattggaagccagattcagggagggactggaagcaaaagaatttctgttcgaggaagagcctgatgtttgccagggtctgtttaactggacatgaagaggaaggctctggactttcctccaggagtttcaggagaaaggcaaaggagatcaacaataagaagaaagaatttgaggaaactgcgaagaaagtgcgccgtgccatcgagcagctggctgccatggattgaggcctctggccggagctgcctggtcccagagtggctgcaccacttccagggtttattccctggtgccaccagccttcctgtgggccccttagcaatgtcttaggaaaggagatcaacattttcaaattagatgtttcaactgtgctcttgttttgtcttgaaagtggcaccagaggtgcttctgcctgtgcagcgggtgctgctggtaacagtggctgctctctctcctctctctcttttggggggctcatttttgctgttttgattcccgggcttaccaggtgagaagtgagggaggaagaaggcagtgtcccttttgctagagctgacagttttgttcgcgtgggcagagccttccacagtgaatgtgtctggacctcatgttgttgaggctgtcacagtcctgagtgtggacttggcaggtgcctgttgaatctgagctgcaggttccttatctgtcacacctgtgcctcctcagaggacagtttgtgtcgtgtttatgttttaacttcagggtggatgcatgacttgtgtgtgatgagagaatggagacagagtccccggctcctctactgtttaacaacatggctttcttattttgtttgaattgttaattcacagaatagcacaaactacaattaaaactaagcacaaagccattctaagtcattggggaaacggggtgaacttcaggtggatgaggagacagaatagagtgataggaagcgtctggcagatactccttttgccactgctgtgtgattagacaggcccagtgagccgcggggcacatgctggccgctcctccctcagaaaaaggcagtggcctaaatcctttttaaatgacttggctcgatgctgtgggggactggctgggctgctgcaggccgtgtgtctgtcagcccaaccttcacatctgtcacgttctccacacgggggagagacgcagtccgcccaggtccccgctttctttggaggcagcagctcccgcagggctgaagtctggcgtaagatgatggatttgattcgccctcctccctgtcatagagctgcagggtggattgttacagcttcgctggaaacctctggaggtcatctcggctgttcctgagaaataaaaagcctgtcatttcaaacactgctgtggaccctactgggtttttaaaatattgtcagtttttcatcgtcgtccctagcctgccaacagccatctgcccagacagccgcagtgaggatgagcgtcctggcagagacgcagttgtctctgggcgcttgccagagccacgaaccccagacctgtttgtatcatccgggctccttccgggcagaaacaactgaaaatgcacttcagacccacttatttatgccacatctgagtcggcctgagatagacttttccctctaaactgggagaatatcacagtggtttttgttagcagaaaatgcactccagcctctgtactcatctaagctgcttatttttgatatttgtgtcagtctgtaaatggatacttcactttaataactgttgcttagtaattggctttgtagagaagctggaaaaaaatggttttgtcttcaactcctttgcatgccaggcggtgatgtggatctcggcttctgtgagcctgtgctgtgggcagggctgagctggagccgcccctctcagcccgcctgccacggcctttccttaaaggccatccttaaaaccagaccctcatggctgccagcacctgaaagcttcctcgacatctgttaataaagccgtaggcccttgtctaagcgcaaccgcctagactttctttcagatacatgtctacatgtccatttttcaggttctctaagttggagtggagtctgggaagggttgtgaatgaggcttctgggctatgggtgaggttccaatggcaggttagagcccctcgggccaactgccatcctggaaagtagagacagcagtgcccgctgcccagaagagaccagcaagccaaactggagcccccattgcaggctgtcgccatgtggaaagagtaactcacaattgccaataaagtctcatgtggttttatct

SEQ ID NO: 664 - protein, 19 aa, Homo sapien [sequence omitted]

SEQ ID NO: 665 - DNA, 1619 bp, Homo sapien
ccgccagatttgaatcgcgggacccgttggcagaggtggcggcggcggcatgggtgccccgacgttgccccctgcctggcagccctttctcaaggaccaccgcatctctacattcaagaactggcccttcttggagggctgcgcctgcaccccggagcggatggccgaggctggcttcatccactgccccactgagaacgagccagacttggcccagtgtttcttctgcttcaaggagctggaaggctgggagccagatgacgaccccatagaggaacataaaaagcattcgtccggttgcgctttcctttctgtcaagaagcagtttgaagaattaacccttggtgaatttttgaaactggacagagaaagagccaagaacaaaattgcaaaggaaaccaacaataagaagaaagaatttgaggaaactgcgaagaaagtgcgccgtgccatcgagcagctggctgccatggattgaggcctctggccggagctgcctggtcccagagtggctgcaccacttccagggtttattccctggtgccaccagccttcctgtgggccccttagcaatgtcttaggaaaggagatcaacattttcaaattagatgtttcaactgtgctcctgttttgtcttgaaagtggcaccagaggtgcttctgcctgtgcagcgggtgctgctggtaacagtggctgcttctctctctctctctcttttttgggggctcatttttgctgttttgattcccgggcttaccaggtgagaagtgagggaggaagaaggcagtgtcccttttgctagagctgacagctttgttcgcgtgggcagagccttccacagtgaatgtgtctggacctcatgttgttgaggctgtcacagtcctgagtgtggacttggcaggtgcctgttgaatctgagctgcaggttccttatctgtcacacctgtgcctcctcagaggacagtttttttgttgttgtgtttttttgttttttttttttggtagatgcatgacttgtgtgtgatgagagaatggagacagagtccctggctcctctactgtttaacaacatggctttcttattttgtttgaattgttaattcacagaatagcacaaactacaattaaaactaagcacaaagccattctaagtcattggggaaacggggtgaacttcaggtggatgaggagacagaatagagtgataggaagcgtctggcagatactccttttgccactgctgtgtgattagacaggcccagtgagccgcggggcacatgctggccgctcctccctcagaaaaaggcagtggcctaaatcctttttaaatgacttggctcgatgctgtgggggactggctgggctgctgcaggccgtgtgtctgtcagcccaaccttcacatctgtcacgttctccacacgggggagagacgcagtccgcccaggtccccgctttctttggaggcagcagctcccgcagggctgaagtctggcgtaagatgatggatttgattcgccctcctccctgtcatagagctgcagggtggattgttacagcttcgctggaaacctctggaggtcatctcggctgttcctgagaaataaaaagcctgtcatttc

SEQ ID NO: 666 - protein, 142 aa, Homo sapien
MGAPTLPPAWQPFLKDHRISTFKNWPFLEGCACTPERMAEAGFIHCPTENEPDLAQCFFCFKELEGWEPDDDPIEEHKKHSSGCAFLSVKKQFEELTLGEFLKLDRERAKNKIAKETNNKKKEFEETAKKVRRAIEQLAAMD

SEQ ID NO: 667 - DNA, 3379 bp, Homo sapien
aattccgcggaatcatcggaatccttcaccatggcatccagcccggcccagcgtcggcgaggcaatgatcctctcacctccagccctggccgaagctcccggcgtactgatgccctcacctccagccctggccgtgaccttccaccatttgaggatgagtccgaggggctcctaggcacagaggggcccctggaggaagaagaggatggagaggagctcattggagatggcatggaaagggactaccgcgccatcccagagctggacgcctatgaggccgagggactggctctggatgatgaggacgtagaggagctgacggccagtcgaagggaggcagcagacgggccatgcggcacggtgaccgggagctggccggggctgggcgcatgcgccgtgggctcctgtatgacagcgatgaggaggacgaggagcgccctgcccgcaagcgccgccagtggagccggcacggaggacggcgaggaggacgagcagatgattgagagcatcgagaacctggaggatctcaaaggccactctgtgcgcgagtgggtgagcatggcgggcccccggctggagatccaccaccgcttcaagaacttcctgcgcactcacgtcgacagccacggccacaacgtcttcaaggagcgcatcagcgacatgtgcaaagagaaccgtgagagcctggtggtgaactatgaggacttggcagccagggagcacgtgctggcctacttcctgcctgaggcaccggcggagctgctgcagatctttgatgaggctgccctggaggtggtactggccatgtaccccaagtacgaccgcatcaccaaccacatccatgtccgcatctcccacctgcctctggtggaggagctgcgctcgctgaggcagctgcatctgaaccagctgatccgcaccagtggggtggtgaccagctgcactggcgtcctgccccagctcagcatggtcaagtacaactgcaacaagtgcaatttcgtcctgggtcctttctgccagtcccagaaccaggaggtgaaaccaggctcctgtcctgagtgccagtcggccggcccctttgaggtcaacatggaggagaccatctatcagaactaccagcgtatccgaatccaggagagtccaggcaaagtggcggctcggcggctgccccgctccaaggacgccattctcctcgcagatctggtggacagctgcaacgcaggagacgagatagagctgactggcatctatcacaacaactatgatggctccctcaacactgccaatggcttccctgtctttgccactgtcatcctagccaaccacgtggccaagaaggacaacaaggttgctgtaggggaactgaccgatgaagatgtgaagatgatcactagcctctccaaggatcagcagatcggagagaagatctttgccagcattgctccttccatctatggtcatgaagacatcaagagaggccctgctctggccctgttcggaggggagcccaaaaacccaggtggcaagcacaaggtacgtggtgatatcaacgtgctcttgtgcggagaccctggcacagcgaagtcgcagtttctcaagtatattgagaaagtgtccagccgagccatcttcaccactggccagggggcgtcggctgtggccgtcacggcgtatgtccagcggcaccctgtcagcagggagtggaccttggaggctggggccctggttctggctgaccgaggagtgtgtctcattgatgaatttgacaagatgaatgaccaggacagaaccagcatccatgaggccatggagcaacagagcatctccatctcgaaggctggcatcgtcacctccctgcaggctcgctgcacggtcattgctgccgccaaccccataggagggcgctacgacccctcgctgactttctctgagaacgtggacctcacagagcccatcatctcacgctttgacatcctgtgtgtggtgagggacaccgtggacccagtccaggacgagatgctggcccgcttcgtggtgggcagccacgtcagacaccaccccagcaacaaggaggaggaggggctggccaatggcagcgctgctgagcccgccatgcccaacacgtatggcgtggagcccctgccccaggaggtcctgaagaagtacatcatctacgccaaggagagggtccacccgaagctcaaccagatggaccaggacaaggtggccaagatgtacagtgacctgaggaaagaatctatggcgacaggcagcatccccattacggtgcggcacatcgagtccatgagtcatggcggaggcccacgcgcgcatccatctgcgggactatgtgatcgaagacgacgtcaacatggccatccgcgtgatgctggagagcttcatagacacacagaagttcagcgtcatcgcagcatgcgcaagacttttgcccgctacctttcattccggcgtgacaacaatgagctgttgctcttcatactgaagcagttagtggcagagcaggtgacatatcagcgcaaccgctttggggcccagcaggacactattgaggtccctgagaaggacttggtggataaggctcgtcagatcaacatccacaacctctctgcattttatgacagtgagctcttcaggatgaacaagttcagccacgacctgaaaaggaaaatgatcctgcagcagttctgaggccctatgccatccataaggattccttgggattctggtttggggtggtcagtgccctctgtgctttatggacacaaaaccagagcacttgatgaactcggggtactagggtcagggcttatagcaggatgtctggctgcacctggcatgactgtttgtttctccaagcctgctttgtgcttctcacctttgggtgggatgccttgccagtgtgtcttacttggttgctgaacatcttgccacctccgagtgctttgtctccactcagtaccttggatcagagctgctgagttcaggatgcctgcgtgtggtttaggtgttagccttcttacatggatgtcaggagagctgctgccctcttggcgtgagttgcgtattcaggctgcttttgctcgctttggccagagagctggttgaagatgtttgtaatcgttttcagtctcctgcaggtttctgtgcccctgtggtggaagaggcacgacagtgccagcgcagcgttctgggctcctcagtcgcaggggtgggatgtgagtcatgcggattatccactcgccacagttatcagctgccattgctccctgtctgtttccccactctcttatttgtgcattcggtttggtttctgtagttttaatttttaataaagttgaataaaatataaaaaaaaaaa

SEQ ID NO: 668 - protein, 892 aa, Homo sapien
MASSPAQRRRGNDPLTSSPGRSSRRTDALTSSPGRDLPPFEDESEGLLGTEGPLEEEEDGEELIGDGMERDYRAIPELDAYEAEGLALDDEDVEELTASRREAADGPCGTVTGSWPGLGACAVGSCMTAMRRTRSALPASAASGAGTEDGEEDEQMIESIENLEDLKGHSVREWVSMAGPRLEIHHRFKNFLRTHVDSHGHNVFKERISDMCKENRESLVVNYEDLAAREHVLAYFLPEAPAELLQIFDEAALEVVLAMYPKYDRITNHIHVRISHLPLVEELRSLRQLHLNQLIRTSGVVTSCTGVLPQLSMVKYNCNKCNFVLGPFCQSQNQEVKPGSCPECQSAGPFEVNMEETIYQNYQRIRIQESPGKVAARRLPRSKDAILLADLVDSCNAGDEIELTGIYHNNYDGSLNTANGFPVFATVILANHVAKKDNKVAVGELTDEDVKMITSLSKDQQIGEKIFASIAPSIYGHEDIKRGPALALFGGEPKNPGGKHKVRGDINVLLCGDPGTAKSQFLKYIEKVSSRAIFTTGQGASAVAVTAYVQRHPVSREWTLEAGALVLADRGVCLIDEFDKMNDQDRTSIHEAMEQQSISISKAGIVTSLQARCTVIAAANPIGGRYDPSLTFSENVDLTEPIISRFDILCVVRDTVDPVQDEMLARFVVGSHVRHHPSNKEEEGLANGSAAEPAMPNTYGVEPLPQEVLKKYIIYAKERVHPKLNQMDQDKVAKMYSDLRKESMATGSIPITVRHIESMSHGGGPRAHPSAGLCDRRRRQHGHPRDAGELHRHTEVQRHRSMRKTFARYLSFRRDNNELLLFILKQLVAEQVTYQRNRFGAQQDTIEVPEKDLVDKARQINIHNLSAFYDSELFRMNKFSHDLKRKMILQQF

SEQ ID NO: 669 - DNA, 342 bp, Homo sapien
  Unsure 169-192: Unknown base
atgagagcaagtaattgtggaaatatttttggtgtaaaatcattccagagtatgtaatatttaactgatagctgcatgaaagtgagattcgtgttactttggcttttctgtctctgttgacacggttgcacatttccaagttactacagcgtgaaaactgtgtgtttannnnnnnnnnnnnnnnnnnnnnnngattgtggcctggttttgtaaaagttttaggtaaaattacaattgattgttttaggaatcattattaaaaattttctgcaaatcataaagctatatcgaggtgttgagcttagccactatgcacattgtaattattcattgtggctgtcc

SEQ ID NO: 670 - protein, 18 aa, Homo sapien
MRASNCGNIFGVKSFQSM

SEQ ID NO: 671 - DNA, 1221 bp, Homo sapien
ccgaacgcccgcagcagggtcagaagggaggtggccggtctccgtcgtgacctctgacggtttctgagcgttggcctttggcacgcgctacacccttttgctttggttctgccatgccgatgtaccaggtaaagccctatcacgggggcggcgcgcctctccgtgtggagcttcccacctgcatgtaccggctccccaacgtgcacggcaggagctacggcccagcgccgggcgctggccacgtgcaggaagagtctaacctgtctctgcaagctcttgagtcccgccaagatgatattttaaaacgtctgtatgagttgaaagctgcagttgatggcctctccaagatgattcaaacaccagatgcagacttggatgtaaccaacataatccaagcggatgagcccacgactttaaccaccaatgcgctggacttgaattcagtgcttgggaaggattacggggcgctgaaagacatcgtgatcaacgcaaacccggcctcccctcccctctccctgcttgtgctgcacaggctgctctgtgagcacttcagggtcctgtccacggtgcacacgcactcctcggtcaagagcgtgcctgaaaaccttctcaagtgctttggagaacagaataaaaaacagccccgccaagactatcagctgggattcactttaatttggaagaatgtgccgaagacgcagatgaaattcagcatccagacgatgtgccccatcgaaggcgaagggaacattgcacgtttcttgttctctctgtttggccagaagcataatgctgtcaacgcaacccttatagatagctgggtagatattgcgatttttcagttaaaagagggaagcagtaaagaaaaagccgctgttttccgctccatgaactctgctcttgggaagagcccttggctcgctgggaatgaactcaccgtagcagacgtggtgctgtggtctgtactccagcagatcggaggctgcagtgtgacagtgccagccaatgtgcagaggtggatgaggtcttgtgaaaacctggctccttttaacacggccctcaagctccttaagtgaattgccgtaactgattttaaagggtttagattttaagaatggtgctctttcatgcctattatcagtaaggggacttgtattagagtcagagtctttttatttaggccagttgtcaagtgtcaataaaagcgcatcatgtaattta

SEQ ID NO: 672 - protein, 320 aa, Homo sapien
MPMYQVKPYHGGGAPLRVELPTCMYRLPNVHGRSYGPAPGAGHVQEESNLSLQALESRQDDILKRLYELKAAVDGLSKMIQTPDADLDVTNIIQADEPTTLTTNALDLNSVLGKDYGALKDIVINANPASPPLSLLVLHRLLCEHFRVLSTVHTHSSVKSVPENLLKCFGEQNKKQPRQDYQLGFTLIWKNVPKTQMKFSIQTMCPIEGEGNIARFLFSLFGQKHNAVNATLIDSWVDIAIFQLKEGSSKEKAAVFRSMNSALGKSPWLAGNELTVADVVLWSVLQQIGGCSVTVPANVQRWMRSCENLAPFNTALKLLK

SEQ ID NO: 673 - DNA, 1145 bp, Homo sapien
gctccggccagccgcggtccagagcgcgcgaggttcggggagctccgccaggctgctggtacctgcgtccgcccggcgagcaggacaggctgctttggtttgtgacctccaggcaggacggccatcctctccagaatgaagatcttcttgccagtgctgctggctgcccttctgggtgtggagcgagccagctcgctgatgtgcttctcctgcttgaaccagaagagcaatctgtactgcctgaagccgaccatctgctccgaccaggacaactactgcgtgactgtgtctgctagtgccggcattgggaatctcgtgacatttggccacagcctgagcaagacctgttccccggcctgccccatcccagaaggcgtcaatgttggtgtggcttccatgggcatcagctgctgccagagctttctgtgcaatttcagtgcggccgatggcgggctgcgggcaagcgtcaccctgctgggtgccgggctgctgctgagcctgctgccggccctgctgcggtttggcccctgaccgcccagaccctgtcccccgatcccccagctcaggaaggaaagcccagccctttctggatcccacagtgtatgggagcccctgactcctcacgtgcctgatctgtgcccttggtcccaggtcaggcccaccccctgcacctccacctgccccagcccctgcctctgcccaagtgggccagctgccctcacttctggggtggatgatgtgaccttccttgggggactgcggaagggacgagggttccctggagtcttacggtccaacatcagaccaagtcccatggacatgctgacagggtccccagggagaccgtgtcagtagggatgtgtgcctggctgtgtacgtgggtgtgcagtgcacgtgagagcacgtggcggcttctgggggccatgtttggggagggaggtgtgccagcagcctggagagcctcagtccctgtagccccctgccctggcacagctgcatgcacttcaagggcagcctttgggggttggggtttctgccacttccgggtctaggccctgcccaaatccagccagtcctgccccagcccacccccacattggagccctcctgctgctttggtgcctcaaataaatacagatgtcccc

SEQ ID NO: 674 - protein, 131 aa, Homo sapien
MKIFLPVLLAALLGVERASSLMCFSCLNQKSNLYCLKPTICSDQDNYCVTVSASAGIGNLVTFGHSLSKTCSPACPIPEGVNVGVASMGISCCQSFLCNFSAADGGLRASVTLLGAGLLLSLLPALLRFGP

SEQ ID NO: 675 - DNA, 3200 bp, Homo sapien
gagctgcgaaagggcgggaaaggcagttggagaagaggtaagcggttactcactccatggctgcagcaaggagaggcggcggcggcctcggctgaagaaagaaggtgggagcggagagcgcaggcgtgaaatcttcccaaggctgcagacaccgacggatttgctttgggagccagagtagctgccgccaccagagtccggagccatgagcgggtttaattttggaggcactggggcccctacaggcgggttcacgtttggcactgcaaagacggcaacaaccacacctgctacagggttttctttctccacctctggcactggagggtttaattttggggctcccttccaaccagccacaagtaccccttccaccggcctgttctcacttgccacccagactccggccacacagacgacaggcttcacttttggaacagcgactcttgcttcggggggaactggattttctttggggatcggtgcttcaaagctcaacttgagcaacacagctgccaccccagccatggcaaaccccagcggctttgggctgggcagcagcaacctcactaatgccatatcgagcaccgtcacctccagccagggcacagcacccaccggctttgtgtttggcccctccaccacctctgtggctccagctaccacatctggaggcttctcattcactggtggaagcacggcccaaccctccggtttcaacattggctcagcagggaattcagcccagcccacggcacctgccacgttgcccttcactccggccacgccagcagccaccacagcaggtgccacacagccagctgctcccacacccacagccaccatcaccagtactgggcccagcctctttgcgtcaatagcaactgctccaacctcatctgccaccactggactctccctctgtacccctgtgaccacagcgggcgcccccactgctgggacacagggcttcagcttaaaggcacctggagcagcttccggcacctccacaacaacatccaccgctgccaccgccaccgccaccaccaccaccagcagcagcaccaccggctttgccttgaatttaaaaccactggcgccagccgggatccccagcaatacagcagctgccgtgaccgctccacctggccctggcgcagctgcaggggcggctgccagctccgccatgacctacgcgcagctggagagcctgatcaacaaatggagcctggagctagaggaccaggagcggcacttcctccagcaggccacccaggtcaacgcctgggaccgcacgctgatcgagaatggagaaaagatcaccagcctgcaccgcgaggtggagaaggtgaagctggaccagaagaggctggaccaggagctcgacttcatcctgtcccagcagaaggagctggaagacctgctgagcccactggaggagttggtcaaggagcagagcgggaccatctacctgcagcacgcggatgaggagcgtgagaaaacctacaagctggctgagaacatcgacgcacagctcaagcgcatggcccaggatctcaaggacatcatcgagcacctgaacacgtccggggcccccgccgacaccagtgacccactgcagcagatctgcaagatcctcaatgcgcacatggactcactgcagtggatcgaccagaactcggccctgctgcagaggaaggtggaggaggtgaccaaggtgtgcgagggccggcgcaaggagcaggagcgcagcttccggatcacctttgactgagcgacagcagccctggggcccgcaggtccctagggagttcatgaggggaatgcgccctgttgtctgtagtttggggttgtggcaagatacttgtttgtttgtttctttctttcacatgactgcccttgacatgatcgctgtgtgctttgcgtttttccatttaggagggtattctgggccttctgcccaggcagcagcctcatgggtgtggcttctgtggctttcatttgagtatctttggccccttttcacctactgcgaccacccacctcatcctggctcagcctggtgatggagaagtgctgatggtcttggtcccagccagggtcgtgggggcagccactctctccaaagcatagtcatgggtgtcatgaaaaaataccaaatgtaagagaacctccaagtcagggcgcagtggctcacccctgtaatctcagcactttgggtggccaaggcgggcagatgacttgaggtcaggagttcgagaccagcctggccaacatggtgaaaccccgtctctactaaaaatacaaaaattagtcaggtgtggtggacgcctgtgatctcaatctcagctactcgggaggctgaggcaggagaatcacttgaacccaggaggtgttgcagtgaaccaagatcacaccactgcactccagcctaggcaacagagactctgtctcaaaaaaaaaaaaaaaaaaaagaaactcccaggagacagcagcctagttttcgagtgtgagcttgtgcttgtgaaagctaaccatgctaaccaccaaggcaaagcagcacagtgtgaatagaacagagcgggatcaagaatttcacagaagacaggtcagctgaggggcctgcacacacagggtgttgaggaaccacagatgggcgccgagaggcctgccttttgcctggcccaggctcacccccaccttgggcctcacctcctctaggaagccttcccagctacccgaagctcaggtggccttcttgcaggtccccgtagcaccctgagcctgtaccttgggtggcacttgttatgctatcctgtgctagccgtttgtgcctcgtctcgctgttagattgtgagttcccatgggcagagacccactgtcgttccccgtgtgtccccagcccggtccctgtcacatttgttaaatgaaagaacaatgaagcccagtgtaacgtcagtccacagaaatagccacagcttccagtggtggccgtagacttggctcggaacttagtggcaccagagtaactctagtcagttacagtaaaatccactgtgtgtggaaggcagaagctagcggttgtatcccaagcatcttttgtatttgtctttatactttgctgaattctctgaaatacctattactgtatgtggcttttctaaataaatgtattgtgaaactaaaaaaaaaaaaaaaaa

SEQ ID NO: 676 - protein, 522 aa, Homo sapien [sequence omitted]

SEQ ID NO: 677 - DNA, 2318 bp, Homo sapien
cgcagggaccgtgctccgccgtctccgccgcatcttccaccctcgccgccgccgcagctccccgcgctcgtgccaccgccgccgcgtccaccctcagcgccaccgccatgcgggagatcgtgcacctgcaggccggccagtgcggcaaccagatcggggccaagttttgggaggttatcagtgacgaacatggcatcgaccccacaggcacataccatggggacagtgacctgcaactggagaggatcaacgtgtactacaacgaggccacaggaggaaattatgtccccagagcggtgctggtggacctggaacccggcaccatggactctgtccgttctggccccttcggtcagatctttcggccggacaacttcgtgtttggccaatccggagccggcaacaactgggcaaaggggcactacacggagggcgcagagctggtggacgctgtcctggacgtagtccggaaggaggccgagagctgcgactgccttcagggcttccagctgacccactcgctggggggtggcacggggtccggaatgggcacgctgctcatcagtaagatccgcgaggagttcccagaccgcatcatgaacaccttcagcgtggtgccctcgcccaaagtgtcagacacggtggtggagccctacaacgccacgctgtctgtgcaccagctggtggagaatacggatgagacctactgcatcgacaacgaggcactctacgacatctgtttccgcaccctcaagctgaccacccccacctacggggacctcaaccacctggtgtcggccaccatgagcggggtcaccacctgcctgcgcttcccgggccagctgaacgccgacctgcgcaagctggccgtcaacatggttccctttcctcgcctgcacttcttcatgcccggcttcgcacccctgaccagccggggcagccagcagtaccgggccctgacggtgcccgagctcacccagcagatgttcgatgccaagaacatgatggcggcgtgcgacccgcgccacggccgctacctgaccgtggccgccgtgttccggggccgcatgtccatgaaggaggtggacgagcagatgctgagcgtgcagagcaagaacagcagctacttcgtggagtggatccccaacaacgtgaagacggccgtgtgcgacatcccgccccgcggcctgaagatggccgcgaccttcatcggcaacagcacggccatccaggagctgttcaagcgcatctccgagcagttcacggccatgttccggcgcaaggccttcttgcactggtacacgggcgagggcatggacgagatggagttcaccgaggccgagagcaacatgaatgacctggtatctgagtaccagcagtaccaggacgccacggccgaggagggcgagttcgaggaggaggcggaggaggaggtggcctaggctgctcccatcgcttcccacctgtcccctcgaggcttctgacctttgatccgctaggccccccatctctgaaccctagagccccgctttccctccaaggctgactccccgctgaccctaacaatacctttggagctcgctttacctctggctacttcatctccgaccctggctcccctttgagccctaatttatctttaacccccttgagctcttccaaccttgacattcccaggaggagccccgcttcaccccttctgactctggaaaccgcacctttaactttgcagaccttccttcacccctgacttctgcttcacctttgacctctgccccccatgaatcccattttacctctagacctataagttctggtttatgtttgacccctccctctgagctgcacttcaccgctgaccttgcctcacctttaaccccccacctgagccccagctcctacctctgaccccaacttctctttgatctctgaatcccctctgactccaacttctctttcaccctctatgagtcccattttacttctacacctgcaagtcctggtttatattggacccctccctccgagctgcagttcacctttgaccttgcctcacctttcaccccccaccccccacagcgtcagctcctacctctgaccccagcttctctctgattcccacaggccccatgcatcctccctgcctcactcccctcagcccctgccgaccttagcttatctgggagagaaacaaggcctggtgcctgtgaggaagagaggtcacccctaccctccctccccgcttccctgcctcaccctcaataaataaattaattgttgtcatggaaaaaaaaaaaaaaaaaaaaaaaaaaaaaaaa

SEQ ID NO: 678 - protein, 444 aa, Homo sapien
MREIVHLQAGQCGNQIGAKFWEVISDEHGIDPTGTYHGDSDLQLERINVYYNEATGGNYVPRAVLVDLEPGTMDSVRSGPFGQIFRPDNFVFGQSGAGNNWAKGHYTEGAELVDAVLDVVRKEAESCDCLQGFQLTHSLGGGTGSGMGTLLISKIREEFPDRIMNTFSVVPSPKVSDTVVEPYNATLSVHQLVENTDETYCIDNEALYDICFRTLKLTTPTYGDLNHLVSATMSGVTTCLRFPGQLNADLRKLAVNMVPFPRLHFFMPGFAPLTSRGSQQYRALTVPELTQQMFDAKNMMAACDPRHGRYLTVAAVFRGRMSMKEVDEQMLSVQSKNSSYFVEWIPNNVKTAVCDIPPRGLKMAATFIGNSTAIQELFKRISEQFTAMFRRKAFLHWYTGEGMDEMEFTEAESNMNDLVSEYQQYQDATAEEGEFEEEAEEEVA

SEQ ID NO: 679 - DNA, 8694 bp, Homo sapien
tgaggaatcaacagccgccatcttgtcgcggacccgaccggggcttcgagcgcgatctactcggccccgccggtcccgggccccacaaccgcccgcgctcgctcctctccctcgcagccggcagggcccccgacccccgtccgggccctcgccggcccggccgcccgtgcccggggctgttttcgcgagcaggtgaaaatggctgagaacttgctggacggaccgcccaaccccaaaagagccaaactcagctcgcccggtttctcggcgaatgacagcacagattttggatcattgtttgacttggaaaatgatcttcctgatgagctgatacccaatggaggagaattaggccttttaaacagtgggaaccttgttccagatgctgcttccaaacataaacaactgtcggagcttctacgaggaggcagcggctctagtatcaacccaggaataggaaatgtgagcgccagcagccccgtgcagcagggcctgggtggccaggctcaagggcagccgaacagtgctaacatggccagcctcagtgccatgggcaagagccctctgagccagggagattcttcagcccccagcctgcctaaacaggcagccagcacctctgggcccacccccgctgcctcccaagcactgaatccgcaagcacaaaagcaagtggggctggcgactagcagccctgccacgtcacagactggacctggtatctgcatgaatgctaactttaaccagacccacccaggcctcctcaatagtaactctggccatagcttaattaatcaggcttcacaagggcaggcgcaagtcatgaatggatctcttggggctgctggcagaggaaggggagctggaatgccgtaccctactccagccatgcagggcgcctcgagcagcgtgctggctgagaccctaacgcaggtttccccgcaaatgactggtcacgcgggactgaacaccgcacaggcaggaggcatggccaagatgggaataactgggaacacaagtccatttggacagccctttagtcaagctggagggcagccaatgggagccactggagtgaacccccagttagccagcaaacagagcatggtcaacagtttgcccaccttccctacagatatcaagaatacttcagtcaccaacgtgccaaatatgtctcagatgcaaacatcagtgggaattgtacccacacaagcaattgcaacaggccccactgcagatcctgaaaaacgcaaactgatacagcagcagctggttctactgcttcatgctcataagtgtcagagacgagagcaagcaaacggagaggttcgggcctgctcgctcccgcattgtcgaaccatgaaaaacgttttgaatcacatgacgcattgtcaggctgggaaagcctgccaagttgcccattgtgcatcttcacgacaaatcatctctcattggaagaactgcacacgacatgactgtcctgtttgcctccctttgaaaaatgccagtgacaagcgaaaccaacaaaccatcctggggtctccagctagtggaattcaaaacacaattggttctgttggcacagggcaacagaatgccacttctttaagtaacccaaatcccatagaccccagctccatgcagcgagcctatgctgctctcggactcccctacatgaaccagccccagacgcagctgcagcctcaggttcctggccagcaaccagcacagcctcaaacccaccagcagatgaggactctcaaccccctgggaaataatccaatgaacattccagcaggaggaataacaacagatcagcagcccccaaacttgatttcagaatcagctcttccgacttccctgggggccacaaacccactgatgaacgatggctccaactctggtaacattggaaccctcagcactataccaacagcagctcctccttctagcaccggtgtaaggaaaggctggcacgaacatgtcactcaggacctgcggagccatctagtgcataaactcgtccaagccatcttcccaacacctgatcccgcagctctaaaggatcgccgcatggaaaacctggtagcctatgctaagaaagtggaaggggacatgtacgagtctgccaacagcagggatgaatattatcacttattagcagagaaaatctacaagatacaaaaagaactagaagaaaaacggaggtcgcgtttacataaacaaggcatcttggggaaccagccagccttaccagccccgggggctcagccccctgtgattccacaggcacaacctgtgagacctccaaatggacccctgtccctgccagtgaatcgcatgcaagtttctcaagggatgaattcatttaaccccatgtccttggggaacgtccagttgccacaagcacccatgggacctcgtgcagcctccccaatgaaccactctgtccagatgaacagcatgggctcagtgccagggatggccatttctccttcccgaatgcctcagcctccgaacatgatgggtgcacacaccaacaacatgatggcccaggcgcccgctcagagccagtttctgccacagaaccagttcccgtcatccagcggggcgatgagtgtgggcatggggcagccgccagcccaaacaggcgtgtcacagggacaggtgcctggtgctgctcttcctaaccctctcaacatgctggggcctcaggccagccagctaccttgccctccagtgacacagtcaccactgcacccaacaccgcctcctgcttccacggctgctggcatgccatctctccagcacacgacaccacctgggatgactcctccccagccagcagctcccactcagccatcaactcctgtgtcgtcttccgggcagactcccaccccgactcctggctcagtgcccagtgctacccaaacccagagcacccctacagtccaggcagcagcccaggcccaggtgaccccgcagcctcaaaccccagttcagcccccgtctgtggctacccctcagtcatcgcagcaacagccgacgcctgtgcacgcccagcctcctggcacaccgctttcccaggcagcagccagcattgataacagagtccctaccccctcctcggtggccagcgcagaaaccaattcccagcagccaggacctgacgtacctgtgctggaaatgaagacggagacccaagcagaggacactgagcccgatcctggtgaatccaaaggggagcccaggtctgagatgatggaggaggatttgcaaggagcttcccaagttaaagaagaaacagacatagcagagcagaaatcagaaccaatggaagtggatgaaaagaaacctgaagtgaaagtagaagttaaagaggaagaagagagtagcagtaacggcacagcctctcagtcaacatctccttcgcagccgcgcaaaaaaatctttaaaccagaggagttacgccaggccctcatgccaaccctagaagcactgtatcgacaggacccagagtcattacctttccggcagcctgtagatccccagctcctcggaattccagactattttgacatcgtaaagaatcccatggacctctccaccatcaagcggaagctggacacagggcaataccaagagccctggcagtacgtggacgacgtctggctcatgttcaacaatgcctggctctataatcgcaagacatcccgagtctataagttttgcagtaagcttgcagaggtctttgagcaggaaattgaccctgtcatgcagtcccttggatattgctgtggacgcaagtatgagttttccccacagactttgtgctgctatgggaagcagctgtgtaccattcctcgcgatgctgcctactacagctatcagaataggtatcatttctgtgagaagtgtttcacagagatccagggcgagaatgtgaccctgggtgacgacccttcacagccccagacgacaatttcaaaggatcagtttgaaaagaagaaaaatgataccttagaccccgaacctttcgttgattgcaaggagtgtggccggaagatgcatcagatttgcgttctgcactatgacatcatttggccttcaggttttgtgtgcgacaactgcttgaagaaaactggcagacctcgaaaagaaaacaaattcagtgctaagaggctgcagaccacaagactgggaaaccacttggaagaccgagtgaacaaatttttgcggcgccagaatcaccctgaagccggggaggtttttgtccgagtggtggccagctcagacaagacggtggaggtcaagcccgggatgaagtcacggtttgtggattctggggaaatgtctgaatctttcccatatcgaaccaaagctctgtttgcttttgaggaaattgacggcgtggatgtctgcttttttggaatgcacgtccaagaatacggctctgattgcccccctccaaacacgaggcgtgtgtacatttcttatctggatagtattcatttcttccggccacgttgcctccgcacagccgtttaccatgagatccttattggatatttagagtatgtgaagaaattagggtatgtgacagggcacatctgggcctgtcctccaagtgaaggagatgattacatcttccattgccacccacctgatcaaaaaatacccaagccaaaacgactgcaggagtggtacaaaaagatgctggacaaggcgtttgcagagcggatcatccatgactacaaggatattttcaaacaagcaactgaagacaggctcaccagtgccaaggaactgccctattttgaaggtgatttctggcccaatgtgttagaagagagcattaaggaactagaacaagaagaagaggagaggaaaaaggaagagagcactgcagccagtgaaaccactgagggcagtcagggcgacagcaagaatgccaagaagaagaacaacaagaaaaccaacaagaacaaaagcagcatcagccgcgccaacaagaagaagcccagcatgcccaacgtgtccaatgacctgtcccagaagctgtatgccaccatggagaagcacaaggaggtcttcttcgtgatccacctgcacgctgggcctgtcatcaacaccctgccccccatcgtcgaccccgaccccctgctcagctgtgacctcatggatgggcgcgacgccttcctcaccctcgccagagacaagcactgggagttctcctccttgcgccgctccaagtggtccacgctctgcatgctggtggagctgcacacccagggccaggaccgctttgtctacacctgcaacgagtgcaagcaccacgtggagacgcgctggcactgcactgtgtgcgaggactacgacctctgcatcaactgctataacacgaagagccatgcccataagatggtgaagtgggggctgggcctggatgacgagggcagcagccagggcgagccacagtcaaagagcccccaggagtcacgccgggtgagcatccagcgctgcatccagtcgctggtgcacgcgtgccagtgccgcaacgccaactgctcgctgccatcctgccagaagatgaagcgggtggtgcagcacaccaagggctgcaaacgcaagaccaacgggggctgcccggtgtgcaagcagctcatcgccctctgctgctaccacgccaagcactgccaagaaaacaaatgccccgtgcccttctgcctcaacatcaaacacaagctccgccagcagcagatccagcaccgcctgcagcaggcccagctcatgcgccggcggatggccaccatgaacacccgcaacgtgcctcagcagagtctgccttctcctacctcagcaccgcccgggacccccacacagcagcccagcacaccccagacgccgcagccccctgcccagccccaaccctcacccgtgagcatgtcaccagctggcttccccagcgtggcccggactcagccccccaccacggtgtccacagggaagcctaccagccaggtgccggcccccccacccccggcccagccccctcctgcagcggtggaagcggctcggcagatcgagcgtgaggcccagcagcagcagcacctgtaccgggtgaacatcaacaacagcatgcccccaggacgcacgggcatggggaccccggggagccagatggcccccgtgagcctgaatgtgccccgacccaaccaggtgagcgggcccgtcatgcccagcatgcctcccgggcagtggcagcaggcgccccttccccagcagcagcccatgccaggcttgcccaggcctgtgatatccatgcaggcccaggcggccgtggctgggccccggatgcccagcgtgcagccacccaggagcatctcacccagcgctctgcaagacctgctgcggaccctgaagtcgcccagctcccctcagcagcaacagcaggtgctgaacattctcaaatcaaacccgcagctaatggcagctttcatcaaacagcgcacagccaagtacgtggccaatcagcccggcatgcagccccagcctggcctccagtcccagcccggcatgcaaccccagcctggcatgcaccagcagcccagcctgcagaacctgaatgccatgcaggctggcgtgccgcggcccggtgtgcctccacagcagcaggcgatgggaggcctgaacccccagggccaggccttgaacatcatgaacccaggacacaaccccaacatggcgagtatgaatccacagtaccgagaaatgttacggaggcagctgctgcagcagcagcagcaacagcagcagcaacaacagcagcaacagcagcagcagcaagggagtgccggcatggctgggggcatggcggggcacggccagttccagcagcctcaaggacccggaggctacccaccggccatgcagcagcagcagcgcatgcagcagcatctccccctccagggcagctccatgggccagatggcggctcagatgggacagcttggccagatggggcagccggggctgggggcagacagcacccccaacatccagcaagccctgcagcagcggattctgcagcaacagcagatgaagcagcagattgggtccccaggccagccgaaccccatgagcccccagcaacacatgctctcaggacagccacaggcctcgcatctccctggccagcagatcgccacgtcccttagtaaccaggtgcggtctccagcccctgtccagtctccacggccccagtcccagcctccacattccagcccgtcaccacggatacagccccagccttcgccacaccacgtctcaccccagactggttccccccaccccggactcgcagtcaccatggccagctccatagatcagggacacttggggaaccccgaacagagtgcaatgctcccccagctgaacacccccagcaggagtgcgctgtccagcgaactgtccctggtcggggacaccacgggggacacgctagagaagtttgtggagggcttgtagcattgtgagagcatcaccttttccctttcatgttcttggaccttttgtactgaaaatccaggcatctaggttctttttattcctagatggaactgcgacttccgagccatggaagggtggattgatgtttaaagaaacaatacaaagaatatatttttttgttaaaaaccagttgatttaaatatctggtctctctctttggtttttttttggcgggggggtggggggggttcttttttttccgttttgtttttgtttggggggaggggggttttgtttggattctttttgtcgtcattgctggtgactcatgcctttttttaacgggaaaaacaagttcattatattcatattttttatttgtattttcaagactttaaacatttatgtttaaaagtaagaagaaaaataatattcagaactgattcctgaaataatgcaagcttataatgtatcccgataactttgtgatgtttcgggaagatttttttctatagtgaactctgtgggcgtctcccagtattaccctggatgataggaattgactccggcgtgcacacacgtacacacccacacacatctatctatacataatggctgaagccaaacttgtcttgcagatgtagaaattgttgctttgtttctctgataaaactggttttagacaaaaaatagggatgatcactcttagaccatgctaatgttactagagaagaagccttcttttctttcttctatgtgaaacttgaaatgaggaaaagcaattctagtgtaaatcatgcaagcgctctaattcctataaatacgaaactcgagaagattcaatcactgtatagaatggtaaaataccaactcatttcttatatcatattgttaaataaactgtgtgcaacagacaaaaagggtggtccttcttgaattcatgtacatggtattaacacttagtgttcggggttttttgttatgaaaatgctgttttcaacattgtatttggactatgcatgtgttttttccccattgtatataaagtaccgcttaaaattgatataaattactgaggtttttaacatgtattctgttctttaagatcccctgtaagaatgtttaaggtttttatttatttatatatattttttggtctgttctttgtaaaaaaaaaaaaaaaaa

SEQ ID NO: 680 - protein, 2000 aa, Homo sapien
MAENLLDGPPNPKRAKLSSPGFSANDSTDFGSLFDLENDLPDELIPNGGELGLLNSGNLVPDAASKHKQLSELLRGGSGSSINPGIGNVSASSPVQQGLGGQAQGQPNSANMASLSAMGKSPLSQGDSSAPSLPKQAASTSGPTPAASQALNPQAQKQVGLATSSPATSQTGPGICMNANFNQTHPGLLNSNSGHSLINQASQGQAQVMNGSLGAAGRGRGAGMPYPTPAMQGASSSVLAETLTQVSPQMTGHAGLNTAQAGGMAKMGITGNTSPFGQPFSQAGGQPMGATGVNPQLASKQSMVNSLPTFPTDIKNTSVTNVPNMSQMQTSVGIVPTQAIATGPTADPEKRKLIQQQLVLLLHAHKCQRREQANGEVRACSLPHCRTMKNVLNHMTHCQAGKACQVAHCASSRQIISHWKNCTRHDCPVCLPLKNASDKRNQQTILGSPASGIQNTIGSVGTGQQNATSLSNPNPIDPSSMQRAYAALGLPYMNQPQTQLQPQVPGQQPAQPQTHQQMRTLNPLGNNPMNIPAGGITTDQQPPNLISESALPTSLGATNPLMNDGSNSGNIGTLSTIPTAAPPSSTGVRKGWHEHVTQDLRSHLVHKLVQAIFPTPDPAALKDRRMENLVAYAKKVEGDMYESANSRDEYYHLLAEKIYKIQKELEEKRRSRLHKQGILGNQPALPAPGAQPPVIPQAQPVRPPNGPLSLPVNRMQVSQGMNSFNPMSLGNVQLPQAPMGPRAASPMNHSVQMNSMGSVPGMAISPSRMPQPPNMMGAHTNNMMAQAPAQSQFLPQNQFPSSSGAMSVGMGQPPAQTGVSQGQVPGAALPNPLNMLGPQASQLPCPPVTQSPLHPTPPPASTAAGMPSLQHTTPPGMTPPQPAAPTQPSTPVSSSGQTPTPTPGSVPSATQTQSTPTVQAAAQAQVTPQPQTPVQPPSVATPQSSQQQPTPVHAQPPGTPLSQAAASIDNRVPTPSSVASAETNSQQPGPDVPVLEMKTETQAEDTEPDPGESKGEPRSEMMEEDLQGASQVKEETDIAEQKSEPMEVDEKKPEVKVEVKEEEESSSNGTASQSTSPSQPRKKIFKPEELRQALMPTLEALYRQDPESLPFRQPVDPQLLGIPDYFDIVKNPMDLSTIKRKLDTGQYQEPWQYVDDVWLMFNNAWLYNRKTSRVYKFCSKLAEVFEQEIDPVMQSLGYCCGRKYEFSPQTLCCYGKQLCTIPRDAAYYSYQNRYHFCEKCFTEIQGENVTLGDDPSQPQTTISKDQFEKKKNDTLDPEPFVDCKECGRKMHQICVLHYDIIWPSGFVCDNCLKKTGRPRKENKFSAKRLQTTRLGNHLEDRVNKFLRRQNHPEAGEVFVRVVASSDKTVEVKPGMKSRFVDSGEMSESFPYRTKALFAFEEIDGVDVCFFGMHVQEYGSDCPPPNTRRVYISYLDSIHFFRPRCLRTAVYHEILIGYLEYVKKLGYVTGHIWACPPSEGDDYIFHCHPPDQKIPKPKRLQEWYKKMLDKAFAERIIHDYKDIFKQATEDRLTSAKELPYFEGDFWPNVLEESIKELEQEEEERKKEESTAASETTEGSQGDSKNAKKKNNKKTNKNKSSISRANKKKPSMPNVSNDLSQKLYATMEKHKEVFFVIHLHAGPVINTLPPIVDPDPLLSCDLMDGRDAFLTLARDKHWEFSSLRRSKWSTLCMLVELHTQGQDRFVYTCNECKHHVETRWHCTVCEDYDLCINCYNTKSHAHKMVKWGLGLDDEGSSQGEPQSKSPQESRRVSIQRCIQSLVHACQCRNANCSLPSCQKMKRVVQHTKGCKRKTNGGCPVCKQLIALCCYHAKHCQENKCPVPFCLNIKHKLRQQQIQHRLQQAQLMRRRMATMNTRNVPQQSLPSPTSAPPGTPTQQPSTPQTPQPPAQPQPSPVSMSPAGFPSVARTQPPTTVSTGKPTSQVPAPPPPAQPPPAAVEAARQIEREAQQQQHLYRVNINNSMPPGRTGMGTPGSQMAPVSL

SEQ ID NO: 681 - DNA, 3355 bp, Homo sapien
ggcacgaggggctaagggtgcgcgagtagccgccacccgttcggcgttggctctggcgtcggggtcgttgtgtcgtgacaaccgctgcggtagccgtttccgaggcagcagttgcggccgctttagccctgagcgggatctgcggctgcctgcgagtctctgctgtgccgacccttctcttcgcggaccccacgccaagcagcgaccctgagccgacagccggagcgcccggcaatggcggcctcgacggcctcgcaccggcccatcaaggggatcttgaagaacaagacctctacgacttcctctatggtggcgtcggccgaacagccccgcgggaatgtcgacgaggagctgagcaaaaaatcccagaagtgggatgaaatgaacatcttggcgacgtatcatccagcagacaaagactatggtttaatgaaaatagatgaaccaagcactccttaccatagtatgatgggggatgatgaagatgcctgtagtgacaccgaggccactgaagccatggcgccagacatcttagccaggaaattagctgcagctgaaggcttggagccaaagtatcggattcaggaacaagaaagcagtggagaggaggatagtgacctctcacctgaagaacgagaaaaaaagcgacaatttgaaatgaaaaggaagcttcactacaatgaaggactcaatatcaaactagccagacaattaatttcaaaagacctacatgatgatgatgaagatgaagaaatgttagagactgcagatggagaaagcatgaatacggaagaatcaaatcaaggatctactccaagtgaccaacagcaaaacaaattacgaagttcatagacgagatttgttcaacactgcaattgtttgttagatgtaaaccctgtgactatagtacgttgcttcttgttcttcacaattcatgacttaagtaccaaaatgcataccagttattatatattgccaagaattaaatgataaacttagagactgattagactgaaaatgcctaatcgatatatatattcttgtgcctagtactttaccacaaatacagtgtaatatcatcagtccaaaactgcattacttttgtaaaaacactggttaatttgtataagatattatagagctttttatgctttagaagttaaacaatatctttgggggggaactaatttattttcatcacttgaaatgtggtagctcttacaaagtttattgatttgatttttttaaaaatcaaaagccaattgaacaacaggatatatagactgataaatatttaggctgaatagtattttaacacttgtcttcaacttgatttgtctgtttaattgaaaagaattataagagttactgttgcattttctgacctactatttttaaaattcctgttgagtttctttgtgtttacaaggaaaggactgaactttttctcatcaaaactagcttttttccccacaaataaattatcaggttaaactttcaccaatgtctgctctgttttttgtttttggggggtttttgtttgtttttgttttttaatgtttttggtacactgggcagacttcagagcagttttttaaaaaaataaatattctaatgtagctatctcgccattccctttaaatacctgtcttaacctcctgcttttctttcctactcctttccacacatacgcacacaatcttctaccttttaaaggatcattaagactgtcaccacattaggagctctttctctcactcttctgtcatttgctgctatgttgaaattcttattttgaccatcaatgcctatgaattcttctaatacgtgaagaaaatagtttgagtagcagcagtgctataggtgggaaatacagtttagctgctgaatttctatacctctctgatttacagattgctaattaaatggctattattagtttggattaattagacttaagaaaacaactaactgagggttttttttgtttgttttttgagggttttctttgcatgagagttgtatgtaaccagtgatatgattattcctgaatgtacagacagaagtaagcctggacattgttaaatagtccctgctttaagggactacgataatgtgtactatgacaaacgtgctttattcttctaacgcagtaagaattaggtggaattttttccttcaaccaagtgcaggaaagccctgtgtgtcttggtttagttatggtttcatttctagccatacaattgatgaattgtgtacaacttttgttagtaccaaaataatctgttatatgaacagacttctaaaataacgtctgtatattttatatatagatacatatatgaaagaaggcttttattgaacagcttatcttccacttgcaggtttatggaaacagcagtatttgaaaataaataaaaagtgggagaattccttgctgttagaagaatgtggccattattttgattttttgaatgagatatataatcaaagtactgctgaactgtgagtgcagtattctaaacatttcagctaggaataccactgatttagaaacaaaactgtttgtctctggtttctgaatttaaaatgttgggattacctgtttaaatctgtcttgggggatgtagagattaagtctgtacatgtgcgtgcacatatattcatgcaccctctgattttggttttcttgtttctgagttcttagaaagtacccacatactcttttttttttttttgtagaagtagctgtcatagagtgaagaaaaggataagactttaaacagttgattctttttgtgttttctacaaactattttttgaaatttaaatcacaaactcattttctggtttttagaaagtagatgatgatttcagaggagtaaggcatgccaagcagcatgctcagtggggttttaggctgtcacatgcagctgagaaaaggtatgttcaagtcataagtaggtaattgatagggtatgaactagtcaaaatatgaaccattatgattcaagttagattttcctctggagagacagatctgaatgttcagttctagccaaggtagattttactttcaactttttaatcagtatcactttctgtgcttaactatttggtgttaccttgtctgttttcatttgtctaaaattctgcagagatgactaaaatttgacataatggtgtaaatggattgttaaggtaactttcagttgaagattaaagcaagatgccattttccccatgactttggttttgtttacatttttccctttcagttagtatacactacacgtactgtaataaaatacaataatatgaaaaaaaaaaaaaaaaaaaaaaaaaaaaaaaaaaa

SEQ ID NO: 682 - protein, 205 aa, Homo sapien
MAASTASHRPIKGILKNKTSTTSSMVASAEQPRGNVDEELSKKSQKWDEMNILATYHPADKDYGLMKIDEPSTPYHSMMGDDEDACSDTEATEAMAPDILARKLAAAEGLEPKYRIQEQESSGEEDSDLSPEEREKKRQFEMKRKLHYNEGLNIKLARQLISKDLHDDDEDEEMLETADGESMNTEESNQGSTPSDQQQNKLRSS

SEQ ID NO: 683 - DNA, 2880 bp, Homo sapien
gggggcgggctgggagggctgtcggtgggccagtctgcgtagcgacggcccgtcccctgcgcacggacgccgggaagaagggggtggggccacgtttgcgtccgcgccatcaggcccgagatagcggcgaggtccgctttcagtgtatggttttccctgccaaacggttctgcttggtgccatccatggagggcgtgcgctgggccttttcctgcggcacttggctgccgagccgagccgaatggctgctggcagtgcgatcgattcagcccgaggagaaggagcgcattggccagttcgtctttgcccgggacgctaaggcagccatggctggtcgtctgatgataaggaaattagttgcagagaaattgaatatcccttggaatcatattcgtttgcaaagaactgcaaaaggaaaaccagttcttgcaaaggactcatcgaatccttacccgaatttcaactttaacatctctcatcaaggagactatgcagtgcttgctgctgaacctgagctgcaagttggaattgatataatgaagactagttttccaggtcgtggttcaattccagaattctttcatattatgaaaagaaagtttaccaacaaagaatgggaaacaatcagaagctttaaggatgagtggactcagctggatatgttttataggaattgggcacttaaggaaagcttcataaaagccattggtgttggactaggatttgaattgcagcggcttgaatttgatctatctccattaaacttggatataggccaagtttataaagaaacacgtttattcctggatggagaggaagaaaaagaatgggcatttgaggaaagcaaaatagatgagcaccattttgttgcagttgctcttaggaaacccgatggatctagacatcaggatgttccatctcaggatgattccaaaccaacccagaggcaatttactattctcaactttaatgatttaatgtcatctgccgttcccatgacacctgaagatccttcattttgggactgtttttgcttcacagaagaaattccaatacgaaatggtacaaagtcatgatgattccctgagtaacaaagggaaatgaaaactgtttgtgatcttccgtattcactgaaaaataaatgcttgtttagtatcaaattttatttcacgaaagtttttttaaagaacagaaacttttccaattaaaaaaaaaaagcagacttctggttcaagatagctcactggaatacatgtttacctctttctttcctaaattgcattgaattgataggaaggatggcggaatcttaaagtgatacatgctaactgtagaaaaaaatagaaaatgcacataagcaaaaggaaacatttaaatgctatctttcaaagataactactcttaaaaccttgagtatcttttcagacctttttcttggcaaatgaatccatattgacatatttgatttttttaaaaacatggaaacgtactgttttgtaaattctttttaactgcacatctactgttcataaatatacctctgtaacataactttttgtggttctaatgtactctgttgtatagctaatacaagttaggatgcttttggccagaggtaacagtgtccaaatataattggcctaagtaacctaggaaattgtttgacataacacagggttcaggggtgtcattaaagacacactttttttgccttgacctcagttggtttgttttgccttaggctattccacctctcgatcacaagagctgctgctataacttccagttttacatctttgtaaaattgtatctcaaaggcagaaaaggccatttcgtctctcatttgttttatccatgaggaagatttttaacaaaagcctccagaagatttcccctcagtttccattgacttagatcaggttacagagaaaggcaatgtctgacatttttggtctctgttagaagtagactctgttgaaaagaaagaagctaagctaggtgtgaagaatggaattggaagcccactgccttcccataagaaaggtttaccataatttactcacttttttctgtgttagacattttgattatctgcagtttattactacaagcagtggcagagtgaatgtccttgtacattttgagttacatgcttaattatgtccttgagaaagtttctaaaagtggaatgattggtttgactggttcatagggctttaattatacaatttacccctctaattagtactatatgtatgtgacttccctccccctgccagaatactccttggtcaattgtaggtattctttttggtttaatttttgccaatgtaattaaaaaatggtatgtcatttttaaaatttgtatttctttcattacaaataagattgttatgtcagtattgttattggcttttcgtattcctcttaacgtgaaccgtctgttcattgtttttacctgttttcgttttagcaagtagtacttaatttaaagtgtgaacttaatatataagatgccaggaccatcatattgatgacaaaaatctattatgtggttgtagtgcatgtcttggagttaaactcttaagtatcaagaagtaaaataatttcattgtttctgttactaacattaaaagtgtgcaaattgtataaaattaggtacttcgattagtaaaagaaaaaaatttgaatgttttttttttttattttattaagcatgcccagttatgccaagcatagtaaataaaggtcaagtagcatttataatagaggaagtattgttatccctagcatgagtgtaatggtgatatgaaaaactttgtcttgtcattataataataaaaaaatgaacatttattatgaaaaaaaaaaaaaaaaaaa

SEQ ID NO: 684 - protein, 309 aa, Homo sapien
MVFPAKRFCLVPSMEGVRWAFSCGTWLPSRAEWLLAVRSIQPEEKERIGQFVFARDAKAAMAGRLMIRKLVAEKLNIPWNHIRLQRTAKGKPVLAKDSSNPYPNFNFNISHQGDYAVLAAEPELQVGIDIMKTSFPGRGSIPEFFHIMKRKFTNKEWETIRSFKDEWTQLDMFYRNWALKESFIKAIGVGLGFELQRLEFDLSPLNLDIGQVYKETRLFLDGEEEKEWAFEESKIDEHHFVAVALRKPDGSRHQDVPSQDDSKPTQRQFTILNFNDLMSSAVPMTPEDPSFWDCFCFTEEIPIRNGTKS

SEQ ID NO: 685 - DNA, 4170 bp, Homo sapien
ctcttcccttaggtgtttaagttccgcgcgcaggccaggctgcaacctgacggccagatccctcgctgtcctagtcgctgctccttggagtcatgttcccagccgccccttctccgcggaccccgggtaccgggtcccgaaggggcccgctggccggactcgggcccggctccacgccccggacggctagcaggaagggtctgcccctggggtctgcagtcagctccccagtgctcttctcgccggtcggccggcgtagctcgctaagctcggggggaacaccaacacgaatgttcccacaccactccataactgagtctgtgaactatgatgtgaaaacgtttggatcttctcttcctgttaaagtcatggaagccctaacattggctgaagtcgatgaccagctgaccattaacatagatgaaggtggatgggcttgtctggtgtgcaaagagaagctcattatttggaagattgctctgtcacctattactaagttatccgtttgcaaagaacttcagctgccatctagtgatttccactggagtgccgacttagtggctctttcttactcttctccctcaggtgaagcacattctactcaggctgttgctgtcatggttgccaccagagaaggatctatccgctattggccaagccttgctggtgaagatacctacacagaggcttttgtagattcgggaggtgataagacttacagtttcctaacagcagtgcagggaggaagttttattttgtcttcatcaggaagccaactaattcggttgatacctgagagctcaggaaagattcatcagcatatcctgcctcaggggcaaggcatgctttcaggaattggtcgaaaagtttcttctctttttggaattttatctcctagtagtgatctcacactttcaagtgttctctgggatagagagagatcaagcttttatagcctgacgagttcaaacatcagtaaatgggaattagatgattcttcagaaaagcatgcatacagttgggatataaatagagccctgaaggaaaacattaccgatgctatttggggatctgaaagtaactatgaagctattaaagaaggagtcaacattcgatatttggacttgaagcaaaactgtgatgggctggtgattttggcagcagcatggcactcagcagacaatccatgtctcatctattactctctgataacaatagaagataatggttgccaaatgtcagatgcagttactgtagaagtcactcaatataatccaccttttcagtctgaagacctgattttgtgtcagttgacggtcccaaacttttcaaaccagactgcctatctgtataacgaaagtgctgtctatgtgtgctccacaggaactgggaaattttctcttccccaggagaaaattgtctttaatgcacaaggagatagtgttttaggtgctggtgcctgtggtggtgttcctatcattttttctagaaacagtggactggtgtctattacttcaagggaaaatgtgtctatattggcagaagacttggaagggtctttagcatcttcagttgctggaccaaacagtgagagtatgatttttgagaccactacaaagaatgaaactatagcccaggaagataaaatcaagttgctgaaagctgcctttctgcaatactgcagaaaagatttaggtcatgctcaaatggtggttgatgagctcttttcctctcactctgatttggattctgattctgaactagacagggcagttacccaaatcagtgtagacctgatggatgactacccagcatctgacccacggtgggctgagtctgtccctgaggaagcacctgggttcagcaatacgtcactgattatccttcaccagctagaagacaagatgaaagctcactcttttcttatggactttattcatcaagttggcttatttggacgtctaggcaattttccagttagagggacaccgatggccactcgactgttgctctgtgagcatgccgaaaagctgtcagccgccatagttctcaagaaccaccactcccggctttctgaccttgtcaacacagccatattgattgctttgaacaagagggagtatgaaatcccatccaacctgactcctgcagatgtctttttcagggaggtatcccaagtagataccatctgtgagtgcttactggagcatgaggagcaagtcttgagggatgcacctatggattccattgaatgggctgaagtggtgatcaatgtgaacaatattctcaaggatatgctgcaggctgctagtcattatcgccaaaatagaaactctttgtatagaagagaagaatcactagaaaaagaacctgaatatgttccatggacggcaacaagtggtcctggtggcatccgaacggtaataatacgccagcatgagattgtcctgaaggtggcttatccacaggcagacagcaacctccgaaacatcgtgaccgagcagctggtagccctgatcgattgcttcctggatggttatgtttctcagcttaagtctgtggataaatccagtaatcgggaaagatatgacaatctggagatggaatacctacagaaaagatcagatctcttatctcctcttctttcactaggccagtacctgtgggctgcttctctagcagagaaatactgtgactttgatatattggtacaaatgtgtgagcagactgacaaccagagccgactccagcgctacatgacccagtttgctgatcagaatttttcagactttctcttccgttggtatctggagaaaggaaagcgaggcaaattattatctcagcccatttctcagcatggacagttggcaaattttttgcaagctcatgaacatctcagctggttacatgaaattaatagccaagaattagaaaaggctcatgcaacacttctgggtttggcaaatatggaaactcgttactttgcaaagaagaaaacccttcttggcttgagtaaattggctgcattagcttcagacttttcagaggatatgctacaagaaaaaattgaagaaatggctgagcaggagcgctttctactgcatcaggagaccctacctgaacagctgctggcggagaaacagctaaatctcagtgcgatgccagtattgactgcaccacaactcattggtctatatatctgtgaagaaaatagaagagctaatgaatatgatttcaagaaagctttggacttgttggaatatattgatgaggaagaagatataaatataaatgatctaaaactggaaatcctttgcaaagctcttcagagagataactggtccagttctgatggcaaagatgatccaattgaagtatctaaagacagtatatttgtgaagatcttacagaaacttttaaaagatggcattcagctcagtgagtacttaccggaggtgaaagacctgctacaagcggatcagcttggaagcttaaagtccaatccttacttcgagtttgttttgaaagcaaattatgaatattatgttcagggacaaatataactttttctaaaaatggccattgtttatgaaatctgtataagtgtgtccttatacaaattttaggctataaacaagtgtaagtttgtacaatttcataacatgtatagctgagtttttatactttatatgtaggaagctaatataaaatagttatgtaactgtgattttggttttcagttatgtgacttgttttttccacctgaaatgtgtcagttgttgttcctgtactcggtgccctttctttttactctcacgtggtcccaggttctggagttcttgtcctggttctagctgctcacatgtacaaatcacttctaggcctcagttttctgcgactatgaaaattactagattgcactagcttgtctctaaaattgctgtgactccagatactttgcactgaagagaatctagggtgtttgatatctgtttcagttagggctaatgggaaatgtctagtaagataaatgtcaacttttgctgacttattatgagatgaaaaaccaaaggagagtgggcctaactcatgtgagcttgataactgatgaactcattgggagcattttaaacttttctacataaataataaatgagcactaatgaaagt

SEQ ID NO: 686 - protein, 1156 aa, Homo sapien [sequence omitted]

SEQ ID NO: 687 - DNA, 2681 bp, Homo sapien
cggccgcgtcctcaagccggcacctgagcggcggagacggctgtagcacaaggatctgcatctccaatggatactgaggggtttggtgagctccttcagcaagctgaacagcttgctgctgagactgagggcatctcagagcttccccatgtggaacggaacttacaggagatccagcaggcgggagagcgcctgcgttcccgtaccctaacacgcacgtcccaggagacggcagatgtcaaggcgtcagttctcctcgggtctcggggacttgacatatcccacatctcccagcgattggagagtctgagtgcagccaccacctttgagcctcttgagcctgtgaaggacactgacattcagggcttcctgaagaatgagaaggacaatgccctgctgtctgccatcgaagagtcccggaagaggaccttcggcatggctgaggagtaccatcgggagtcaatgttggttgagtgggagcaagtgaaacagcgaattctgcacacactgctggcatcaggagaagacgcccttgactttactcaagaaagcgagccaagctacatcagtgatgtgggaccccctggtcgaagctctctggataacatcgagatggcctatgcgcggcaaatttatatctataatgagaaaattgtaaatggacacctgcagcctaacctggtggacctttgtgcttccgtcgcagagctggatgataagagcatttccgacatgtggaccatggtaaaacaaatgacagacgtgttgttgacaccggcaacggatgccctgaagaaccgcagcagcgtggaagtgcgcatggagtttgtcaggcaggccttggcgtaccttgagcagagttataagaattacacccttgtgactgtctttggaaatttgcatcaggcccagctgggcggggtgcctgggacttaccaattggttcgaagtttcctgaacattaaactgccagctcccttgcctggactacaggatggagaggtggaaggccatcctgtgtgggcgctaatttactactgcatgcgctgtggagacctgcttgccgcttcacaggtagttaatcgagcccagcaccagctgggagagtttaaaacctggttccaggagtacatgaacagcaaggacagaagattgtccccagctacggaaaacaagctccggctgcattaccgtagggccctcaggaacaatacagatccctacaagcgggccgtgtactgtatcattggcagatgtgacgtcaccgacaaccagagtgaagtggcggacaaaactgaggattacctgtggctgaagttgaaccaagtgtgttttgacgacgatggcaccagctccccacaagacaggctcactctctcacagttccagaagcagttgttggaagactatggcgagtcccactttacggtgaaccagcaacccttcctctacttccaagtcctgttcctgacagcgcagtttgaagcagcagttgcctttcttttccgcatggagcggctgcgctgccatgctgtccatgtagcactggtgctgtttgagctgaagctgcttttaaagtcctctggacagagtgctcagctcctcagccacgagcctggtgaccctccttgcttgcggcggctgaacttcgtgcggctcctcatgctgtacacccggaagtttgagtccacggacccaagggaggccctccagtacttctatttcctcagggatgagaaagatagtcaaggagaaaacatgtttctgcgctgtgtgagtgagcttgtgattgaaagccgagagttcgatatgattcttgggaaactagagaatgacggaagtagaaagcctggagtcatagataagtttactagtgacacaaagcctattatcaacaaagttgcttctgtggcagaaaataaaggactgtttgaagaggcagcaaagctgtatgaccttgccaagaatgctgacaaggtactggagctgatgaacaaactgctgagccctgtcgtcccccagatcagtgccccgcaatccaacaaggagaggctgaagaacatggcactctccattgccgaacggtatagggctcaaggaataagcgcaaataaatttgtggactccacgttctatcttcttttggacttgatcaccttttttgacgagtatcatagtggtcatattgatagagcttttgatatcattgagcgcttgaagctggtgcccctgaatcaggaaagtgtggaagagagagtggctgctttcagaaatttcagtgatgaaatcaggcacaacctctcagaagtgcttcttgccaccatgaacatcttgttcacacagtttaagaggctcaaggggacaagtccatcctcgtcatccaggccccagcgagtcatcgaggaccgcgactctcaactccgaagtcaagcccgcactctgattacctttgctggaatgataccataccgaacgtctggggacaccaatgcgaggctggtgcagatggaggtcctcatgaattaagtgccatgctttgtgggagtctgggtcggcacactgtcagtacatcaggcacatgggcccactaggctggggtttctggttttgtttctgttgtgttttgttttggtttctgtattatgtatttttgtcaacgccaataaatttctttgatttgt

SEQ ID NO: 688 - protein, 819 aa, Homo sapien
MDTEGFGELLQQAEQLAAETEGISELPHVERNLQEIQQAGERLRSRTLTRTSQETADVKASVLLGSRGLDISHISQRLESLSAATTFEPLEPVKDTDIQGFLKNEKDNALLSAIEESRKRTFGMAEEYHRESMLVEWEQVKQRILHTLLASGEDALDFTQESEPSYISDVGPPGRSSLDNIEMAYARQIYIYNEKIVNGHLQPNLVDLCASVAELDDKSISDMWTMVKQMTDVLLTPATDALKNRSSVEVRMEFVRQALAYLEQSYKNYTLVTVFGNLHQAQLGGVPGTYQLVRSFLNIKLPAPLPGLQDGEVEGHPVWALIYYCMRCGDLLAASQVVNRAQHQLGEFKTWFQEYMNSKDRRLSPATENKLRLHYRRALRNNTDPYKRAVYCIIGRCDVTDNQSEVADKTEDYLWLKLNQVCFDDDGTSSPQDRLTLSQFQKQLLEDYGESHFTVNQQPFLYFQVLFLTAQFEAAVAFLFRMERLRCHAVHVALVLFELKLLLKSSGQSAQLLSHEPGDPPCLRRLNFVRLLMLYTRKFESTDPREALQYFYFLRDEKDSQGENMFLRCVSELVIESREFDMILGKLENDGSRKPGVIDKFTSDTKPIINKVASVAENKGLFEEAAKLYDLAKNADKVLELMNKLLSPVVPQISAPQSNKERLKNMALSIAERYRAQGISANKFVDSTFYLLLDLITFFDEYHSGHIDRAFDIIERLKLVPLNQESVEERVAAFRNFSDEIRHNLSEVLLATMNILFTQFKRLKGTSPSSSSRPQRVIEDRDSQLRSQARTLITFAGMIPYRTSGDTNARLVQMEVLMN

SEQ ID NO: 689 - DNA, 3635 bp, Homo sapien
gtttcttcagactccagatttccctgtcaaccacgaggagtccagagaggaaacgcggagcggagacaacagtacctgacgcctctttcagcccgggatcgccccagcagggatgggcgacaagatctggctgcccttccccgtgctccttctggccgctctgcctccggtgctgctgcctggggcggccggcttcacaccttccctcgatagcgacttcacctttacccttcccgccggccagaaggagtgcttctaccagcccatgcccctgaaggcctcgctggagatcgagtaccaagttttagatggagcaggattagatattgatttccatcttgcctctccagaaggcaaaaccttagtttttgaacaaagaaaatcagatggagttcacactgtagagactgaagttggtgattacatgttctgctttgacaatacattcagcaccatttctgagaaggtgattttctttgaattaatcctggataatatgggagaacaggcacaagaacaagaagattggaagaaatatattactggcacagatatattggatatgaaactggaagacatcctggaatccatcaacagcatcaagtccagactaagcaaaagtgggcacatacaaattctgcttagagcatttgaagctcgtgatcgaaacatacaagaaagcaactttgatagagtcaatttctggtctatggttaatttagtggtcatggtggtggtgtcagccattcaagtttatatgctgaagagtctgtttgaagataagaggaaaagtagaacttaaaactccaaactagagtacgtaacattgaaaaatgaggcataaaaatgcaataaactgttacagtcaagaccattaatggtcttctccaaaatattttgagatataaaagtaggaaacaggtataattttaatgtgaaaattaagtcttcactttctgtgcaagtaatcctgctgatccagttgtacttaagtgtgtaacaggaatattttgcagaatataggtttaactgaatgaagccatattaataactgcattttcctaactttgaaaaattttgcaaatgtcttaggtgatttaaataaatgagtattgggcctaattgcaacaccagtctgtttttaacaggttctattacccagaacttttttgtaaatgcggcagttacaaattaactgtggaagttttcagttttaagttataaatcacctgagaattacctaatgatggattgaataaatctttagactacaaaagcccaacttttctctatttacatatgcatctctcctataatgtaaatagaataatagctttgaaatacaattaggtttttgagatttttataaccaaatacatttcagtgtaacatattagcagaaagcattagtctttgtactttgcttacattcccaaaagctgacattttcacgattcttaaaaacacaaagttacacttactaaaattaggacatgttttctctttgaaatgaagaatatagtttaaaagcttcctcctccatagggacacattttctctaacccttaactaaagtgtaggattttaaaattaaatgtgaggtaaaataagtttatttttaatagtatctgtcaagttaatatctgtcaacagttaataatcatgttatgttaattttaacatgattgctgacttggataattcattattaccagcagttatgaaggaaatattgctaaaatgatctgggcctaccataaataaatatctccttttctgagctctaagaattatcagaaacaggaaagaatttagaaaaacttgagaaaacctaatccaaaataaaattcacttaagtagaactataaataaatatctagaatctgactggctcatcatgacatcctactcataacataaatcaaaggagatgattaatttccagttagctggaagaaactttggctgtaggtttttattttctacaagaattctggtttgaattatttttgtaagcaggtacattttataaaatgtaagccctactgtaaggtttagcactgggtgtacatatttattaaaaatttttattataacaacttttattaaaatggcctttctgaacactttatttattgatgttgaagtaaggattagaaacatagactcccaagttttaaacacctaaatgtgaataacccatatatacaacaaagtttctgccatctagctttttgaagtctatgggggtcttactcaagtactagtaatttaacttcatcatgaatgaactataatttttaagttatgcccatttataacgttgtttatgactacattgtgagttagaaacaaacttaaaatttggggtatagaacccctcaacaggttagtaatgctggaattcttgatgagcaataatgataaccagagagtgatttcatttacactcatagtagtataaaaagagatacatttccctcttaggcccctgggagaagagcagcttagatttccctactggcaaggtttttaaaaatgaggtaaatgccgtatatgatcaattaccttaattggccaagaaaatgcttcaggtgtctaggggtatcctctgcaacacttgcagaacaaaggtcaataagatccttgcctatgaatacccctcccttttgcgctgttaaatttgcaatgagaagcaaatttacagtaccataactaataaagcagggtacagatataaactactgcatcttttctataaaactgtgattaagaattctacctctcctgtatggctgttactgtactgtactctctgactccttacctaacaatgaatttgttacataatcttctacatgtatgatttgtgccactgatcttaaacctatgattcagtaacttcttaccatataaaaacgataattgctttatttggaaaagaatttaggaatactaaggacaattatttttatagacaaagtaaaaagacagatatttaagaggcataaccaaaaaagcaaaacttgtaaacagagtaaaaatctttaatatttctaaagacatactgtttatctgcttcatatgctttttttaatttcactattccatttctaaattaaagttatgctaaattgagtaagctgtttatcacttaacagctcattttgtctttttcaatatacaaattttaaaaatactacaatatttaactaaggcccaaccgatttccataatgtagcagttaccgtgttcacctcacactaaggcctagagtttgctctgatatgcatttggatgattaatgttatgctgttctttcatgtgaatgtcaagacatggagggtgtttgtaattttatggtaaaattaatccttcttacacataatggtgtcttaaaattgacaaaaaatgagcacttacaattgtatgtctcctcaaatgaaaattctttatctgaaattttaaaagacattgattccgcatgtaaggatttttcatctgaagtacaataatgcacaatcagtgttgctcaaactgctttatacttataaacagccatcttaaataagcaacgtattgtgagtactgatatgtatataataaaaattatcaaagaaaaaaaaaaaaaaaaa

SEQ ID NO: 690 - protein, 229 aa, Homo sapien
MGDKIWLPFPVLLLAALPPVLLPGAAGFTPSLDSDFTFTLPAGQKECFYQPMPLKASLEIEYQVLDGAGLDIDFHLASPEGKTLVFEQRKSDGVHTVETEVGDYMFCFDNTFSTISEKVIFFELILDNMGEQAQEQEDWKKYITGTDILDMKLEDILESINSIKSRLSKSGHIQILLRAFEARDRNIQESNFDRVNFWSMVNLVVMVVVSAIQVYMLKSLFEDKRKSRT

SEQ ID NO: 691 - DNA, 4244 bp, Homo sapien
ggtctcaccatggagcggaaagtgcttgcgctccaggcccgaaagaaaaggaccaaggccaagaaggacaaagcccaaaggaaatctgaaactcagcaccgaggctctgctccccactctgagagtgatctaccagagcaggaagaggagattctgggatctgatgatgatgagcaagaagatcctaatgattattgtaaaggaggttatcatcttgtgaaaattggagatctattcaatgggagataccatgtgatccgaaagttaggctggggacacttttcaacagtatggttatcatgggatattcaggggaagaaatttgtggcaatgaaagtagttaaaagtgctgaacattacactgaaacagcactagatgaaatccggttgctgaagtcagttcgcaattcagaccctaatgatccaaatagagaaatggttgttcaactactagatgactttaaaatatcaggagttaatggaacacatatctgcatggtatttgaagttttggggcatcatctgctcaagtggatcatcaaatccaattatcaggggcttccactgccttgtgtcaaaaaaattattcagcaagtgttacagggtcttgattatttacataccaagtgccgtatcatccacactgacattaaaccagagaacatcttattgtcagtgaatgagcagtacattcggaggctggctgcagaagcaacagaatggcagcgatctggagctcctccgccttccggatctgcagtcagtactgctccccagcctaaaccagctgacaaaatgtcaaagaataagaagaagaaattgaagaagaagcagaagcgccaggcagaattactagagaagcgaatgcaggaaattgaggaaatggagaaagagtcgggccctgggcaaaaaagaccaaacaagcaagaagaatcagagagtcctgttgaaagacccttgaaagagaacccacctaataaaatgacccaagaaaaacttgaagagtcaagtaccattggccaggatcaaacgcttatggaacgtgatacagagggtggtgcagcagaaattaattgcaatggagtgattgaagtcattaattatactcagaacagtaataatgaaacattgagacataaagaggatctacataatgctaatgactgtgatgtccaaaatttgaatcaggaatctagtttcctaagctcccaaaatggagacagcagcacatctcaagaaacagactcttgtacacctataacatctgaggtgtcagacaccatggtgtgccagtcttcctcaactgtaggtcagtcattcagtgaacaacacattagccaacttcaagaaagcattcgggcagagataccctgtgaagatgaacaagagcaagaacataacggaccactggacaacaaaggaaaatccacggctggaaattttcttgttaatccccttgagccaaaaaatgcagaaaagctcaaggtgaagattgctgaccttggaaatgcttgttggcacaaacatttcactgaagatattcaaacaaggcaatatcgttccttggaagttctaatcggatctggctataatacccctgctgacatttggagcacggcatgcatggcctttgaactggccacaggtgactatttgtttgaacctcattcaggggaagagtacactcgagatgaagatcacattgcattgatcatagaacttctggggaaggtgcctcgcaagctcattgtggcaggaaaatattccaaggaatttttcaccaaaaaaggtgacctgaaacatatcacgaagctgaaaccttggggcctttttgaggttctagtggagaagtatgagtggtcgcaggaagaggcagctggcttcacagatttcttactgcccatgttggagctgatccctgagaagagagccactgccgccgagtgtctccggcacccttggcttaactcctaagcccctgcccagcaccacagcagagatcacacactgaccctccgcccttccccttcaagcattttcctcttcccttttcagggtgaagctcttccttcaagagtttctagatcttgttttttttttaatccaacatgttcatttgggtttgcttacttgaccctgtggagatccccacagccattgggcatcctaggtgaatttggccttggttgggctctgccaaagactaatggactaaaatgtgaaacagcctcttgccctgtacctttccttcccattaggacatcctttaaattataagcatcctttttgaaaagagctatgaaggtgtatgagcccatccttttattcattgactctaagagtcaaattttctagtgcatatcctattgccagcataaggatgaggagggggaaagggtcttaattctatgtacagcagagacattaaacttgctgtgtccgggctgcatcatcttcctggactgtttctgttgttctctgtgttcacattttttcctgcaacttttaagctactgtcttttttaaatagctatatgaacaccaaatttgggtaccattttatcactgttcaaagcactgtcaaattcctttcatcctttaatagttaagatctttgaatcttcagtctgatttttaatgtaagcaaaaacagaaccattgaatagtaatttcttgagaacctcaggtgttctataaacagtcctttcctgtatgtcttctattaccctaagaccagagttattttggttggttgttttgttttattttttgtttttgtatccatggctggcactttactcattgcacttgagtttattgccccataactaaaggatcaggatgatggtagaacggagatctgggtttcagagctttcccatttaagaaaaatagatcttgagattctgattcttttccaaacagtcccctgctttcatgtacagctttttctttaccttacccaaaattctggccttgaagcagttttcctctatggctttgcctttctgattttctcagaggctcgagtctttaatataaccccaaatgaaagaaccaaggggaggggtgggatggcacttttttttgttggtcttgttttgttttgttttttggttggttggttcgttattttttaagattagccattctctgctgctatttccctacataatgtcaatttttaaccataattttgacatgattgagatgtacttgaggcttttttgttttaattgagaaaagactttgcaattttttttttaggatgagcctctcctagacttgacctagaatattacatattcctccagtaagtaatactgaagagcaaaagagaggcaggattggggtcacagccgcttcttcagcatggaccaagtgggccttggggattgcagcgttctcgaagtggctgtaggactcgaatttacagaaagccacagaggtgcaacttgaggctctgctagcaagccaccagtgaggctattgggtaaccacctttctatacaggagattggaatctactttgtcatttatccaccacagtgacaaaggaaaagtggtgccgttatgcaatccatttaactcataaacatattactctgagtaactggccagccattcatcggatccttcattgggtactcctgaaatcagacatgttcctgtagaaagaattttaagttaggctttctatgcacctatcaagaatcaagagaatagattgtatcaaacaacggcagggaaatccttcagcaattctaatccactttgggttttcagctgtttttacatctaaagcaatagactagaactgaattatcttctacatagtaaaatcacaattgtggaattacaggaattctggtgatattaaggtgaaataacaaaacacaaaaggccctattttaacagttgatgtgacagtaagttttaatagaacctgtaacttcattttggaaatgcttctccaccaaataagggctttttcccctatttaaggagccagatggattgaaagatgtggaaataggcagctgtagatcttgatcttccaggtaccccatgtacctttattgagcttaattataatactgtcaaattgccacgatctcactaaaggatttctatttgctgtcagttaaaaataaagccctaaatacatttttattctttctactgagggcattgtctgttttctttgtaaatgccgtacaataaacaaattatttaataaccta

SEQ ID NO: 692 - protein, 654 aa, Homo sapien
MERKVLALQARKKRTKAKKDKAQRKSETQHRGSAPHSESDLPEQEEEILGSDDDEQEDPNDYCKGGYHLVKIGDLFNGRYHVIRKLGWGHFSTVWLSWDIQGKKFVAMKVVKSAEHYTETALDEIRLLKSVRNSDPNDPNREMVVQLLDDFKISGVNGTHICMVFEVLGHHLLKWIIKSNYQGLPLPCVKKIIQQVLQGLDYLHTKCRIIHTDIKPENILLSVNEQYIRRLAAEATEWQRSGAPPPSGSAVSTAPQPKPADKMSKNKKKKLKKKQKRQAELLEKRMQEIEEMEKESGPGQKRPNKQEESESPVERPLKENPPNKMTQEKLEESSTIGQDQTLMERDTEGGAAEINCNGVIEVINYTQNSNNETLRHKEDLHNANDCDVQNLNQESSFLSSQNGDSSTSQETDSCTPITSEVSDTMVCQSSSTVGQSFSEQHISQLQESIRAEIPCEDEQEQEHNGPLDNKGKSTAGNFLVNPLEPKNAEKLKVKIADLGNACWHKHFTEDIQTRQYRSLEVLIGSGYNTPADIWSTACMAFELATGDYLFEPHSGEEYTRDEDHIALIIELLGKVPRKLIVAGKYSKEFFTKKGDLKHITKLKPWGLFEVLVEKYEWSQEEAAGFTDFLLPMLELIPEKRATAAECLRHPWLNS

SEQ ID NO: 693 - DNA, 3801 bp, Homo sapien
cgcgggagacaaagccgcgcgtagagacgcgatgcccgccgatcgcgagcccggccggcgagggcgcggggactgcggcgtctgagcgcgccaagccgtgcgcccgcggggacgccgagccccggggccggtgcgggcggcggcggggcggggcccaggtgcgcccggccgcgtcgggcccgtgactgctcggggggcggcgcccctcccgccgcagccgcagtggctggcgccgcagccaggagccatgggcaacatctcctctaacatctcggccttccagtccctgcatatcgtcatgttgggcttggactcggccggcaagaccacggtgctctaccggctcaagttcaacgagttcgtgaacacggtgcccaccatcggcttcaacaccgagaagatcaagctgagcaacggcacggccaagggcatcagctgccacttctgggacgtgggcggccaggagaagctgcggccgctgtggaagtcctacagccgctgcacggacggcatcatctacgtggtggactcggtggacgtggaccggctggaggaggccaagacggagctgcacaaggtgaccaagttcgccgagaaccagggcacgccgctgctggtcatcgccaacaagcaggacctgcccaagtcgctgccggtggcagagattgagaagcagctggcgctgcacgagcttatcccggccaccacctatcacgtccagccggcgtgcgccatcatcggcgagggcctcaccgagggcatggacaagctctatgagatgatcctgaaacgcaggaagtccctcaagcagaagaagaagcggtaatgcgcccggagcgaccggggagcgagcgagtgcgtcaagaaagaatgaatggatggatggatggttggatggatggatggatggatgagcgagaacccgcgcccgcgaacaaagagcgaaccaaagcgatgcttcgaatttttaaaacggaatctctgcacccaaatgcaggactggtgacttaaggagctgcgaagtctgatttaccggcctactctcgacctgccccccacccccagctcaggggaccttttgtctgaacgccagagctactgaccaggtcggggggccgcggtggggagtggaagagccggtcctgctgtccgccctcccagccccaggtggaaggctcagttgtcggaaagacaaaagcgatttcttcccactcctgcagggccagaagttcaggctgccccgcctccactgggggatcgcacctgtgaattacctgaggtatgcatttcccagaaccgtgggcgtacccaccttggggggcatgttggttctggggggaccacctctccttgcattcaggggctgtgaagctgagtaattttcggtcacagggcaggcccctgttgaaatttcatttgtcctgctctgggcccaaaggtggtggtggtttgggtcatcagaggactgcctgggacggttcagcgggcacggagcgctgtgctggcctggctggggatggccgcggaggtgcccttttcctggtgctttgtggtggctgcagaagaccagttttgttgagaactgcttttcagcctggaatcagacatcttccagatggtttggaccctgtccatgtgtaggtcattatcacacaaagagaccaataaaaataaaaataataagaaaaaaaaaagacgaactattggaggtggtggccaatgatgcatttactgtttgcaggatagttaaaggtgtttaaagggtaaggcttttggtgtaaatgctggatggggtgtgtgtgtgtgtggatatagggacctccctctgtactgtgtactgtgtaatcggcattaatacctagactcatatgtatggaattttaaattctcttagcctactgattggtttggatgagcacaccagctgcaggtgtgtgctgaattgcaagatggtattttttttttttaaccaagggatgtctcttgtaatactaaccgcgtgataatgggttttcagacatgatgaaaaaaaaaaacttttacaaatgaatacttaccttagaaatattcaccttaggaaaaaagactttgctctgcccttttatattcctttatgctgcaagtggtgacatgttcagatttctaatttggttcattgtggcctatctggtttaagtctttcattaaaaatgtctcgttagagtatttgatgtcatgcaccaaaaaaataaaaccccaccttgttgcaaaagctgacctcgttgcatggaattaaaagagaaggaaaaacacaaggatgaagtctttccgaattcattcttgtgggaactggccttcggagccagccagcactttgggcaaatgcaaacaacaatgagtgcttgagataaaagaaagtgtgacgtcatggtcactggtactcaggcacttcacagtttacttgaaagaggctttggaaaatagataaagtgaaagaagaataaatacatatttttaataatgtaattttaaaaatcctttataatcaggactgagtcttggtttgcagaagctgtcacttaccctgaaacacagtatcaaaagggaaacttaaaacatactgtttgatttttttatttcctcttacaatccatgttttcaggtagaattatgactttccccccattgttacacatttctttacaaaggaggcctgtagaaattggacacgatcatgcttgagcatgtgagttagtcaaattatgagtccctgcctattgtccattacacaccgaatgttaatttaagaaccagaggcagaagttctggcttcctgcttgaaacccaattcttatatgaaattttttaaaagcagaaacctagcagcccatctgctttttctcttttgtcggtgtatttggtacccctccaatgctggtctttttgtagaaactcagtagagaaagtctagctaagcagtgttgaaaagcctgcaagatttcagtttacatatcgacagcatatccactgatttctaaatgggctggtcccatcatctgaagattctgtatagaattattaaaaaaaaaatccatctttctttattttcttcacatgcgacaatttcttaagcactttgacattttggtagttccacactattgagagaataatatatttattttgtgacattgcagatgccaaatactgtaaccttctcgtgataacaatacttaggttcaagatcactgttcaaaccctgtcatgctttaaaactgatgcgagatgattttgttttttgcataatcaatacttaagggtgcaatcaactgttagtaattgtgcagtaaagtaaagccctgtggtgtatcaactactagttaagagtctcagttgatttctgtaatgtttgacctaataatagcccgtttcgtctctgacccaacagaggaagcacagatcaaatcaccttggagtggtcaccagggggacagggagccccccaccaatgtatcaatgggtgatttatgatgccttctgccctttggcgagtgaatgggtttcccataggggaagttggcctccctccgtgagctttggaaatgttttctaatagacacagggaggccagttctgtttcagagcaattatcttcccaaattctctgttctggtgttggaactgtgtgccctggtttctgttttcctttctactgctgtaattctctgtctcatcatccttctcttttgtttccatagccttttataatgcatatatgatgctgtgaacagaaataaattatttatacaatcaaatgacaaa

SEQ ID NO: 694 - protein, 192 aa, Homo sapien
MGNISSNISAFQSLHIVMLGLDSAGKTTVLYRLKFNEFVNTVPTIGFNTEKIKLSNGTAKGISCHFWDVGGQEKLRPLWKSYSRCTDGIIYVVDSVDVDRLEEAKTELHKVTKFAENQGTPLLVIANKQDLPKSLPVAEIEKQLALHELIPATTYHVQPACAIIGEGLTEGMDKLYEMILKRRKSLKQKKKR

SEQ ID NO: 695 - DNA, 1426 bp, Homo sapien
ggcacgagggccttccagtccctgcatatcgtcatgttgggcttggactcggccggcaagaccacggtgctctaccggctcaagttcaacgagttcgtgaacacggtgcccaccatcggcttcaacaccgagaagatcaagctgagcaacggcacggccaagggcatcagctgccacttctgggacgtgggcggccaggagaagctgcggccgctgtggaagtcctacagccgctgcacggacggcatcatctacgtggtggactcggtggacgtggaccggctggaggaggccaagacggagctgcacaaggtgaccaagttcgccgagaaccagggcacgccgctgctggtcatcgccaacaagcaggacctgcccaagtcgctgccggtggcagagattgagaagcagctggcgctgcacgagcttatcccggccaccacctatcacgtccagccggcgtgcgccatcatcggcgagggcctcaccgagggcatggacaagctctatgagatgatcctgaaacgcaggaagtccctcaagcagaagaagaagcggtaatgcgcccggagcgaccggggagcgagcgagtgcgtcaagaaagaatgaatggatggatggatggttggatggatggatggatggatgagcgagaacccgcgcccgcgaacaaagagcgaaccaaagcgatgcttcgaatttttaaaacggaatctctgcacccaaatgcaggactggtgacttaaggagctgcgaagtctgatttaccggcctactctcgacctgccccccacccccagctcaggggaccttttgtctgaacgccagagctactgaccaggtcggggggccgcggtggggagtggaagagccggtcctgctgtccgccctcccagccccaggtggaaggctcagttgtcggaaagacaaaagcgatttcttcccactcctgcagggccagaagttcaggctgccccgcctccactgggggatcgcacctgtgaattacctgaggtatgcatttcccagaaccgtgggcgtacccaccttggggggcatgttggttctggggggaccacctctccttgcattcaggggctgtgaagctgagtaattttcggtcacagggcaggcccctgttgaaatttcatttgtcctgctctgggcccaaaggtggtggtggtttgggtcatcagaggactgcctgggacggttcagcgggcacggagcgctgtgctggcctggctggggatggccgcggaggtgcccttttcctggtgctttgtggtggctgcagaagaccagttttgttgagaactgcttttcagcctggaatcagacatcttccagatggtttggaccctgtccatgtgtaggtcattatcacacaaagagaccaataaaaataaaaaaaaaaaaaaaaaaa

SEQ ID NO: 696 - protein, 175 aa, Homo sapien
MLGLDSAGKTTVLYRLKFNEFVNTVPTIGFNTEKIKLSNGTAKGISCHFWDVGGQEKLRPLWKSYSRCTDGIIYVVDSVDVDRLEEAKTELHKVTKFAENQGTPLLVIANKQDLPKSLPVAEIEKQLALHELIPATTYHVQPACAIIGEGLTEGMDKLYEMILKRRKSLKQKKKR

SEQ ID NO: 697 - DNA, 3149 bp, Homo sapien
agggggcgcggtgggaggagtaggagaagacaaaagccgaaagcgaagagggcccgggctgcacacaccggctgggaggcagccgtctgtgcagcgagcagccggcgcggggaggccgcagtgcacggggcgtcacagtcggcaggcagcatggggaagggagggaaccagggcgagggggccgccgagcgcgaggtgtcggtgcccaccttcagctgggaggagattcagaagcataacctgcgcaccgacaggtggctggtcattgaccgcaaggtttacaacatcaccaaatggtccatccagcacccggggggccagcgggtcatcgggcactacgctggagaagatgcaacggatgccttccgcgccttccaccctgacctggaattcgtgggcaagttcttgaaacccctgctgattggtgaactggccccggaggagcccagccaggaccacggcaagaactcaaagatcactgaggacttccgggccctgaggaagacggctgaggacatgaacctgttcaagaccaaccacgtgttcttcctcctcctcctggcccacatcatcgccctggagagcattgcatggttcactgtcttttactttggcaatggctggattcctaccctcatcacggcctttgtccttgctacctctcaggcccaagctggatggctgcaacatgattatggccacctgtctgtctacagaaaacccaagtggaaccaccttgtccacaaattcgtcattggccacttaaagggtgcctctgccaactggtggaatcatcgccacttccagcaccacgccaagcctaacatcttccacaaggatcccgatgtgaacatgctgcacgtgtttgttctgggcgaatggcagcccatcgagtacggcaagaagaagctgaaatacctgccctacaatcaccagcacgaatacttcttcctgattgggccgccgctgctcatccccatgtatttccagtaccagatcatcatgaccatgatcgtccataagaactgggtggacctggcctgggccgtcagctactacatccggttcttcatcacctacatccctttctacggcatcctgggagccctccttttcctcaacttcatcaggttcctggagagccactggtttgtgtgggtcacacagatgaatcacatcgtcatggagattgaccaggaggcctaccgtgactggttcagtagccagctgacagccacctgcaacgtggagcagtccttcttcaacgactggttcagtggacaccttaacttccagattgagcaccacctcttccccaccatgccccggcacaacttacacaagatcgccccgctggtgaagtctctatgtgccaagcatggcattgaataccaggagaagccgctactgagggccctgctggacatcatcaggtccctgaagaagtctgggaagctgtggctggacgcctaccttcacaaatgaagccacagcccccgggacaccgtggggaaggggtgcaggtggggtgatggccagaggaatgatgggcttttgttctgaggggtgtccgagaggctggtgtatgcactgctcacggaccccatgttggatctttctccctttctcctctcctttttctcttcacatctcccccatagcaccctgccctcatgggacctgccctccctcagccgtcagccatcagccatggccctcccagtgcctcctagccccttcttccaaggagcagagaggtggccaccgggggtggctctgtcctacctccactctctgcccctaaagatgggaggagaccagcggtccatgggtctggcctgtgagtctccccttgcagcctggtcactaggcatcacccccgctttggttcttcagatgctcttggggttcataggggcaggtcctagtcgggcagggcccctgaccctcccggcctggcttcactctccctgacggctgccattggtccaccctttcatagagaggcctgctttgttacaaagctcgggtctccctcctgcagctcggttaagtacccgaggcctctcttaagatgtccagggccccaggcccgcgggcacagccagcccaaaccttgggccctggaagagtcctccaccccatcactagagtgctctgaccctgggctttcacgggccccattccaccgcctccccaacttgagcctgtgaccttgggaccaaagggggagtccctcgtctcttgtgactcagcagaggcagtggccacgttcagggaggggccggctggcctggaggctcagcccaccctccagcttttcctcagggtgtcctgaggtccaagattctggagcaatctgacccttctccaaaggctctgttatcagctgggcagtgccagccaatccctggccatttggccccaggggacgtgggccctgcaggctgcaggagggcactggagctgggaggtctcgtcccagccctccccatctcggggctgctgtgtggacggcgctgcctcaggcactctcctgtctgaacctgcccttactgtgtttaacctgttgctccaggatgcattctgataggagggggcggcagggctgggccttgtgacaatctgcctttcaccacatggccttgcctcggtggccctgactgtcagggagggccagggaggcagagcgggagggagtctcaggaggaggctgccctgaggggctggggagggggtacctcatgaggaccagggtggagctgagaagaggaggaggtgggggctggaggtgctggtagctgaggggacgggcaagtgagaggggagggagggaagtcctgggaggatcctgagctgctgttgcagtctaacccactaatcagttcttagattcaggggaagggcaggcaccaacaactcagaatgggggctttcggggagggcgcctagtccccccagctctaagcagccaggagggacctgcatctaagcatctgggttgccatggcaatggcatgccccccagctactgtatgcccccgacccccgcagaggcagaatgaacccatagggagctgatcgtaatgtttatcatgttacttccccacccctacattttttgaaataaaataaggaattttattctc

SEQ ID NO: 698 - protein, 444 aa, Homo sapien
MGKGGNQGEGAAEREVSVPTFSWEEIQKHNLRTDRWLVIDRKVYNITKWSIQHPGGQRVIGHYAGEDATDAFRAFHPDLEFVGKFLKPLLIGELAPEEPSQDHGKNSKITEDFRALRKTAEDMNLFKTNHVFFLLLLAHIIALESIAWFTVFYFGNGWIPTLITAFVLATSQAQAGWLQHDYGHLSVYRKPKWNHLVHKFVIGHLKGASANWWNHRHFQHHAKPNIFHKDPDVNMLHVFVLGEWQPIEYGKKKLKYLPYNHQHEYFFLIGPPLLIPMYFQYQIIMTMIVHKNWVDLAWAVSYYIRFFITYIPFYGILGALLFLNFIRFLESHWFVWVTQMNHIVMEIDQEAYRDWFSSQLTATCNVEQSFFNDWFSGHLNFQIEHHLFPTMPRHNLHKIAPLVKSLCAKHGIEYQEKPLLRALLDIIRSLKKSGKLWLDAYLHK

SEQ ID NO: 699 - DNA, 3410 bp, Homo sapien
tgcgacgtgactggctagctgcgtgggtactggaacaagcaaacgaggcagcgagcgaaggacgggagccggaccctgggccccgtggaactccagcctgcgccaccacgtcacgcacacgctcggcgctgcgatccgcgcatataacgatatttggatttgacctgcattttggaatttatctacacttaaaatgccaccagcagttggaggtccagttggatacacccccccagatggaggctggggctgggcagtggtaattggagctttcatttccatcggcttctcttatgcatttcccaaatcaattactgtcttcttcaaagagattgaaggtatattccatgccaccaccagcgaagtgtcatggatatcctccataatgttggctgtcatgtatggtggaggtcctatcagcagtatcctggtgaataaatatggaagtcgtatagtcatgattgttggtggctgcttgtcaggctgtggcttgattgcagcttctttctgtaacaccgtacagcaactatacgtctgtattggagtcattggaggtcttgggcttgccttcaacttgaatccagctctgaccatgattggcaagtatttctacaagaggcgaccattggccaacggactggccatggcaggcagccctgtgttcctctgtactctggcccccctcaatcaggttttcttcggtatctttggatggagaggaagctttctaattcttgggggcttgctactaaactgctgtgttgctggagccctcatgcgaccaatcgggcccaagccaaccaaggcagggaaagataagtctaaagcatcccttgagaaagctggaaaatctggtgtgaaaaaagatctgcatgatgcaaatacagatcttattggaagacaccctaaacaagagaaacgatcagtcttccaaacaattaatcagttcctggacttaaccctattcacccacagaggctttttgctatacctctctggaaatgtgatcatgttttttggactctttgcacctttggtgtttcttagtagttatgggaagagtcagcattattctagtgagaagtctgccttccttctttccattctggcttttgttgacatggtagcccgaccatctatgggacttgtagccaacacaaagccaataagacctcgaattcagtatttctttgcggcttccgttgttgcaaatggagtgtgtcatatgctagcacctttatccactacctatgttggattctgtgtctatgcgggattctttggatttgccttcgggtggctcagctccgtattgtttgaaacattgatggaccttgttggaccccagaggttctccagcgctgtgggattggtgaccattgtggaatgctgtcctgtcctcctggggccaccacttttaggtcggctcaatgacatgtatggagactacaaatacacatactgggcatgtggcgtcgtcctaattatttcaggtatctatctcttcattggcatgggcatcaattatcgacttttggcaaaagaacagaaagcaaacgagcagaaaaaggaaagtaaagaggaagagaccagtatagatgttgctgggaagccaaatgaagttaccaaagcagcagaatctccggaccagaaagacacagaaggagggcccaaggaggaggaaagtccagtctgaatccatggggctgaagggtaaattgagcagttcatgacccaggatatctgaaaatattctactggcctgtaatctaccagtggtgctcaatgcaaatagtagacatttgtgtggaaatcataccagttgttcattgatgggatttttgtttgactccttaccaatagcctgaatttgaggagggaatgattggtagcaaaggatgggggaaagaagtaggttctgttttgttttgttttaatcttagcttttaatagtgtcataaagattataatatgtgccttaagttttagtctttagaactctagagagccttaacttcttaaaccatttttgctgaattcatctatttcgagtgttgtgttaaaaggaaaaataacaactaacttgtttgaggcaaatctaaaatttaaaattaatcttgcttcattgttacatgtaatatatttcagacattttcactggaagatttatgaacagaaatattggttgaaagttagagattttacaaaatgctgacaaaaatattttcctagcatcagtagatttctggcatatgtttctgctagctatatatttaggaaattcaaagcataaaactttggcaacatcttggctgttctagacacagtgtacttgtcaacccctctcaggtaccttttcttgggatgcttattagaagccaagtaaagtgcttaaggtttgttttcattaaattagctatttctgctcccctgttcaaagatgcattttgagtgtttatagatcactgccctttttgaaatcacctggtattatttttcttactggaaaagttagtattaaaatctacagaactacatatttgtgcctccttggtaaatacaacacatctaattaaatgtagacagatatttcaaacatcagctgaattcacttaagtttttccaaaacctcagttaaactgtgaagctattggaatttttttttcctggaatttttcccctttgattcacagtggtcccatttatatctgcttctagcttagtgctatgtgtgagatatgtgtgtgtttggtgtttttgtttttttgtttttttttttttaaggtttgcaaattaaaaagggccagaaaaatttggcaccaggcaaacgaataaagataggattgggaaagaagttgctaagtgtgcttagttttaataagtaattccttctcttttttcagagaaggccttacagaaaattgttgtgcttagaattgctggatgcatttttaccctccacacaaacctaaaaattttgtgacccctttcacttacctgaaaagtagagaaatggattcagtataaggataaggagggaaggtggaccagaatgaaaactgtaaatatttttttaacctaatatcacttaaatcgaggcagaaagatatagacattcaatgaattatattcaatgcatttaaaataccactgtaattgacagagtaaaagtatagatacaaaaccttgtgtaagaggctgacttttccaaataaacattttttaagaaaacatttcttctcccaaatgtctattttcttgaggaaaatattgctgtgtcttcattttcattaccaggtttcattttgggccttgctaaattgattgaattaaatcctccagcttttgaaccttgaaaaaaaaaaaaaaaaaaaaaaaaaaaaaaaaaaaagaaaaaaaaaaaaaaaaag

SEQ ID NO: 700 - protein, 500 aa, Homo sapien
MPPAVGGPVGYTPPDGGWGWAVVIGAFISIGFSYAFPKSITVFFKEIEGIFHATTSEVSWISSIMLAVMYGGGPISSILVNKYGSRIVMIVGGCLSGCGLIAASFCNTVQQLYVCIGVIGGLGLAFNLNPALTMIGKYFYKRRPLANGLAMAGSPVFLCTLAPLNQVFFGIFGWRGSFLILGGLLLNCCVAGALMRPIGPKPTKAGKDKSKASLEKAGKSGVKKDLHDANTDLIGRHPKQEKRSVFQTINQFLDLTLFTHRGFLLYLSGNVIMFFGLFAPLVFLSSYGKSQHYSSEKSAFLLSILAFVDMVARPSMGLVANTKPIRPRIQYFFAASVVANGVCHMLAPLSTTYVGFCVYAGFFGFAFGWLSSVLFETLMDLVGPQRFSSAVGLVTIVECCPVLLGPPLLGRLNDMYGDYKYTYWACGVVLIISGIYLFIGMGINYRLLAKEQKANEQKKESKEEETSIDVAGKPNEVTKAAESPDQKDTEGGPKEEESPV

SEQ ID NO: 701 - DNA, 2213 bp, Homo sapien
ggcacgagggagcggtgcggaggctctgctcggatcgaggtctgcagcgcagcttcgggagcatgagtgctgcagtgactgcagggaagctggcacgggcaccggccgaccctgggaaagccggggtccccggagttgcagctcccggagctccggcggcggctccaccggcgaaagagatcccggaggtcctagtggacccacgcagccggcggcgctatgtgcggggccgctttttgggcaagggcggctttgccaagtgcttcgagatctcggacgcggacaccaaggaggtgttcgcgggcaagattgtgcctaagtctctgctgctcaagccgcaccagagggagaagatgtccatggaaatatccattcaccgcagcctcgcccaccagcacgtcgtaggattccacggctttttcgaggacaacgacttcgtgttcgtggtgttggagctctgccgccggaggtctctcctggagctgcacaagaggaggaaagccctgactgagcctgaggcccgatactacctacggcaaattgtgcttggctgccagtacctgcaccgaaaccgagttattcatcgagacctcaagctgggcaaccttttcctgaatgaagatctggaggtgaaaataggggattttggactggcaaccaaagtcgaatatgacggggagaggaagaagaccctgtgtgggactcctaattacatagctcccgaggtgctgagcaagaaagggcacagtttcgaggtggatgtgtggtccattgggtgtatcatgtataccttgttagtgggcaaaccaccttttgagacttcttgcctaaaagagacctacctccggatcaagaagaatgaatacagtattcccaagcacatcaaccccgtggccgcctccctcatccagaagatgcttcagacagatcccactgcccgcccaaccattaacgagctgcttaatgacgagttctttacttctggctatatccctgcccgtctccccatcacctgcctgaccattccaccaaggttttcgattgctcccagcagcctggaccccagcaaccggaagcccctcacagtcctcaataaaggcttggagaaccccctgcctgagcgtccccgggaaaaagaagaaccagtggttcgagagacaggtgaggtggtcgactgccacctcagtgacatgctgcagcagctgcacagtgtcaatgcctccaagccctcggagcgtgggctggtcaggcaagaggaggctgaggatcctgcctgcatccccatcttctgggtcagcaagtgggtggactattcggacaagtacggccttgggtatcagctctgtgataacagcgtgggggtgctcttcaatgactcaacacgcctcatcctctacaatgatggtgacagcctgcagtacatagagcgtgacggcactgagtcctacctcaccgtgagttcccatcccaactccttgatgaagaagatcaccctccttaaatatttccgcaattacatgagcgagcacttgctgaaggcaggtgccaacatcacgccgcgcgaaggtgatgagctcgcccggctgccctacctacggacctggttccgcacccgcagcgccatcatcctgcacctcagcaacggcagcgtgcagatcaacttcttccaggatcacaccaagctcatcttgtgcccactgatggcagccgtgacctacatcgacgagaagcgggacttccgcacataccgcctgagtctcctggaggagtacggctgctgcaaggagctggccagccggctccgctacgcccgcactatggtggacaagctgctgagctcacgctcggccagcaaccgtctcaaggcctcctaatagctgccctcccctccggactggtgccctcctcactcccacctgcatctggggcccatactggttggctcccgcggtgccatgtctgcagtgtgccccccagccccggtggctgggcagagctgcatcatccttgcaggtgggggttgctgtgtaagttatttttgtacatgttcgggtgtgggttctacagccttgtccccctccccctcaaccccaccatatgaattgtacagaatatttctattgaattcggaactgtcctttccttggctttatgcacattaaacagatgtgaatattcaaaaaaaaaaaaaaaaaaaaaaaaaaaaaaaaaaa

SEQ ID NO: 702 - protein, 603 aa, Homo sapien
MSAAVTAGKLARAPADPGKAGVPGVAAPGAPAAAPPAKEIPEVLVDPRSRRRYVRGRFLGKGGFAKCFEISDADTKEVFAGKIVPKSLLLKPHQREKMSMEISIHRSLAHQHVVGFHGFFEDNDFVFVVLELCRRRSLLELHKRRKALTEPEARYYLRQIVLGCQYLHRNRVIHRDLKLGNLFLNEDLEVKIGDFGLATKVEYDGERKKTLCGTPNYIAPEVLSKKGHSFEVDVWSIGCIMYTLLVGKPPFETSCLKETYLRIKKNEYSIPKHINPVAASLIQKMLQTDPTARPTINELLNDEFFTSGYIPARLPITCLTIPPRFSIAPSSLDPSNRKPLTVLNKGLENPLPERPREKEEPVVRETGEVVDCHLSDMLQQLHSVNASKPSERGLVRQEEAEDPACIPIFWVSKWVDYSDKYGLGYQLCDNSVGVLFNDSTRLILYNDGDSLQYIERDGTESYLTVSSHPNSLMKKITLLKYFRNYMSEHLLKAGANITPREGDELARLPYLRTWFRTRSAIILHLSNGSVQINFFQDHTKLILCPLMAAVTYIDEKRDFRTYRLSLLEEYGCCKELASRLRYARTMVDKLLSSRSASNRLKAS

SEQ ID NO: 703 - DNA, 1347 bp, Homo sapien
ggcacgagggagaactagtctcgatttttttttttttttttttctttgttttgtttttcctgtataaaaaaggaccccaaatataaaggtagggaaagggacaagagggaacataccccttagtgtagagaaatgggaaggagaaggagaagcctcaaaaggagaggtgggaggggaatgtcattaaggcagcaaagtaatctctgtagaaagatggaggaggaccctccatagcctcagagataaaggcaaagattgccctctcagtgtccagaagggaaatggcagcttttcttccttccatggcagccactccattgctcactccggattaccttcatccttatgtagataagagtgctgcagagctcgaaaggcagagattcgcttgtgtgggttaaaagtcagcatttccagcagcagctgtgctcccgactcctccatctcaggtaccaccgactgcactgggcggggccctctggggggaaaggctccacggggcagggatacatctcgaggccagtcatcctctggaggcagcccaatcaggtcaaagattttgcccaactggtcggcttcagagtttccacagaagagaggctttcgacgaaacatctctgcaaagatacagccaacactccacatgtccacaggtgttgcatatgtggactgcagaagaacttcgggagctcggtaccagagtgtaacaaccacgggtgtaagtgccatctggtagctgtagattctggccaggccaaagtcagccagcttgactgttccaccacttgtcaccagaatgttctctggcttcagatctcggtgaacgatgcaattggcatgaaggaaatctaggcctcttagaaactggcgcatcagatccttgatcgtttcggctggcaagcctggtgggggtgccttgtccagatatgtccttaggtcctggtctacatgctcaaacaccagggttaccttgatctcccggtcagttcgggatgtggcacagacgtccatcagccggacaacattgggatgctcaaaagcctccagtcgcctcagtaaagccacctcacgaactgtgctgatgggaaggcctcctccacctcctcctccattggggactctcacactcttgagggccacaaagtggccactgtggggatcacgggccttgtacactgtcccataggcaccgacaccaatttcagccactggctcatatcgagaggtagccattctcagatcaagggagaccctcacgccagcccggggtgctgtgggggcggcccgttatcggggccccggagccggttcctacggccccatacacccgagctcggtccggagcag

SEQ ID NO: 704 - protein, 30 aa, Homo sapien
MSTGVAYVDCRRTSGARYQSVTTTGVSAIW

SEQ ID NO: 705 - DNA, 6028 bp, Homo sapien
ggtgtggacgttgtctaaatttcggtagccatggcacaagaatataagaaagcatgggattatggcaaccacagaatctcagtagtacaagttccattcagttttttctgaaagaaagccctctgttaaagtgaagcaaagaaactgttgtggattataacgtttagaagttccaatttttcagtgctttacaaataaagcatcatttaaccttttaaatgaaaaagattaagatctcatgcaactgttgtattttctggaagccattctccaaaagggaagtgcacatttaaaacacagatatgatggtccttgctgcagggatttaagtctacttgcttttacatcatgaccagcttgaaacggtcacagacagaaaggcctcttgccactgacagggcctctgttgttggcacagacggcacccccaaagtccacactgatgatttctacatgcggcgcttccggtcccaaaatggcagcttaggatcatcagttatggctcctgtaggacccccccgaagtgaaggttctcaccatataacctcaacccccggagtcccaaaaatgggggtaagggcaaggattgcagattggcccccaagaaaggaaaacataaaagaatctagccgttcaagccaggaaatagaaacctcaagttgccttgatagcctgtcctccaaaagcagtcctgtgagtcagggaagttctgttagcctcaattccaatgactcagccatgctgaaaagcatacagaacacgctgaaaaacaagacaagaccgtcggagaacatggactccagatttctcatgcctgaagcctaccccagctcccccagaaaagctcttcgcagaatacgccagcgaagcaacagtgatatcaccataagtgaacttgatgtggatagctttgatgaatgtatctcacctacatacaagactggaccatcactgcacagggaatatggtagcacatcttcaattgataaacagggaacatctggagaaagcttttttgatttgttaaagggctacaaagatgacaaatctgatcgaggtccaactccaaccaagctcagtgactttctcattactggtggtggcaagggttctggtttctctttggatgtaatagacgggcctatctcacagagagagaacctcaggctttttaaggaaagggaaaaaccactcaagcgacgttcaaaatctgaaactggagactcctctatttttcgtaaattgcgcaatgccaaaggtgaagaacttgggaagtcatcagatcttgaagataaccgatcagaagactctgtcaggccctggacatgtccaaagtgctttgcccactatgatgtccagagtatattatttgatttgaatgaggcaattatgaacaggcacaatgttattaagaggagaaacaccaccactggagcttccgcagctgccgtggcatccttggtctctggacctctgtctcattcagccagttttagctccccaatgggcagcacagaggacctgaattccaaaggaagcctcagcatggaccagggagatgataaaagcaatgagcttgtaatgagctgtccatattttcggaatgagataggtggagaaggggagaggaaaatcagcctttcaaaatcaaattctggctcctttagtggatgtgaaagtgcctcctttgagtctacccttagttcccattgcacaaatgcaggagtggcagtacttgaagtgcccaaggagaacttggtgttgcacctagatagagtgaaaagatacatcgtggaacacgtagatctgggtgcatactattatagaaaatttttctaccagaaggaacactggaactattttggggctgatgagaatcttggtccagtggctgtgagcattcgaagggaaaaaccagatgaaatgaaagaaaatggatctccgtacaactaccgaataatttttagaactagtgagctcatgacactgagaggttcggtcctggaggacgccattccgtcgacagccaagcactcgacagccagaggcctgcctctcaaagaagtgctggagcacgtggttcctgagctcaatgtccagtgcctgcggttggccttcaacacacccaaggtcacagagcagctcatgaaactggatgaacaagggctgaactaccagcagaaagtaggcatcatgtactgcaaagctggacagagcactgaagaagagatgtacaacaatgagtcagctggcccagcctttgaagaattccttcaactattgggagagcgagttcggctcaaaggatttgagaagtatcgagcacagcttgataccaaaactgactccactggaacccattctctgtacacaacatacaaagattatgaaattatgttccatgtttctaccatgctgccatacacacccaacaacaaacaacagctcctgaggaagcggcacattggaaatgatatcgtaacaattgttttccaagagcctggagcacagccattcagcccaaaaaacatccgatcccacttccagcacgttttcgtcatcgtcagggtgcacaatccgtgctctgacagtgtctgttatagtgtggctgttaccaggtccagagatgtgccttcctttgggcctcccattcctaaaggggtcactttccctaagtcaaatgtgttcagggacttccttttggcgaaagtgattaatgcagaaaatgctgctcataaatcggagaagtttcgggccatggcaactcggacccgccaggaatacctgaaagatctggcagaaaagaatgtcaccaacacccctatcgacccttctggcaagtttccgttcatctctctggcttccaagaagaaggaaaagtctaagccatatccaggagccgagctcagcagcatgggggccattgtatgggcagtccgggctgaagactacaacaaggccatggaactagactgccttttagggatctccaatgagttcattgtgctcattgaacaggaaacaaagagcgtggtcttcaattgttcctgtagagatgtgatagggtggacttcaactgacaccagcctcaaaatcttctatgaacgaggagaatgtgtttcagtgggtagttttattaacattgaggagatcaaagagattgtcaaaaggttgcagtttgtttcaaaaggctgtgaatcggtggagatgactctgcgaagaaatgggctaggacagcttggcttccatgtcaactatgagggcattgtggcggatgtggagccctacggttatgcctggcaggcagggctgaggcagggcagtcgcctggtggagatctgcaaggtggcggtagccactctgagccatgagcagatgatcgacctcctgagaacatctgtcacggtgaaggttgtcatcattcccccgcatgatgactgcaccccgcggaggagttgctctgaaacctaccgcatgccagtgatggagtacaaaatgaatgaaggtgtttcatacgaattcaagtttcccttccgaaataataacaagtggcagaggaacgccagcaaggggcctcattcacctcaagtcccgtcccaggtgcagagtcccatgacctcgcggctgaatgctggaaaaggagatgggaagatgcctcctccagaaagagccgccaacatccctcgaagcatctccagtgacgggcgcccactagagaggcggctgtctcctggttcggacatctatgtgacggtctcatccatggctttagcaagatcccagtgtcggaactctcctagcaacttgtcttcatccagtgatactggttctgtggggggcacttacaggcagaagtccatgcccgaagggtttggagtgagccgtagatccccagcctccattgacaggcagaacacccagtcagatattggtggcagcggaaaatccacgcctagctggcaaagaagtgaggatagcattgctgaccagatggcttacagttatagaggacctcaggatttcaattcttttgtcctcgagcagcatgaatatacagagccaacatgccatctcccagcagtatcaaaggtactgccagctttccgagagagccccagtgggagattaatgcggcaggatccagtggttcatttgtctccaaacaaacaagggcattctgatagccactactcgagccactccagtagcaatactctctccagcaatgcgtcaagtgcccatagtgatgagaagtggtacgatggggaccgcacagaatccgaactcaacagctataactatctgcaaggcacctctgctgacagtggcattgacaccacctcttatggccccagccacggcagcacagcctcgctgggggctgccacatcgtcacctcgctcagggccaggcaaggagaaagtggcacccctatggcacagctccagtgaagtaatctccatggcagatcggactttggagacagagagccacggcctggaccggaaaacagagtcttccctgagcttagacatacacagcaagagccaagccggctcgacccctctgacaagggagaacagcaccttcagtataaacgatgctgcttcccacacaagtaccatgagctcccgacactctgccagcccagtggttttcaccagtgcccggagttcacctaaagaagagcttcatccagctgccccctcacagctcgcaccatccttctcctcctcttcctcctcctcctctggtcctaggagtttttaccctcgccagggcgctactagcaagtacctgattggatggaaaaaacccgaaggaaccataaactccgtgggatttatggacacgagaaagcgtcatcagagcgatggcaatgaaatagcccacaccaggctgcgtgcctcaaccagagacctccgggcatctcctaagccaacctccaagtccaccattgaagaagatctaaagaaactaattgatcttgaaagcccaactcctgaatcacagaagagttttaagttccacgcactctcctctcctcagtctcctttccccagcacccccacctcacggcgggccttgcacagaacactgtcggacgagagcatttacaatagccagagggagcactttttcacctccagggcgtcacttctggaccaagccctgcccaacgacgtcctcttcagtagcacgtacccttctctccccaagtcgctcccgttgaggaggccttcttacaccttaggaatgaaatcgctgcatggagagttctcagcctcggacagctccctcactgacatccaggagacccgcaggcagcctatgcccgaccctggcctgatgcccctgcctgacactgctgcagacttggattggtccaacctggtagatgctgccaaagcctatgaggtccagagagcctcattttttgctgctagtgatgaaaaccatcgccccttgagtgctgcatccaacagtgatcagctggaggaccaggctctggcccagatgaagccttacagcagcagtaaagactcctctcccactctggcttctaaagtggaccagctggaaggtatgctgaagatgcttcgggaagatttgaagaaggaaaaagaagacaaagctcaccttcaggcggaggtgcagcacctgcgagaggacaacctgaggctacaggaggagtcccagaacgcctcggacaagctgaagaagttcacagaatgggtcttcaacaccatagacatgagctagggaaggctgaggaggacaggagaagggcccagacactccctccagtgagtgtcctgcagcccttattccctccatagaaagcatcctcagagcaccttccctggcttcctactctgccccctttcggggagtgcacaacacaatagttgcagatcaacaatcatcacctgccttttgtagaaaagaaaaacaaaaaaagtaaataaaaattttaaacagtaaaataaaagtttaactgctaaaaaaaaaaaaaaaaaaaaaaaaa

SEQ ID NO: 706 - protein, 1804 aa, Homo sapien
MTSLKRSQTERPLATDRASVVGTDGTPKVHTDDFYMRRFRSQNGSLGSSVMAPVGPPRSEGSHHITSTPGVPKMGVRARIADWPPRKENIKESSRSSQEIETSSCLDSLSSKSSPVSQGSSVSLNSNDSAMLKSIQNTLKNKTRPSENMDSRFLMPEAYPSSPRKALRRIRQRSNSDITISELDVDSFDECISPTYKTGPSLHREYGSTSSIDKQGTSGESFFDLLKGYKDDKSDRGPTPTKLSDFLITGGGKGSGFSLDVIDGPISQRENLRLFKEREKPLKRRSKSETGDSSIFRKLRNAKGEELGKSSDLEDNRSEDSVRPWTCPKCFAHYDVQSILFDLNEAIMNRHNVIKRRNTTTGASAAAVASLVSGPLSHSASFSSPMGSTEDLNSKGSLSMDQGDDKSNELVMSCPYFRNEIGGEGERKISLSKSNSGSFSGCESASFESTLSSHCTNAGVAVLEVPKENLVLHLDRVKRYIVEHVDLGAYYYRKFFYQKEHWNYFGADENLGPVAVSIRREKPDEMKENGSPYNYRIIFRTSELMTLRGSVLEDAIPSTAKHSTARGLPLKEVLEHVVPELNVQCLRLAFNTPKVTEQLMKLDEQGLNYQQKVGIMYCKAGQSTEEEMYNNESAGPAFEEFLQLLGERVRLKGFEKYRAQLDTKTDSTGTHSLYTTYKDYEIMFHVSTMLPYTPNNKQQLLRKRHIGNDIVTIVFQEPGAQPFSPKNIRSHFQHVFVIVRVHNPCSDSVCYSVAVTRSRDVPSFGPPIPKGVTFPKSNVFRDFLLAKVINAENAAHKSEKFRAMATRTRQEYLKDLAEKNVTNTPIDPSGKFPFISLASKKKEKSKPYPGAELSSMGAIVWAVRAEDYNKAMELDCLLGISNEFIVLIEQETKSVVFNCSCRDVIGWTSTDTSLKIFYERGECVSVGSFINIEEIKEIVKRLQFVSKGCESVEMTLRRNGLGQLGFHVNYEGIVADVEPYGYAWQAGLRQGSRLVEICKVAVATLSHEQMIDLLRTSVTVKVVIIPPHDDCTPRRSCSETYRMPVMEYKMNEGVSYEFKFPFRNNNKWQRNASKGPHSPQVPSQVQSPMTSRLNAGKGDGKMPPPERAANIPRSISSDGRPLERRLSPGSDIYVTVSSMALARSQCRNSPSNLSSSSDTGSVGGTYRQKSMPEGFGVSRRSPASIDRQNTQSDIGGSGKSTPSWQRSEDSIADQMAYSYRGPQDFNSFVLEQHEYTEPTCHLPAVSKVLPAFRESPSGRLMRQDPVVHLSPNKQGHSDSHYSSHSSSNTLSSNASSAHSDEKWYDGDRTESELNSYNYLQGTSADSGIDTTSYGPSHGSTASLGAATSSPRSGPGKEKVAPLWHSSSEVISMADRTLETESHGLDRKTESSLSLDIHSKSQAGSTPLTRENSTFSINDAASHTSTMSSRHSASPVVFTSARSSPKEELHPAAPSQLAPSFSSSSSSSSGPRSFYPRQGATSKYLIGWKKPEGTINSVGFMDTRKRHQSDGNEIAHTRLRASTRDLRASPKPTSKSTIEEDLKKLIDLESPTPESQKSFKFHALSSPQSPFPSTPTSRRALHRTLSDESIYNSQREHFFTSRASLLDQALPNDVLFSSTYPSLPKSLPLRRPSYTLGMKSLHGEFSASDSSLTDIQETRRQPMPDPGLMPLPDTAADLDWSNLVDAAKAYEVQRASFFAASDENHRPLSAASNSDQLEDQALAQMKPYSSSKDSSPTLASKVDQLEGMLKMLREDLKKEKEDKAHLQAEVQHLREDNLRLQEESQNASDKLKKFTEWVFNTIDMS

SEQ ID NO: 707 - DNA, 1299 bp, Homo sapien
agtcctcttccgggtgatggcggcgggtgccccggatgtagccctggcgcaagcatctcttcttttttccacctcgccttccgcggattcccagcttgagaaacacctctttgccccgtcatgccaaagaggaaagtgaccttccaaggcgtgggagatgaggaggatgaggatgaaatcattgtccccaagaagaagctggtggaccctgtggctgggtcagggggtcctgggagccgctttaaaggcaaacactctttggatagcgatgaggaggaggatgatgatgatggggggtccagcaaatatgacatcttggcctcagaggatgtagaaggtcaggaggcagccacactccccagcgaggggggtgttcggatcacaccctttaacctgcaggaggagatggaggaaggccactttgatgccgatggcaactacttcctgaaccgggatgctcagatccgagacagctggctggacaacattgactgggtgaagatccgggagcggccacctggccagcgccaggcctcagactcggaggaggaggacagcttgggccagacctcaatgagtgcccaagccctcttggagggacttttggagctcctattgcctagagagacagtggctggggcactgaggcgtctgggggcccgaggaggaggcaaagggagaaaggggcctgggcaacccagttcccctcagcgcctggaccggctctccgggttggccgaccagatggtggcccggggcaaccttggtgtgtaccaggaaacaagggaacggttggctatgcgtctgaagggtttggggtgtcagaccctaggaccccacaatcccacacccccaccctccctggacatgttcgctgaggagttggcggaggaggaactggagaccccaacccctacccagagaggagaagcagagtcgcggggagatggtctggtggatgtgatgtgggaatataagtgggagaacacgggggatgccgagctgtatgggcccttcaccagcgcccagatgcagacctgggtgagtgaaggctacttcccggacggtgtttattgccggaagctggacccccctggtggtcagttctacaactccaaacgcattgactttgacctctacacctgagcctgctgggggcccagtttggtgggcccttctttcctggactttgtggaggaggcaccaagtgtctcaggcagcgaggaaattggaggccatttttcagtcaatttccctttcccaataaaagcctttagttgtgtaaaaaaaaaaaaaaaa

SEQ ID NO: 708 - protein, 341 aa, Homo sapien
MPKRKVTFQGVGDEEDEDEIIVPKKKLVDPVAGSGGPGSRFKGKHSLDSDEEEDDDDGGSSKYDILASEDVEGQEAATLPSEGGVRITPFNLQEEMEEGHFDADGNYFLNRDAQIRDSWLDNIDWVKIRERPPGQRQASDSEEEDSLGQTSMSAQALLEGLLELLLPRETVAGALRRLGARGGGKGRKGPGQPSSPQRLDRLSGLADQMVARGNLGVYQETRERLAMRLKGLGCQTLGPHNPTPPPSLDMFAEELAEEELETPTPTQRGEAESRGDGLVDVMWEYKWENTGDAELYGPFTSAQMQTWVSEGYFPDGVYCRKLDPPGGQFYNSKRIDFDLYT

SEQ ID NO: 709 - DNA, 2881 bp, Homo sapien
acagaagtgctagaagccagtgctcgtgaactaaggagaaaaagaacagacaagggaacagcctggacatggcatcagagatccacatgacaggcccaatgtgcctcattgagaacactaatgggcgactgatggcgaatccagaagctctgaagatcctttctgccattacacagcctatggtggtggtggcaattgtgggcctctaccgcacaggcaaatcctacctgatgaacaagctggctggaaagaaaaagggcttctctctgggctccacggtgcagtctcacactaaaggaatctggatgtggtgtgtgccccaccccaagaagccaggccacatcctagttctgctggacaccgagggtctgggagatgtagagaagggtgacaaccagaatgactcctggatcttcgccctggccgtcctcctgagcagcaccttcgtgtacaatagcataggaaccatcaaccagcaggctatggaccaactgtactatgtgacagagctgacacatagaatccgatcaaaatcctcacctgatgagaatgagaatgaggttgaggattcagctgactttgtgagcttcttcccagactttgtgtggacactgagagatttctccctggacttggaagcagatggacaacccctcacaccagatgagtacctgacatactccctgaagctgaagaaaggtaccagtcaaaaagatgaaacttttaacctgcccagactctgtatccggaaattcttcccaaagaaaaaatgctttgtctttgatcggcccgttcaccgcaggaagcttgcccagctcgagaaactacaagatgaagagctggaccccgaatttgtgcaacaagtagcagacttctgttcctacatctttagtaattccaaaactaaaactctttcaggaggcatccaggtcaacgggcctcgtctagagagcctggtgctgacctacgtcaatgccatcagcagtggggatctgccgtgcatggagaacgcagtcctggccttggcccagatagagaactcagctgcagtgcaaaaggctattgcccactatgaacagcagatgggccagaaggtgcagctgcccacagaaagcctccaggagctgctggacctgcacagggacagtgagagagaggccattgaagtcttcatcaggagttccttcaaagatgtggaccatctatttcaaaaggagttagcggcccagctagaaaaaaagcgggatgacttttgtaaacagaatcaggaagcatcatcagatcgttgctcaggtttacttcaggtcattttcagtcctctagaagaagaagtgaaggcgggaatttattcgaaaccagggggctatcgtctctttgttcagaagctacaagacctgaagaaaaagtactatgaggaaccgaggaaggggatacaggctgaagagattctgcagacatacttgaaatccaaggagtctatgactgatgcaattctccagacagaccagactctcacagaaaaagaaaaggagattgaagtggaacgtgtgaaagctgagtctgcacaggcttcagcaaaaatgttgcaggaaatgcaaagaaagaatgagcagatgatggaacagaaggagaggagttatcaggaacacttgaaacaactgactgagaagatggagaacgacagggtccagttgctgaaagagcaagagaggaccctcgctcttaaacttcaggaacaggagcaactactaaaagagggatttcaaaaagaaagcagaataatgaaaaatgagatacaggatctccagacgaaaatgagacgacgaaaggcatgtaccataagctaaagaccagagccttcctgtcacccctaaccaaggcataattgaaacaattttagaatttggaacaagcgtcactacatttgataataattagatcttgcatcataacaccaaaagtttataaaggcatgtggtacaatgatcaaaatcatgttttttcttaaaaaaaaaaaaaagactgtaaattgtgcaacaaagatgcatttacctctgtatcaactcaggaaatctcataagctggtaccactcaggagaagtttattcttccagatgaccagcagtagacaaatggatactgagcagagtcttaggtaaaagtcttgggaaatatttgggcattggtctggccaagtctacaatgtcccaatatcaaggacaaccaccctagcttcttagtgaagacaatgtacagttatccattagatcaagactacacggtctatgagcaataatgtgatttctggacattgcccatgtataatcctcactgatgatttcaagctaaagcaaaccaccttatacagagatctagaatctctttatgttctccagaggaaggtggaagaaaccatgggcaggagtaggaattgagtgataaacaattgggctaatgaagaaaacttctcttattgttcagttcatccagattataacttcaatgggacactttagaccattagacaattgacactggattaaacaaattcacataatgccaaatacacaatgtatttatagcaacgtataatttgcaaagatggactttaaaagatgctgtgtaactaaactgaaataattcaattacttattatttagaatgttaaagcttatgatagtcttttctaattcttaacactcatacttgaaatctttccgagtttccccagaagagaatatgggattttttttgacatttttgacccatttaataatgctcttgtgtttacctagtatatgtagactttgtcttatgtgtcaaaagtcctaggaaagtggttgatgtttcttatagcaattaaaaattatttttgaactga

SEQ ID NO: 710 - protein, 592 aa, Homo sapien
MASEIHMTGPMCLIENTNGRLMANPEALKILSAITQPMVVVAIVGLYRTGKSYLMNKLAGKKKGFSLGSTVQSHTKGIWMWCVPHPKKPGHILVLLDTEGLGDVEKGDNQNDSWIFALAVLLSSTFVYNSIGTINQQAMDQLYYVTELTHRIRSKSSPDENENEVEDSADFVSFFPDFVWTLRDFSLDLEADGQPLTPDEYLTYSLKLKKGTSQKDETFNLPRLCIRKFFPKKKCFVFDRPVHRRKLAQLEKLQDEELDPEFVQQVADFCSYIFSNSKTKTLSGGIQVNGPRLESLVLTYVNAISSGDLPCMENAVLALAQIENSAAVQKAIAHYEQQMGQKVQLPTESLQELLDLHRDSEREAIEVFIRSSFKDVDHLFQKELAAQLEKKRDDFCKQNQEASSDRCSGLLQVIFSPLEEEVKAGIYSKPGGYRLFVQKLQDLKKKYYEEPRKGIQAEEILQTYLKSKESMTDAILQTDQTLTEKEKEIEVERVKAESAQASAKMLQEMQRKNEQMMEQKERSYQEHLKQLTEKMENDRVQLLKEQERTLALKLQEQEQLLKEGFQKESRIMKNEIQDLQTKMRRRKACTIS

SEQ ID NO: 711 - DNA, 2881 bp, Homo sapien; identical to SEQ ID NO: 709

SEQ ID NO: 712 - protein, 592 aa, Homo sapien; identical to SEQ ID NO: 710

SEQ ID NO: 713 - DNA, 509 bp, Mus musculus
attctttccccaagtctctatggtagcgtcagcgtcggaggcggtagtgacggtggcgtttccttgaggaagagtgagggttccaacttttctgcttatctgggaggtgttgggcgcggacagtcgagatgtcagagaaaaagcagccggtagacttaggtctgttagaggaagacgacgagtttgaagagttccctgccgaagactgggctggcttagatgaagatgaagatgcacatgtctgggaggataattgggatgatgacaatgtagaggatgacttctctaatcagttacgagctgaactagagaaacatggttataagatggagacttcatagcatccagaagaagtgttgaagtaacctaaacttgacctgcttaatacattctagggcagagaacccaggatgggacactaaaaaaatgtgtttatttcattatctgcttggatttatttgtgtttttgtaacacaaaaaataaatgttttgatataaaaaaaaaaaaa

SEQ ID NO: 714 - protein, 70 aa, Mus musculus
MSEKKQPVDLGLLEEDDEFEEFPAEDWAGLDEDEDAHVWEDNWDDDNVEDDFSNQLRAELEKHGYKMETS

SEQ ID NO: 715 - DNA, 2281 bp, Homo sapien
agctgaggtgtgagcagctgccgaagtcagttccttgtggagccggagctgggcgcggattcgccgaggcaccgaggcactcagaggaggtgagagagcggcggcagacaacaggggaccccgggccggcggcccagagccgagccaagcgtgcccgcgtgtgtccctgcgtgtccgcgaggatgcgtgttcgcgggtgtgtgctgcgttcacaggtgtttctgcggcaggcgccatgtcagaaccggctggggatgtccgtcagaacccatgcggcagcaaggcctgccgccgcctcttcggcccagtggacagcgagcagctgagccgcgactgtgatgcgctaatggcgggctgcatccaggaggcccgtgagcgatggaacttcgactttgtcaccgagacaccactggagggtgacttcgcctgggagcgtgtgcggggccttggcctgcccaagctctaccttcccacggggccccggcgaggccgggatgagttgggaggaggcaggcggcctggcacctcacctgctctgctgcaggggacagcagaggaagaccatgtggacctgtcactgtcttgtacccttgtgcctcgctcaggggagcaggctgaagggtccccaggtggacctggagactctcagggtcgaaaacggcggcagaccagcatgacagatttctaccactccaaacgccggctgatcttctccaagaggaagccctaatccgcccacaggaagcctgcagtcctggaagcgcgagggcctcaaaggcccgctctacatcttctgccttagtctcagtttgtgtgtcttaattattatttgtgttttaatttaaacacctcctcatgtacataccctggccgccccctgccccccagcctctggcattagaattatttaaacaaaaactaggcggttgaatgagaggttcctaagagtgctgggcatttttattttatgaaatactatttaaagcctcctcatcccgtgttctccttttcctctctcccggaggttgggtgggccggcttcatgccagctacttcctcctccccacttgtccgctgggtggtaccctctggaggggtgtggctccttcccatcgctgtcacaggcggttatgaaattcaccccctttcctggacactcagacctgaattctttttcatttgagaagtaaacagatggcactttgaaggggcctcaccgagtgggggcatcatcaaaaactttggagtcccctcacctcctctaaggttgggcagggtgaccctgaagtgagcacagcctagggctgagctggggacctggtaccctcctggctcttgatacccccctctgtcttgtgaaggcagggggaaggtggggtcctggagcagaccaccccgcctgccctcatggcccctctgacctgcactggggagcccgtctcagtgttgagccttttccctctttggctcccctgtaccttttgaggagccccagctacccttcttctccagctgggctctgcaattcccctctgctgctgtccctcccccttgtcctttcccttcagtaccctctcagctccaggtggctctgaggtgcctgtcccacccccacccccagctcaatggactggaaggggaagggacacacaagaagaagggcaccctagttctacctcaggcagctcaagcagcgaccgccccctcctctagctgtgggggtgagggtcccatgtggtggcacaggcccccttgagtggggttatctctgtgttaggggtatatgatgggggagtagatctttctaggagggagacactggcccctcaaatcgtccagcgaccttcctcatccaccccatccctccccagttcattgcactttgattagcagcggaacaaggagtcagacattttaagatggtggcagtagaggctatggacagggcatgccacgtgggctcatatggggctgggagtagttgtctttcctggcactaacgttgagcccctggaggcactgaagtgcttagtgtacttggagtattggggtctgaccccaaacaccttccagctcctgtaacatactggcctggactgttttctctcggctccccatgtgtcctggttcccgtttctccacctagactgtaaacctctcgagggcagggaccacaccctgtactgttctgtgtctttcacagctcctcccacaatgctgaatatacagcaggtgctcaataaatgattcttagtgactttaaaaaaaaaaaaaaaaaaaa

SEQ ID NO: 716 - protein, 164 aa, Homo sapien
MSEPAGDVRQNPCGSKACRRLFGPVDSEQLSRDCDALMAGCIQEARERWNFDFVTETPLEGDFAWERVRGLGLPKLYLPTGPRRGRDELGGGRRPGTSPALLQGTAEEDHVDLSLSCTLVPRSGEQAEGSPGGPGDSQGRKRRQTSMTDFYHSKRRLIFSKRKP

SEQ ID NO: 717 - DNA, 1504 bp, Homo sapien
ccacgctcgtgccgccccccccgcgctcccagttgacgctctgggccgccacctccgcggaccctgagcgcaagagccaagccgccagcgctgcgatgtgggccacgctgccgctgctctgcgccggggcctggctcctgggagtccccgtctgcggtgccgccgaactgtgcgtgaactccttagagaagtttcacttcaagtcatggatgtctaagcaccgtaagacctacagtacggaggagtaccaccacaggctgcagacgtttgccagcaactggaggaagataaacgcccacaacaatgggaaccacacatttaaaatggcactgaaccaattttcagacatgagctttgctgaaataaaacacaagtatctctggtcagagcctcagaattgctcagccaccaaaagtaactaccttcgaggtactggtccctacccaccttccgtggactggcggaaaaaaggaaattttgtctcacctgtgaaaaatcagggtgcctgcggcagttgctggactttctccaccactggggccctggagtctgcgatcgccatcgcaaccggaaagatgctgtccttggcggaacagcagctggtggactgcgcccaggacttcaataatcacggctgccaagggggtctccccagccaggctttcgagtatatcctgtacaacaaggggatcatgggtgaagacacctacccctaccagggcaaggatggttattgcaagttccaacctggaaaggccatcggctttgtcaaggatgtagccaacatcacaatctatgacgaggaagcgatggtggaggctgtggccctctacaaccctgtgagctttgcctttgaggtgactcaggacttcatgatgtatagaacgggcatctactccagtacttcctgccataaaactccagataaagtaaaccatgcagtactggctgttgggtatggagaaaaaaatgggatcccttactggatcgtgaaaaactcttggggtccccagtggggaatgaacgggtacttcctcatcgagcgcggaaagaacatgtgtggcctggctgcctgcgcctcctaccccatccctctggtgtgagccgtggcagccgcagcgcagactggcggagaaggagaggaacgggcagcctgggcctgggtggaaatcctgccctggaggaagttgtggggagatccactgggacccccaacattctgccctcacctctgtgcccagcctggaaacctacagacaaggaggagttccaccatgagctcacccgtgtctatgacgcaaagatcaccagccatgtgccttagtgtccttcttaacagactcaaaccacatggaccacgaatattctttctgtccagaagggctactttccacatatagagctccagggactgtcttttctgtattcgctgttcaataaacattgagtgagcacctccccagatggaaaaaaaaaaaaaaaaaaaaaaaaaaaaaaaaaaaaa

SEQ ID NO: 718 - protein, 335 aa, Homo sapien
MWATLPLLCAGAWLLGVPVCGAAELSVNSLEKFHFKSWMSKHRKTYSTEEYHHRLQTFASNWRKINAHNNGNHTFKMALNQFSDMSFAEIKHKYLWSEPQNCSATKSNYLRGTGPYPPSVDWRKKGNFVSPVKNQGACGSCWTFSTTGALESAIAIATGKMLSLAEQQLVDCAQDFNNYGCQGGLPSQAFEYILYNKGIMGEDTYPYQGKDGYCKFQPGKAIGFVKDVANITIYDEEAMVEAVALYNPVSFAFEVTQDFMMYRTGIYSSTSCHKTPDKVNHAVLAVGYGEKNGIPYWIVKNSWGPQWGMNGYFLIERGKNMCGLAACASYPIPLV

SEQ ID NO: 719 - DNA, 3866 bp, Homo sapien
gcgagtgttgaaagtcggtggcgtaggtcgtcgtcctggatgctggcgagatagatgttatcttccagaggaagaggaggaggcggcgaagcgttttcccagcctcagtctctctttcgttttccttttcccttcccccaaccctccgcccttctctaaatcagccggccttccttgacctcagtgacccgtctggccccgcccaccctcgtcgacgtgattcccgccgtgaggtaagcgccggtggaacctagagccccgcggaagagcagaacgtttgggagtgtgcagctcctgggcccggctcaggcccgtcgcggaggcgcggcgcaggggagcgctcgggtgggagtctcgctcctccaccagtttattgcgacgtagcatccaggcctaggcctccccgtccatccccgccggactcgggcctctggcagcagcgggtgacgcagacggaacatcatgtcgtccgcggccgagcctccgccacccccgcctcccgagagcgcgccttccaagcccgcagcctcgatcgccagcggcgggagcaacagcagcaacaaaggcggccccgaaggcgtcgcggcgcaggcggttgcgtctgcggtcagcgctggtcccgcagacgccgagatggaggaaatatttgatgatgcgtcacctggaaagcaaaaggaaatccaagaaccagatcctacctatgaagaaaaaatgcaaactgaccgggcaaatagattcgagtatttattaaagcagacagaactttttgcacatttcattcaacctgctgctcagaagactccaacttcacctttgaagatgaaaccagggcgcccacgaataaaaaaagatgagaagcagaacttactatccgttggcgattaccgacaccgtagaacagagcaagaggaggatgaagagctattaacagaaagctccaaagcaaccaatgtttgcactcgatttgaagactctccatcgtatgtaaaatggggtaaactgagagattatcaggtccgaggattaaactggctcatttctttgtatgagaatggcatcaatggtatccttgcagatgaaatgggcctaggaaagactcttcaaacaatttctcttcttgggtacatgaaacattatagaaacattcctgggcctcatatggttttggttcctaagtctacattacacaactggatgagtgaattcaagagatgggtaccaacacttagatctgtttgtttgataggagataaagaacaaagagctgcttttgtcagagacgttttattaccgggagaatgggatgtatgtgtaacatcttatgaaatgcttattaaagagaagtctgtgttcaaaaaatttaattggagatacttagtaatagatgaagctcacaggatcaaaaatgaaaaatctaagttgtcagaaatagtgagggaattcaagactacaaatagactattattaactggaacacctcttcagaacaacttgcatgagctgtggtcacttcttaactttctgttgccagatgtgtttaattcagcagatgactttgattcctggtttgatacaaacaactgccttggggatcaaaaactagttgagaggcttcatatggttttgcgtccattcctccttcgtcgaattaaggctgatgttgaaaagagtttgcctccaaagaaggaagtaaaaatctatgtgggcctcagcaaaatgcaaagggaatggtatactcggatattaatgaaggatatagatatactcaactcagcaggcaagatggacaaaatgaggttattgaacatcctaatgcagttgagaaaatgttgtaatcatccatatctctttgatggagcagaacctggtccaccttatacaacagatatgcatctagtaaccaacagtggcaaaatggtggttttagacaagctgctccctaagttaaaagaacaaggttcacgagtactaatcttcagtcaaatgacaagggtattggacattttggaagattattgcatgtggagaaattatgagtactgcaggttggatggtcagacaccccatgatgagagacaagactccatcaatgcatacaatgaaccaaacagcacaaagtttgttttcatgttaagcacgcgtgctggtggtcttggcatcaatcttgcgactgctgatgtagtaattttgtatgattctgattggaatccccaagtagatcttcaggctatggaccgagcacatagaattgggcagactaagacagtcagagtgttccgctttataactgataacactgtagaagaaagaatagtagaacgtgctgagatgaaactcagactggattcaatagtcattcaacaagggaggcttgtggatcagaatctgaacaaaattgggaaagatgaaatgcttcaaatgattagacatggagcaacacatgtgtttgcttcaaaggaaagtgagatcactgatgaagatatcgatggtattttggaaagaggtgcaaagaagactgcagagatgaatgaaaagctctccaagatgggcgaaagttcacttagaaactttacaatggatacagagtcaagtgtttataacttcgaaggagaagactatagagaaaaacaaaagattgcattcacagagtggattgaaccacctaaacgagaaagaaaagccaactatgccgttgatgcatatttcagggaagctcttcgtgttagtgaacctaaagcacccaaggctcctcgacctccaaaacaacccaatgttcaggatttccagttctttcctccacgtttatttgaattactggaaaaagaaattctgttttacagaaaaactattgggtacaaggtacctcgaaatcctgagctgcctaacgcagcacaggcacaaaaagaagaacagcttaaaattgatgaagctgaatcccttaatgatgaagagttagaggaaaaagagaagcttctaacacagggatttaccaattggaataagagagattttaaccagtttatcaaagctaatgagaagtggggtcgtgatgatattgaaaatatagcaagagaagtagaaggcaaaactccagaagaagtcattgaatattcagctgtgttttgggaaaggtgcaacgagctccaggacatagagaagattatggctcagattgaaaggggagaggcgagaattcaaagaagaataagcatcaagaaagcacttgacacaaagattggacggtacaaagcaccttttcatcagctgagaatatcatatggtactaacaaaggaaaaaactatactgaagaagaagatcgttttctgatttgtatgcttcacaaacttggatttgacaaagaaaatgtttatgatgaattgcgacagtgtattcgcaactctcctcagttcagatttgactggtttcttaagtccagaactgcaatggagctccagaggagatgtaataccttaattactttgattgaaagagaaaacatggaactagaagaaaaggagaaggcagagaaaaagaaacgaggaccaaagccttcaacacagaaacgtaaaatggatggcgcacctgatggtcgaggaagaaaaaagaagctgaaactatgaatatgtttttgtttcataatcactaactttaaaccagtagttctttaatttacgggtcttcataagatgtactgtacaatgctcaattgttatgtcatttaaagacatcaggttcatctgtttactgagctagaaacatagtatgtagtttcacttttttaaatgcaacagctgtgctgaaatttttttatcattaacacttgaagtaataaaataggcttcatttattaaaaaaaaaaaaaaaa

SEQ ID NO: 720 - protein, 1052 aa, Homo sapien
MSSAAEPPPPPPPESAPSKPAASIASGGSNSSNKGGPEGVAAQAVASAVSAGPADAEMEEIFDDASPGKQKEIQEPDPTYEEKMQTDRANRFEYLLKQTELFAHFIQPAAQKTPTSPLKMKPGRPRIKKDEKQNLLSVGDYRHRRTEQEEDEELLTESSKATNVCTRFEDSPSYVKWGKLRDYQVRGLNWLISLYENGINGILADEMGLGKTLQTISLLGYMKHYRNIPGPHMVLVPKSTLHNWMSEFKRWVPTLRSVCLIGDKEQRAAFVRDVLLPGEWDVCVTSYEMLIKEKSVFKKFNWRYLVIDEAHRIKNEKSKLSEIVREFKTTNRLLLTGTPLQNNLHELWSLLNFLLPDVFNSADDFDSWFDTNNCLGDQKLVERLHMVLRPFLLRRIKADVEKSLPPKKEVKIYVGLSKMQREWYTRILMKDIDILNSAGKMDKMRLLNILMQLRKCCNHPYLFDGAEPGPPYTTDMHLVTNSGKMVVLDKLLPKLKEQGSRVLIFSQMTRVLDILEDYCMWRNYEYCRLDGQTPHDERQDSINAYNEPNSTKFVFMLSTRAGGLGINLATADVVILYDSDWNPQVDLQAMDRAHRIGQTKTVRVFRFITDNTVEERIVERAEMKLRLDSIVIQQGRLVDQNLNKIGKDEMLQMIRHGATHVFASKESEITDEDIDGILERGAKKTAEMNEKLSKMGESSLRNFTMDTESSVYNFEGEDYREKQKIAFTEWIEPPKRERKANYAVDAYFREALRVSEPKAPKAPRPPKQPNVQDFQFFPPRLFELLEKEILFYRKTIGYKVPRNPELPNAAQAQKEEQLKIDEAESLNDEELEEKEKLLTQGFTNWNKRDFNQFIKANEKWGRDDIENIAREVEGKTPEEVIEYSAVFWERCNELQDIEKIMAQIERGEARIQRRISIKKALDTKIGRYKAPFHQLRISYGTNKGKNYTEEEDRFLICMLHKLGFDKENVYDELRQCIRNSPQFRFDWFLKSRTAMELQRRCNTLITLIERENMELEEKEKAEKKKRGPKPSTQKRKMDGAPDGRGRKKKLKL

SEQ ID NO: 721 - DNA, 2958 bp, Homo sapien
ggcacgagggtgtgcgtgatggagaaaattgggcaccagggctgctcccgagattctcagatctgatttccacgcttgctaccaaaatagtctgggcaggccacttttggaagtaggcgttatctagtgagcaggcggccgctttcgatttcgctttcccctaaatggctgagcttctcgccagcgcaggatcagcctgttcctgggactttccgagagccccgccctcgttccctcccccagccgccagtaggggaggactcggcggtacccggagcttcaggccccaccggggcgcggagagtcccagacccggccgggaccgggacggcgtccgagtgccaatggctagctctaggtgtcccgctccccgcgggtgccgctgcctccccggagcttctctcgcatggctggggacagtactgctacttctcgccgactgggtgctgctccggaccgcgctgccccgcatattctccctgctggtgcccaccgcgctgccactgctccgggtctgggcggtgggcctgagccgctgggccgtgctctggctgggggcctgcggggtcctcagggcaacggttggctccaagagcgaaaacgcaggtgcccagggctggctggctgctttgaagccattagctgcggcactgggcttggccctgccgggacttgccttgttccgagagctgatctcatggggagcccccgggtccgcggatagcaccaggctactgcactggggaagtcaccctaccgccttcgttgtcagttatgcagcggcactgcccgcagcagccctgtggcacaaactcgggagcctctgggtgcccggcggtcagggcggctctggaaaccctgtgcgtcggcttctaggctgcctgggctcggagacgcgccgcctctcgctgttcctggtcctggtggtcctctcctctcttggggagatggccattccattctttacgggccgcctcactgactggattctacaagatggctcagccgataccttcactcgaaacttaactctcatgtccattctcaccatagccagtgcagtgctggagttcgtgggtgacgggatctataacaacaccatgggccacgtgcacagccacttgcagggagaggtgtttggggctgtcctgcgccaggagacggagtttttccaacagaaccagacaggtaacatcatgtctcgggtaacagaggacacgtccaccctgagtgattctctgagtgagaatctgagcttatttctgtggtacctggtgcgaggcctatgtctcttggggatcatgctctggggatcagtgtccctcaccatggtcaccctgatcaccctgcctctgcttttccttctgcccaagaaggtgggaaaatggtaccagttgctggaagtgcaggtgcgggaatctctggcaaagtccagccaggtggccattgaggctctgtcggccatgcctacagttcgaagctttgccaacgaggagggcgaagcccagaagtttagggaaaagctgcaagaaataaagacactcaaccagaaggaggctgtggcctatgcagtcaactcctggaccactagtatttcaggtatgctgctgaaagtgggaatcctctacattggtgggcagctggtgaccagtggggctgtaagcagtgggaaccttgtcacatttgttctctaccagatgcagttcacccaggctgtggaggtactgctctccatctaccccagagtacagaaggctgtgggctcctcagagaaaatatttgagtacctggaccgcacccctcgctgcccacccagtggtctgttgactcccttacacttggagggccttgtccagttccaagatgtctcctttgcctacccaaaccgcccagatgtcttagtgctacaggggctgacattcaccctacgccctggcgaggtgacggcgctggtgggacccaatgggtctgggaagagcacagtggctgccctgctgcagaatctgtaccagcccaccgggggacagctgctgttggatgggaagccccttccccaatatgagcaccgctacctgcacaggcaggtggctgcagtgggacaagagccacaggtatttggaagaagtcttcaagaaaatattgcctatggcctgacccagaagccaactatggaggaaatcacagctgctgcagtaaagtctggggcccatagtttcatctctggactccctcagggctatgacacagaggtagacgaggctgggagccagctgtcagggggtcagcgacaggcagtggcgttggcccgagcattgatccggaaaccgtgtgtacttatcctggatgatgccaccagtgccctggatgcaaacagccagttacaggtggagcagctcctgtacgaaagccctgagcggtactcccgctcagtgcttctcatcacccagcacctcagcctggtggagcaggctgaccacatcctctttctggaaggaggcgctatccgggaggggggaacccaccagcagctcatggagaaaaaggggtgctactgggccatggtgcaggctcctgcagatgctccagaatgaaagccttctcagacctgcgcactccatctccctcccttttcttctctctgtggtggagaaccacagctgcagagtagcagctgcctccaggatgagttacttgaaatttgccttgagtgtgttacctcctttccaagctcctcgtgataatgcagacttcctggagtacaaacacaggatttgtaattcctactgtaacggagtttagagccagggctgatgctttggtgtggccagcactctgaaactgagaaatgttcagaatgtacggaaagatgatcagctattttcaacataactgaaggcatatgctggcccataaacaccctgtaggttcttgatatttataataaaattggtgttttgt

SEQ ID NO: 722 - protein, 808 aa, Homo sapien
MAELLASAGSACSWDFPRAPPSFPPPAASRGGLGGTRSFRPHRGAESPRPGRDRDGVRVPMASSRCPAPRGCRCLPGASLAWLGTVLLLLADWVLLRTALPRIFSLLVPTALPLLRVWAVGLSRWAVLWLGACGVLRATVGSKSENAGAQGWLAALKPLAAALGLALPGLALFRELISWGAPGSADSTRLLHWGSHPTAFVVSYAAALPAAALWHKLGSLWVPGGQGGSGNPVRRLLGCLGSETRRLSLFLVLVVLSSLGEMAIPFFTGRLTDWILQDGSADTFTRNLTLMSILTIASAVLEFVGDGIYNNTMGHVHSHLQGEVFGAVLRQETEFFQQNQTGNIMSRVTEDTSTLSDSLSENLSLFLWYLVRGLCLLGIMLWGSVSLTMVTLITLPLLFLLPKKVGKWYQLLEVQVRESLAKSSQVAIEALSAMPTVRSFANEEGEAQKFREKLQEIKTLNQKEAVAYAVNSWTTSISGMLLKVGILYIGGQLVTSGAVSSGNLVTFVLYQMQFTQAVEVLLSIYPRVQKAVGSSEKIFEYLDRTPRCPPSGLLTPLHLEGLVQFQDVSFAYPNRPDVLVLQGLTFTLRPGEVTALVGPNGSGKSTVAALLQNLYQPTGGQLLLDGKPLPQYEHRYLHRQVAAVGQEPQVFGRSLQENIAYGLTQKPTMEEITAAAVKSGAHSFISGLPQGYDTEVDEAGSQLSGGQRQAVALARALIRKPCVLILDDATSALDANSQLQVEQLLYESPERYSRSVLLITQHLSLVEQADHILFLEGGAIREGGTHQQLMEKKGCYWAMVQAPADAPE

SEQ ID NO: 723 - DNA, 4154 bp, Homo sapien
taacgaggaacttttcgccggcgccgggccgcctctgaggccagggcaggacacgaacgcgcggagcggcggcggcgactgagagccggggccgcggcggcgctccctaggaagggccgtacgaggcggcgggcccggcgggcctcccggaggaggcggctgcgccatggacgagccacccttcagcgaggcggctttggagcaggcgctgggcgagccgtgcgatctggacgcggcgctgctgaccgacatcgaagacatgcttcagcttatcaacaaccaagacagtgacttccctggcctatttgacccaccctatgctgggagtggggcagggggcacagaccctgccagccccgataccagctccccaggcagcttgtctccacctcctgccacattgagctcctctcttgaagccttcctgagcgggccgcaggcagcgccctcacccctgtcccctccccagcctgcacccactccattgaagatgtacccgtccatgcccgctttctcccctgggcctggtatcaaggaagagtcagtgccactgagcatcctgcagacccccaccccacagcccctgccaggggccctcctgccacagagcttcccagccccagccccaccgcagttcagctccacccctgtgttaggctaccccagccctccgggaggcttctctacaggaagccctcccgggaacacccagcagccgctgcctggcctgccactggcttccccgccaggggtcccgcccgtctccttgcacacccaggtccagagtgtggtcccccagcagctactgacagtcacagctgcccccacggcagcccctgtaacgaccactgtgacctcgcagatccagcaggtcccggtcctgctgcagccccacttcatcaaggcagactcgctgcttctgacagccatgaagacagacggagccactgtgaaggcggcaggtctcagtcccctggtctctggcaccactgtgcagacagggcctttgccgaccctggtgagtggcggaaccatcttggcaacagtcccactggtcgtagatgcggagaagctgcctatcaaccggctcgcagctggcagcaaggccccggcctctgcccagagccgtggagagaagcgcacagcccacaacgccattgagaagcgctaccgctcctccatcaatgacaaaatcattgagctcaaggatctggtggtgggcactgaggcaaagctgaataaatctgctgtcttgcgcaaggccatcgactacattcgctttctgcaacacagcaaccagaaactcaagcaggagaacctaagtctgcgcactgctgtccacaaaagcaaatctctgaaggatctggtgtcggcctgtggcagtggagggaacacagacgtgctcatggagggcgtgaagactgaggtggaggacacactgaccccacccccctcggatgctggctcacctttccagagcagccccttgtcccttggcagcaggggcagtggcagcggtggcagtggcagtgactcggagcctgacagcccagtctttgaggacagcaaggcaaagccagagcagcggccgtctctgcacagccggggcatgctggaccgctcccgcctggccctgtgcacgctcgtcttcctctgcctgtcctgcaaccccttggcctccttgctgggggcccgggggcttcccagcccctcagataccaccagcgtctaccatagccctgggcgcaacgtgctgggcaccgagagcagagatggccctggctgggcccagtggctgctgcccccagtggtctggctgctcaatgggctgttggtgctcgtctccttggtgcttctctttgtctacggtgagccagtcacacggccccactcaggccccgccgtgtacttctggaggcatcgcaagcaggctgacctggacctggcccggggagactttgcccaggctgcccagcagctgtggctggccctgcgggcactgggccggcccctgcccacctcccacctggacctggcttgtagcctcctctggaacctcatccgtcacctgctgcagcgtctctgggtgggccgctggctggcaggccgggcagggggcctgcagcaggactgtgctctgcgagtggatgctagcgccagcgcccgagacgcagccctggtctaccataagctgcaccagctgcacaccatggggaagcacacaggcgggcacctcactgccaccaacctggcgctgagtgccctgaacctggcagagtgtgcaggggatgccgtgtctgtggcgacgctggccgagatctatgtggcggctgcattgagagtgaagaccagtctcccacgggccttgcattttctgacacgcttcttcctgagcagtgcccgccaggcctgcctggcacagagtggctcagtgcctcctgccatgcagtggctctgccaccccgtgggccaccgtttcttcgtggatggggactggtccgtgctcagtaccccatgggagagcctgtacagcttggccgggaacccagtggaccccctggcccaggtgactcagctattccgggaacatctcttagagcgagcactgaactgtgtgacccagcccaaccccagccctgggtcagctgatggggacaaggaattctcggatgccctcgggtacctgcagctgctgaacagctgttctgatgctgcgggggctcctgcctacagcttctccatcagttccagcatggccaccaccaccggcgtagacccggtggccaagtggtgggcctctctgacagctgtggtgatccactggctgcggcgggatgaggaggcggctgagcggctgtgcccgctggtggagcacctgccccgggtgctgcaggagtctgagagacccctgcccagggcagctctgcactccttcaaggctgcccgggccctgctgggctgtgccaaggcagagtctggtccagccagcctgaccatctgtgagaaggccagtgggtacctgcaggacagcctggctaccacaccagccagcagctccattgacaaggccgtgcagctgttcctgtgtgacctgcttcttgtggtgcgcaccagcctgtggcggcagcagcagcccccggccccggccccagcagcccagggcaccagcagcaggccccaggcttccgcccttgagctgcgtggcttccaacgggacctgagcagcctgaggcggctggcacagagcttccggcccgccatgcggagggtgttcctacatgaggccacggcccggctgatggcgggggccagccccacacggacacaccagctcctcgaccgcagtctgaggcggcgggcaggccccggtggcaaaggaggcgcggtggcggagctggagccgcggcccacgcggcgggagcacgcggaggccttgctgctggcctcctgctacctgccccccggcttcctgtcggcgcccgggcagcgcgtgggcatgctggctgaggcggcgcgcacactcgagaagcttggcgatcgccggctgctgcacgactgtcagcagatgctcatgcgcctgggcggtgggaccactgtcacttccagctagaccccgtgtccccggcctcagcacccctgtctctagccactttggtcccgtgcagcttctgtcctgcgtcgaagctttgaaggccgaaggcagtgcaagagactctggcctccacagttcgacctgcggctgctgtgtgccttcgcggtggaaggcccgaggggcgcgatcttgaccctaagaccggcggccatgatggtgctgacctctggtggccgatcggggcactgcaggggccgagccattttggggggcccccctccttgctctgcaggcaccttagtggcttttttcctcctgtgtacagggaagagaggggtacatttccctgtgctgacggaagccaacttggctttcccggactgcaagcagggctctgccccagaggcctctctctccgtcgtgggagagagacgtgtacatagtgtaggtcagcgtgcttagcctcctgacctgaggctcctgtgctactttgccttttgcaaactttattttcatagattgagaagttttgtacagagaattaaaaatgaaattatttata

SEQ ID NO: 724 - protein, 1147 aa, Homo sapien
MDEPPFSEAALEQALGEPCDLDAALLTDIEDMLQLINNQDSDFPGLFDPPYAGSGAGGTDPASPDTSSPGSLSPPPATLSSSLEAFLSGPQAAPSPLSPPQPAPTPLKMYPSMPAFSPGPGIKEESVPLSILQTPTPQPLPGALLPQSFPAPAPPQFSSTPVLGYPSPPGGFSTGSPPGNTQQPLPGLPLASPPGVPPVSLHTQVQSVVPQQLLTVTAAPTAAPVTTTVTSQIQQVPVLLQPHFIKADSLLLTAMKTDGATVKAAGLSPLVSGTTVQTGPLPTLVSGGTILATVPLVVDAEKLPINRLAAGSKAPASAQSRGEKRTAHNAIEKRYRSSINDKIIELKDLVVGTEAKLNKSAVLRKAIDYIRFLQHSNQKLKQENLSLRTAVHKSKSLKDLVSACGSGGNTDVLMEGVKTEVEDTLTPPPSDAGSPFQSSPLSLGSRGSGSGGSGSDSEPDSPVFEDSKAKPEQRPSLHSRGMLDRSRLALCTLVFLCLSCNPLASLLGARGLPSPSDTTSVYHSPGRNVLGTESRDGPGWAQWLLPPVVWLLNGLLVLVSLVLLFVYGEPVTRPHSGPAVYFWRHRKQADLDLARGDFAQAAQQLWLALRALGRPLPTSHLDLACSLLWNLIRHLLQRLWVGRWLAGRAGGLQQDCALRVDASASARDAALVYHKLHQLHTMGKHTGGHLTATNLALSALNLAECAGDAVSVATLAEIYVAAALRVKTSLPRALHFLTRFFLSSARQACLAQSGSVPPAMQWLCHPVGHRFFVDGDWSVLSTPWESLYSLAGNPVDPLAQVTQLFREHLLERALNCVTQPNPSPGSADGDKEFSDALGYLQLLNSCSDAAGAPAYSFSISSSMATTTGVDPVAKWWASLTAVVIHWLRRDEEAAERLCPLVEHLPRVLQESERPLPRAALHSFKAARALLGCAKAESGPASLTICEKASGYLQDSLATTPASSSIDKAVQLFLCDLLLVVRTSLWRQQQPPAPAPAAQGTSSRPQASALELRGFQRDLSSLRRLAQSFRPAMRRVFLHEATARLMAGASPTRTHQLLDRSLRRRAGPGGKGGAVAELEPRPTRREHAEALLLASCYLPPGFLSAPGQRVGMLAEAARTLEKLGDRRLLHDCQQMLMRLGGGTTVTSS

SEQ ID NO: 725 - DNA, 3110 bp, Homo sapien
gtggaacctcgatattggtggtgtccatcgtgggcagcggactaataaaggccatggcgccagcagaaatcctgaacgggaaggagatctccgcgcaaataagggcgagactgaaaaatcaagtcactcagttgaaggagcaagtacctggtttcacaccacgcctggcaatattacaggttggcaacagagatgattccaatctttatataaatgtgaagctgaaggctgctgaagagattgggatcaaagccactcacattaagttaccaagaacaaccacagaatctgaggtgatgaagtacattacatctttgaatgaagactctactgtacatgggttcttagtgcagctacctttagattcagagaattccattaacactgaagaagtgatcaatgctattgcacccgagaaggatgtggatggattgactagcatcaatgctgggagacttgctagaggtgacctcaatgactgtttcattccttgtacgcctaagggatgcttggaactcatcaaagagacaggggtgccgattgccggaaggcatgctgtggtggttgggcgcagtaaaatagttggggccccgatgcatgacttgcttctgtggaacaatgccacagtgaccacctgccactccaagactgcccatctggatgaggaggtaaataaaggtgacatcctggtggttgcaactggtcagcctgaaatggttaaaggggagtggatcaaacctggggcaatagtcatcgactgtggaatcaattatgtcccagatgataaaaaaccaaatgggagaaaagttgtgggtgatgtggcatacgacgaggccaaagagagggcgagcttcatcactcctgttcctggcggcgtagggcccatgacagttgcaatgctcatgcagagcacagtagagagtgccaagcgtttcctggagaaatttaagccaggaaagtggatgattcagtataacaaccttaacctcaagacacctgttccaagtgacattgatatatcacgatcttgtaaaccgaagcccattggtaagctggctcgagaaattggtctgctgtctgaagaggtagaattatatggtgaaacaaaggccaaagttctgctgtcagcactagaacgcctgaagcaccggcctgatgggaaatacgtggtggtgactggaataactccaacacccctgggagaagggaaaagcacaactacaatcgggctagtgcaagcccttggtgcccatctctaccagaatgtctttgcgtgtgtgcgacagccttctcagggccccacctttggaataaaaggtggcgctgcaggaggcggctactcccaggtcattcctatggaagagtttaatctccacctcacaggtgacatccatgccatcactgcagctaataacctcgttgctgcggccattgatgctcggatatttcatgaactgacccagacagacaaggctctctttaatcgtttggtgccatcagtaaatggagtgagaaggttctctgacatccaaatccgaaggttaaagagactaggcattgaaaagactgaccctaccacactgacagatgaagagataaacagatttgcaagattggacattgatccagaaaccataacttggcaaagagtgttggataccaatgatagattcctgaggaagatcacgattggacaggctccaacggagaagggtcacacacggacggcccagtttgatatctctgtggccagtgaaattatggctgtcctggctctcaccacttctctagaagacatgagagagagactgggcaaaatggtggtggcatccagtaagaaaggagagcccgtcagtgccgaagatctgggggtgagtggtgcactgacagtgcttatgaaggacgcaatcaagcccaatctcatgcagacactggagggcactccagtgtttgtccatgctggcccgtttgccaacatcgcacatggcaattcctccatcattgcagaccagatcgcactcaagcttgttggcccagaagggtttgtagtgacggaagcaggatttggagcagacattggaatggaaaagttttttaacatcaaatgccggtattccggcctctgcccccacgtggtggtgcttgttgccactgtcagggctctcaagatgcacgggggcggccccacggtcactgctggactgcctcttcccaaggcttacatacaggagaacctggagctggttgaaaaaggcttcagtaacttgaagaaacaaattgaaaatgccagaatgtttggaattccagtagtagtggccgtgaatgcattcaagacggatacagagtctgagctggacctcatcagccgcctttccagagaacatggggcttttgatgccgtgaagtgcactcactgggcagaagggggcaagggtgccttagccctggctcaggccgtccagagagcagcacaagcacccagcagcttccagctcctttatgacctcaagctcccagttgaggataaaatcaggatcattgcacagaagatctatggagcagatgacattgaattacttcccgaagctcaacacaaagctgaagtctacacgaagcagggctttgggaatctccccatctgcatggctaaaacacacttgtctttgtctcacaacccagagcaaaaaggtgtccctacaggcttcattctgcccattcgcgacatccgcgccagcgttggggctggttttctgtaccccttagtaggaacgatgagcacaatgcctggactccccacccggccctgtttttatgatattgatttggaccctgaaacagaacaggtgaatggattattctaaacagatcaccatccatcttcaagaagctactttgaaagtctggccagtgtctattcaggcccactgggagttaggaagtataagtaagccaagagaagtcagcccctgcccagaagatctgaaactaatagtaggagtttccccagaagtcattttcagccttaattctcatcatgtataaattaacataaatcatgcatgtctgtttactttagtgacgttccacagaataaaaggaaacaagtttgc

SEQ ID NO: 726 - protein, 935 aa, Homo sapien
MAPAEILNGKEISAQIRARLKNQVTQLKEQVPGFTPRLAILQVGNRDDSNLYINVKLKAAEEIGIKATHIKLPRTTTESEVMKYITSLNEDSTVHGFLVQLPLDSENSINTEEVINAIAPEKDVDGLTSINAGRLARGDLNDCFIPCTPKGCLELIKETGVPIAGRHAVVVGRSKIVGAPMHDLLLWNNATVTTCHSKTAHLDEEVNKGDILVVATGQPEMVKGEWIKPGAIVIDCGINYVPDDKKPNGRKVVGDVAYDEAKERASFITPVPGGVGPMTVAMLMQSTVESAKRFLEKFKPGKWMIQYNNLNLKTPVPSDIDISRSCKPKPIGKLAREIGLLSEEVELYGETKAKVLLSALERLKHRPDGKYVVVTGITPTPLGEGKSTTTIGLVQALGAHLYQNVFACVRQPSQGPTFGIKGGAAGGGYSQVIPMEEFNLHLTGDIHAITAANNLVAAAIDARIFHELTQTDKALFNRLVPSVNGVRRFSDIQIRRLKRLGIEKTDPTTLTDEEINRFARLDIDPETITWQRVLDTNDRFLRKITIGQAPTEKGHTRTAQFDISVASEIMAVLALTTSLEDMRERLGKMVVASSKKGEPVSAEDLGVSGALTVLMKDAIKPNLMQTLEGTPVFVHAGPFANIAHGNSSIIADQIALKLVGPEGFVVTEAGFGADIGMEKFFNIKCRYSGLCPHVVVLVATVRALKMHGGGPTVTAGLPLPKAYIQENLELVEKGFSNLKKQIENARMFGIPVVVAVNAFKTDTESELDLISRLSREHGAFDAVKCTHWAEGGKGALALAQAVQRAAQAPSSFQLLYDLKLPVEDKIRIIAQKIYGADDIELLPEAQHKAEVYTKQGFGNLPICMAKTHLSLSHNPEQKGVPTGFILPIRDIRASVGAGFLYPLVGTMSTMPGLPTRPCFYDIDLDPETEQVNGLF

SEQ ID NO: 727 - DNA, 2131 bp, Homo sapien
ccgccgccatccgccctctctacccccccatccccaggtgaggggggtgagttcaggaagcggagaccccgaggaacccagcagggtcaccatttgcagcgcaacatggcaggagctggaggagggaatgatattcagtggtgtttttctcaggtgaaaggagcagtagatgatgatgtagcagaagcagatataatttctacagtagaatttaatcattctggagaattactagcaacaggagataaaggtggtagagttgtcatctttcaacaggagcaggagaacaaaatccagtctcatagcagaggagaatataatgtttacagcaccttccagagccatgaaccagagtttgactacttgaaaagtttagaaatagaagaaaagatcaataaaattaggtggttaccccagaaaaatgctgctcagtttttattgtctaccaatgataaaacaataaaattatggaaaatcagtgaaagggacaaaagaccagaagggtataacttgaaagaggaggatggaaggtatagagatcctactacagttactacactacgagtgccagtctttaggcctatggatctaatggttgaggccagtccacgaagaatatttgccaatgctcatacatatcacatcaactcaatttctattaatagtgattatgaaacatatttatctgcagatgatttgcggattaatctttggcatctggaaattacagacaggagttttaacattgtggatatcaagcctgccaatatggaagagctaacagaggtgattacagcagcagaatttcatccaaacagctgtaacacatttgtatacagcagcagtaaaggaactattcggctatgtgacatgagggcatctgccctctgtgatagacattctaaattgtttgaagaacctgaagatcccagtaacaggtcatttttttccgaaatcatctcctctatttcggatgtaaaattcagccatagtggtcgatatatgatgactagagactatttgtcagtcaaaatttgggacttaaatatggaaaacaggcctgtggaaacataccaggtgcatgaatacctcagaagtaaactctgttcactgtatgaaaatgactgcatatttgacaaatttgaatgttgttggaatggatctgacagtgttgtcatgactggatcttacaataatttcttcagaatgtttgacagaaacacaaagcgagacataaccctagaagcatcgcgggaaaacaataagcctcgcacagttctgaagcctcgcaaagtctgtgcaagtggcaagcgaaagaaagatgaaataagtgttgacagcctagacttcaataagaaaatccttcacacagcctggcaccccaaggaaaatatcattgccgtagctactacaaacaatctgtatatatttcaagacaaagtgaattagggttggcattcctagcagaagaacccacttcctgcttagttgagatagttgaatctagcattcgttcctataaaagagagaggtccattgtggcgcccctttccagtgtttgacagtgtgccattcgacaacacattgttatagctacatggagaaagctctgtggattcatcactgtggtgttctccatgtctgctagccatttaggtaagggtagggcacttttaatttaaatgacttcttgcaccatcttgcctaatggactagattggactgtatcaacattgatttactccactttttatgccttccattgtgatgacgtcaaacacagtgaaagccttcagtcatgctatgggatttaattgtgtatcctcattactgtatcatttgtggggtacaccccttccccctttttttaaattaaatacagctcattcttactgtggcttgtagcattcctcctcttctggcctcctggactgctccccttcatctcttacccttgccccctccacccggtcttggtggtggtatattaaaaaaagaaagaatgaaagcacacaaaatgagtcagtttggggtcagtggtataaagggggtatatgttgcaaacaaatgttttagtaacagttggctgtaatcactcctcgccgtgtctggcactgaaaataaggaaaag

SEQ ID NO: 728 - protein, 447 aa, Homo sapien
MAGAGGGNDIQWCFSQVKGAVDDDVAEADIISTVEFNHSGELLATGDKGGRVVIFQQEQENKIQSHSRGEYNVYSTFQSHEPEFDYLKSLEIEEKINKIRWLPQKNAAQFLLSTNDKTIKLWKISERDKRPEGYNLKEEDGRYRDPTTVTTLRVPVFRPMDLMVEASPRRIFANAHTYHINSISINSDYETYLSADDLRINLWHLEITDRSFNIVDIKPANMEELTEVITAAEFHPNSCNTFVYSSSKGTIRLCDMRASALCDRHSKLFEEPEDPSNRSFFSEIISSISDVKFSHSGRYMMTRDYLSVKIWDLNMENRPVETYQVHEYLRSKLCSLYENDCIFDKFECCWNGSDSVVMTGSYNNFFRMFDRNTKRDITLEASRENNKPRTVLKPRKVCASGKRKKDEISVDSLDFNKKILHTAWHPKENIIAVATTNNLYIFQDKVN

SEQ ID NO: 729 - DNA, 3381 bp, Homo sapien
cgcgattctcagggattgatccgcctcttcaggtaagttatcttccggccccgtaccactgtgccacaggcgcagcccgcttcctcaggtgccctatcccgcgcagaagaccacggcttcacagagtgttatttaagggcgtggccagcggaacatcccgccccattctgtgacgcacggggtggcgcgcgtgggacccgaggggtggggctgggtttagtaggagacctggggcaaggccccctgtggacgaccatctgccagcttctctcgttccgtcgattgggaggagcggtggcgacctcggccttcagtgtttccgacggagtgaatggcggcggcggctgggatgctgctgctgggcttgctgcaggcgggtgggtcggtgctgggccaggcgatggagaaggtgacaggcggcaacctcttgtccatgctgctgatcgcctgcgccttcaccctcagcctggtctacctgatccgtctggccgccggccacctggtccagctgcccgcaggggtgaaaagtcctccatacattttctccccaattccattccttgggcatgccatagcatttgggaaaagtccaattgaatttctagaaaatgcatatgagaagtatggacctgtatttagttttaccatggtaggcaagacatttacttaccttctggggagtgatgctgctgcactgctttttaatagtaaaaatgaagacctgaatgcagaagatgtctacagtcgcctgacaacacctgtgtttgggaagggagttgcatacgatgtgcctaatccagttttcttggagcagaagaaaatgttaaaaagtggccttaacatagcccactttaaacagcatgtttctataattgaaaaagaaacaaaggaatactttgagagttggggagaaagtggagaaaaaaatgtgtttgaagctctttctgagctcataattttaacagctagccattgtttgcatggaaaggaaatcagaagtcaactcaatgaaaaggtagcacagctgtatgcagatttggatggaggtttcagccatgcagcctggctcttaccaggttggctgcctttgcctagtttcagacgcagggacagagctcatcgggaaatcaaggatattttctataaggcaatccagaaacgcagacagtctcaagaaaaaattgatgacattctccaaactttactagatgctacatacaaggatgggcgtcctttgactgatgatgaagtagcagggatgcttattggattactcttggcagggcagcatacatcctcaactactagtgcttggatgggcttctttttggccagagacaaaacacttcaaaaaaaatgttatttagaacagaaaacagtctgtggagagaatctgcctcctttaacttatgaccagctcaaggatctaaatttacttgatcgctgtataaaagaaacattaagacttagacctcctataatgatcatgatgagaatggccagaactcctcagactgtggcagggtataccattcctccaggacatcaggtgtgtgtttctcccactgtcaatcaaagacttaaagactcatgggtagaacgcctggactttaatcctgatcgctacttacaggataacccagcatcaggggaaaagtttgcctatgtgccatttggagctgggcgtcatcgttgtattggggaaaattttgcctatgttcaaattaagacaatttggtccactatgcttcgtttatatgaatttgatctcattgatggatactttcccactgtgaattatacaactatgattcacacccctgagaacccagttatccgttacaaacgaagatcaaaatgaaaaaggttgcaaggaacgaatatatgtgattatcactgtaagccacaaaggcattcgaagagaatgaagtgtacaaaacaactcttgtagtttactgtttttttaagtgtgtaattctaaaagccagtttatgatttaggattttgttaactgaatggttctatcaaatataatagcatttgacacattttctaatagttatgatacttatacatgtgctttcaggaagttccttggtgaaacaattgttgaggggggatctaggtaattggcagattctaaataatataatttccagatagtaattttaagagtactcatcgctcttgccaaataagttcagggtattcaaatcttggactagtcctgcaaggtataaagaataaaaatcccagtgagatacttggaaaccacagtttattattatttatctgggcaattattgtgtgtgtgaggatggaagggtagggaataatcgaacatctaaagccttgaataagagaatactaattgttttggtatgatgatactcagaaatggagatattataggaaaaagaaatcctttggaattttaactaaaatcactgcatatgggaaattaagagatccaggaccatatttgataagagttcctaaaaataatgtaattattaatgctaaagactgctcatgtatcttgatctaattactaaataaattacatatttatttacctgataaatatgtatctagttctacaaggtcacatttatgtggaagtccaaagtcaagtccttaggggataattttgttttgggctcagttgttccctgcttccttttttttttttttttttttttgagatggagtctcgctctgttgcccaggctggagtgcagtggtgcgatctcagctcactgcatcctctgcctcccgggttcaagcaattctctgcctcagcctcccaagtagttgggattacaggcacctgccaccatgcctggctaattttttgtatttttagtagagacgggggtttcactatgttggctaggctggtcttgaactcctgagcctcgtgagtccacccgccttggcctcccaaagtgctgggattacaggcatgagccaccgcacctggccttccctgcttcctctctagaatccaattagggatgtttgttactactcatattgattaaaacagttaacaaacttttttctttttaaaatgtgagatcagtgaactctggttttaagataatctgaaacaaggtccttgggagtaataaaattggtcacattctgtaaagcacattctgtttaggaatcaacttatctcaaattgtaactcggggcctaactatatgagatggctgaaaaaataccacatcgtctgttttcactaggtgatgccaaaatattttgctttatgtatattacagttctttttaaaacactggaagactcatgttaaactctaattgtgaaggcagaatctctgctaatttttcagattaaaattctctttgaaaaaat

SEQ ID NO: 730 - protein, 509 aa, Homo sapien
MAAAAGMLLLGLLQAGGSVLGQAMEKVTGGNLLSMLLIACAFTLSLVYLIRLAAGHLVQLPAGVKSPPYIFSPIPFLGHAIAFGKSPIEFLENAYEKYGPVFSFTMVGKTFTYLLGSDAAALLFNSKNEDLNAEDVYSRLTTPVFGKGVAYDVPNPVFLEQKKMLKSGLNIAHFKQHVSIIEKETKEYFESWGESGEKNVFEALSELIILTASHCLHGKEIRSQLNEKVAQLYADLDGGFSHAAWLLPGWLPLPSFRRRDRAHREIKDIFYKAIQKRRQSQEKIDDILQTLLDATYKDGRPLTDDEVAGMLIGLLLAGQHTSSTTSAWMGFFLARDKTLQKKCYLEQKTVCGENLPPLTYDQLKDLNLLDRCIKETLRLRPPIMIMMRMARTPQTVAGYTIPPGHQVCVSPTVNQRLKDSWVERLDFNPDRYLQDNPASGEKFAYVPFGAGRHRCIGENFAYVQIKTIWSTMLRLYEFDLIDGYFPTVNYTTMIHTPENPVIRYKRRSK

SEQ ID NO: 731 - DNA, 2081 bp, Homo sapien
tcgggaagccatagggcgcctcccagcccgtctccccgctccagtttagaacctaattcccaattcccggaccgggcccagccctgggctcttactgtccgcttttgctgggacctgttccacaaatgggcgtcttctgccttgggccgtgggggttgggccggaagctgcggacgcctgggaaggggccgctgcagctcttgagccgcctctgcggggaccacttgcaggccatcccagccaagaaggccccggctgggcaggaggagcctgggacgccgccctcctcgccgctgagtgccgagcagttggaccggatccagaggaacaaggccgcggccctgctcagactcgcggcccgcaacgtgcccgtgggctttggagagagctggaagaagcacctcagcggggagttcgggaaaccgtattttatcaagctaatgggatttgttgcagaagaaagaaagcattacactgtttatccacccccacaccaagtcttcacctggacccagatgtgtgacataaaagatgtgaaggttgtcatcctgggacaggatccatatcatggacctaatcaagctcacgggctctgctttagtgttcaaaggcctgttccgcctccgcccagtttggagaacatttataaagagttgtctacagacatagaggattttgttcatcctggccatggagatttatctgggtgggccaagcaaggtgttctccttctcaacgctgtcctcacggttcgtgcccatcaagccaactctcataaggagcgaggctgggagcagttcactgatgcagttgtgtcctggctaaatcagaactcgaatggccttgttttcttgctctggggctcttatgctcagaagaagggcagtgccattgataggaagcggcaccatgtactacagacggctcatccctcccctttgtcagtgtatagagggttctttggatgtagacacttttcaaagaccaatgagctgctgcagaagtctggcaagaagcccattgactggaaggagctgtgatcatcagctgaggggtggcctttgagaagctgctgttaacgtatttgccagttacgaagttccactgaaaattttcctattaattcttaagtactctgcataagggggaaaagcttccagaaagcagccatgaaccaggctgtccaggaatggcagctgtatccaaccacaaacaacaaaggctaccctttgaccaaatgtctttctctgcaacatggcttcggcctaaaatatgcagaagacagatgaggtcaaatactcagttggctctctttatctcccttgcctttatggtgaaacaggggagatgtgcacctttcaggcacagccctagtttggcgcctgctgctccttggttttgcctggttagactttcagtgacagatgttggggtgtttttgcttagaaaggtccccttgtctcagccttgcagggcaggcatgccagtctctgccagttccactgcccccttgatctttgaaggagtcctcaggcccctcgcagcataaggatgttttgcaactttccagaatctggcccagaaattagggctcaatttcctgattgtagtagaggttaagattgctgtgagctttatcagataagagaccgagagaagtaagctgggtcttgttattccttgggtgttggtggaataagcagtggaatttgaacaaggaagaggagaaaagggaattttgtctttatggggtggggtgattttctcctagggttatgtccagttggggtttttaaggcagcacagactgccaagtactgttttttttaaccgactgaaatcactttgggatattttttcctgcaacactggaaagttttagttttttaagaagtactcatgcagatatatatatatatatttttcccagtcctttttttaagagacggtctttattgggtctgcacctccatccttgatcttgttagcaatgctgtttttgctgttagtcgggttagagttggctctacgcgaggtttgttaataaaagtttgttaaaagtttaaaaaaaaaaaaaaaaa

SEQ ID NO: 732 - protein, 313 aa, Homo sapien
MIGQKTLYSFFSPSPARKRHAPSPEPAVQGTGVAGVPEESGDAAAIPAKKAPAGQEEPGTPPSSPLSAEQLDRIQRNKAAALLRLAARNVPVGFGESWKKHLSGEFGKPYFIKLMGFVAEERKHYTVYPPPHQVFTWTQMCDIKDVKVVILGQDPYHGPNQAHGLCFSVQRPVPPPPSLENIYKELSTDIEDFVHPGHGDLSGWAKQGVLLLNAVLTVRAHQANSHKERGWEQFTDAVVSWLNQNSNGLVFLLWGSYAQKKGSAIDRKRHHVLQTAHPSPLSVYRGFFGCRHFSKTNELLQKSGKKPIDWKEL

SEQ ID NO: 733 - DNA, 3960 bp, Homo sapien
gttctgaatgatgactgacgcgggtttgggtgatacccctcacagcccctgtcattccggagtcataaggcacccgcgcgtctagccccagcgccagggcacgcgagcggcgctggagggaggaaagcttccgcctgcgggccggacaaaagtcccgcctgcccacggctttttgcccgccgctcgtgaccgagacgcctcgccgcggccagctcgctgctctcgctggcggatggtgtgtggccgccgcaggacgcccgccgtgcccgggccatgaagtagcggctgctggcggcgccgctgcccaaccgccagccccagccccgcgctgcgctgcccggtcctctcccggcggggtcgtatcggcgtggacatggctggccgcgtccctagcctgctagttctccttgtttttccaagcagctgtttggctttccgaagcccactttctgtctttaagaggtttaaagaaactaccagaccattttccaatgaatgtcttggtaccaccagacccgtagttcctattgattcatcagattttgcattggatattcgcatgcctggggttacacctaaacagtccgatacatacttctgcatgtctatgcgaataccagtggatgaggaagccttcgtgattgacttcaagcctcgagccagcatggatactgtccatcacatgttactttttggatgcaatatgccttcatccactggaagttactggttttgtgatgaaggaacctgtacagataaagccaatattctgtatgcctgggcgagaaatgctccccctacccggctccccaaaggtgttggattcagagttggaggagagactggaagtaaatactttgtactacaggtacactatggggatattagtgcttttagagataataacaaggactgttctggtgtgtccttacacctcacacgtctgccacagcctttaattgctggcatgtaccttatgatgtctgttgacactgttatcccagcaggagaaaaagtggtgaattctgacatttcatgccattataaaaattatccaatgcatgtctttgcctatagagttcacactcaccatttaggtaaggtagtaagtggatacagagtaagaaatggacagtggacactgattggacggcagagccctcagctgccacaggctttctaccctgtggggcatccagttgatgtaagttttggtgacctactggctgcaagatgtgtattcactggtgaaggaaggacagaagccacacacattggtggcacgtctagtgatgaaatgtgcaacttatacattatgtattacatggaagccaagcatgcagtttctttcatgacctgtacccagaatgtagctccagatatgttcagaaccataccaccagaggccaacattccaattcccgtgaagtctgatatggttatgatgcatgaacatcataaagaaacagaatataaagataagattcctttactacagcagccaaaacgagaagaagaagaagtgttagaccagggtgatttctattcactactttccaagctgctaggagaaagggaagatgttgttcatgtgcacaaatataatcctacagaaaaggcagaatcagagtcagacctggtagctgagattgcaaatgtagtccaaaaaaaggatcttggtcgatctgatgccagagagggtgcagaacatgagaggggtaatgctattcttgtcagagacagaattcacaaattccacagactagtatctaccttgaggccaccagagagcagagttttctcattacagcagcccccacctggtgaaggcacctgggaaccagaacacacaggagatttccacatggaagaggcactggattggcctggagtatacttgttaccaggccaggtttctggggtggctctagaccctaagaataacctggtgattttccacagaggtgaccatgtctgggatggaaactcgtttgacagcaagtttgtttaccagcaaataggactcggaccaattgaagaagacactattcttgtcatagatccaaataatgctgcagtactccagtccagtggaaaaaatctgttttacttgccacatggcttgagtatagataaagatgggaattattgggtcacagacgtggctctccatcaggtgttcaaactggatccaaacaataaagaaggccctgtattaatcctgggaaggagcatgcaaccaggcagtgaccagaatcacttctgtcaacccactgatgtggctgtggatccaggcactggagccatttatgtatcagatggttactgcaacagcaggattgtgcagttttcaccaagtggaaagttcatcacacagtggggagaagagtcttcagggagcagtcctctgccaggccagttcactgttcctcacagcttggctcttgtgcctcttttgggccaattatgtgtggcagaccgggaaaatggtcggatccagtgttttaaaactgacaccaaagaatttgtgagagagattaagcattcatcatttggaagaaatgtatttgcaatttcatatataccaggcttgctctttgcagtgaatgggaagcctcattttggggaccaagaacctgtacaaggatttgtgatgaacttttccaatggggaaattatagacatcttcaagccagtgcgcaagcactttgatatgcctcatgatattgttgcatctgaagatgggactgtgtacattggagatgctcataccaacaccgtgtggaagttcaccttgactgagaaattggaacatcgatcagttaaaaaggctggcattgaggtccaggaaatcaaagaagccgaggcagttgttgaaaccaaaatggagaacaaacccacctcctcagaattgcagaagatgcaagagaaacagaaactgatcaaagagccaggctcgggagtgcctgttgttctcattacaacccttctggttattccggtggttgtcctgctggccattgccatatttattcggtggaaaaaatcaagggcctttggagcagattctgaacacaaactcgagacgagttcaggaagagtactgggaagatttagaggaaagggaagtggaggcttaaaccttggtaatttctttgcaagccgtaagggctacagtcgaaaagggtttgaccggcttagcactgagggcagtgaccaagagaaagaggatgatggaagtgaatcagaagaggagtattcagcacctctgcctgcgctcgcaccttcctcctcctgaaaaccaagctttgatttagattgagtaagatttacccagaatgtcagattcctttccctttagcacgtttaaagttctgtgtatttaattgtaaactgtactagtctgtgtgggactgtacacactttatttacttcgttttggttaagttggcttctgtttctagttgaggagtttcctaaaagttcataacagtgccattgtctttatatgaacatagactagagaaaccgtcctctttttccatcataattctaatctaacaatggaagatttgcccatttacacttttgagactttttggtggatgtaaataaccccattctttgcttgaacacagtattttcccaatagcactttcattgccagtgtctttctttggtgcctttcctgttcagcattcttagcctgtggcagtaaagagaaactttgtgctacatgacgacaaagctgctaaatctcctatttttttaaaatcactaacattatattgcaatgaaggaaataaaaaagtctctatttaaattcttttttaaattttcttcagttggtgtgtttttgggatgtcttatttttagatggttacactgttagaacactattttcagaatctgaatgtaatttgtgtaataaagtgttttcagagcaaaaaaaaaaaaaaa

SEQ ID NO: 734 - protein, 974 aa, Homo sapien
MAGRVPSLLVLLVFPSSCLAFRSPLSVFKRFKETTRPFSNECLGTTRPVVPIDSSDFALDIRMPGVTPKQSDTYFCMSMRIPVDEEAFVIDFKPRASMDTVHHMLLFGCNMPSSTGSYWFCDEGTCTDKANILYAWARNAPPTRLPKGVGFRVGGETGSKYFVLQVHYGDISAFRDNNKDCSGVSLHLTRLPQPLIAGMYLMMSVDTVIPAGEKVVNSDISCHYKNYPMHVFAYRVHTHHLGKVVSGYRVRNGQWTLIGRQSPQLPQAFYPVGHPVDVSFGDLLAARCVFTGEGRTEATHIGGTSSDEMCNLYIMYYMEAKHAVSFMTCTQNVAPDMFRTIPPEANIPIPVKSDMVMMHEHHKETEYKDKIPLLQQPKREEEEVLDQGDFYSLLSKLLGEREDVVHVHKYNPTEKAESESDLVAEIANVVQKKDLGRSDAREGAEHERGNAILVRDRIHKFHRLVSTLRPPESRVFSLQQPPPGEGTWEPEHTGDFHMEEALDWPGVYLLPGQVSGVALDPKNNLVIFHRGDHVWDGNSFDSKFVYQQIGLGPIEEDTILVIDPNNAAVLQSSGKNLFYLPHGLSIDKDGNYWVTDVALHQVFKLDPNNKEGPVLILGRSMQPGSDQNHFCQPTDVAVDPGTGAIYVSDGYCNSRIVQFSPSGKFITQWGEESSGSSPLPGQFTVPHSLALVPLLGQLCVADRENGRIQCFKTDTKEFVREIKHSSFGRNVFAISYIPGLLFAVNGKPHFGDQEPVQGFVMNFSNGEIIDIFKPVRKHFDMPHDIVASEDGTVYIGDAHTNTVWKFTLTEKLEHRSVKKAGIEVQEIKEAEAVVETKMENKPTSSELQKMQEKQKLIKEPGSGVPVVLITTLLVIPVVVLLAIAIFIRWKKSRAFGADSEHKLETSSGRVLGRFRGKGSGGLNLGNFFASRKGYSRKGFDRLSTEGSDQEKEDDGSESEEEYSAPLPALAPSSS

SEQ ID NO: 735 - DNA, 1421 bp, Homo sapien
acttactgcgggacggccttggagagtactcgggttcgtgaacttcccggaggcgcaatgagctgcattaacctgcccactgtgctgcccggctcccccagcaagacccgggggcagatccaggtgattctcgggccgatgttctcaggaaaaagcacagagttgatgagacgcgtccgtcgcttccagattgctcagtacaagtgcctggtgatcaagtatgccaaagacactcgctacagcagcagcttctgcacacatgaccggaacaccatggaggcgctgcccgcctgcctgctccgagacgtggcccaggaggccctgggcgtggctgtcataggcatcgacgaggggcagtttttccctgacatcatggagttctgcgaggccatggccaacgccgggaagaccgtaattgtggctgcactggatgggaccttccagaggaagccatttggggccatcctgaacctggtgccgctggccgagagcgtggtgaagctgacggcggtgtgcatggagtgcttccgggaagccgcctataccaagaggctcggcacagagaaggaggtcgaggtgattgggggagcagacaagtaccactccgtgtgtcggctctgctacttcaagaaggcctcaggccagcctgccgggccggacaacaaagagaactgcccagtgccaggaaagccaggggaagccgtggctgccaggaagctctttgccccacagcagattctgcaatgcagccctgccaactgagggacctgcaagggccgcccgctcccttcctgccactgccgcctactggacgctgccctgcatgctgcccagccactccaggaggaagtcgggaggcgtggagggtgaccacaccttggccttctgggaactctcctttgtgtggctgccccacctgccgcatgctccctcctctcctacccactggtctgcttaaagcttccctctcagctgctgggacgatcgcccaggctggagctggccccgcttggtggcctgggatctggcacactccctctccttggggtgagggacagagccccacgctgttgacatcagcctgcttcttcccctctgcggctttcactgctgagtttctgttctccctgggaagcctgtgccagcacctttgagccttggcccacactgaggcttaggcctctctgcctgggatgggctcccaccctcccctgaggatggcctggattcacgccctcttgtttccttttgggctcaaagcccttcctacctctggtgatggtttccacaggaacaacagcatctttcaccaagatgggtggcaccaaccttgctgggacttggatcccaggggcttatctcttcaagtgtggagagggcagggtccacgcctctgctgtagcttatgaaattaactaatt

SEQ ID NO: 736 - protein, 234 aa, Homo sapien
MSCINLPTVLPGSPSKTRGQIQVILGPMFSGKSTELMRRVRRFQIAQYKCLVIKYAKDTRYSSSFCTHDRNTMEALPACLLRDVAQEALGVAVIGIDEGQFFPDIMEFCEAMANAGKTVIVAALDGTFQRKPFGAILNLVPLAESVVKLTAVCMECFREAAYTKRLGTEKEVEVIGGADKYHSVCRLCYFKKASGQPAGPDNKENCPVPGKPGEAVAARKLFAPQQILQCSPAN

SEQ ID NO: 737 - DNA, 662 bp, Homo sapien
accgccgacgcagacccctctctgcacgccagcccgcccgcacccaccatggccacagttcagcagctggaaggaagatggcgcctggtggacagcaaaggctttgatgaatacatgaaggagctaggagtgggaatagctttgcgaaaaatgggcgcaatggccaagccagattgtatcatcacttgtgatggtaaaaacctcaccataaaaactgagagcactttgaaaacaacacagttttcttgtaccctgggagagaagtttgaagaaaccacagctgatggcagaaaaactcagactgtctgcaactttacagatggtgcattggttcagcatcaggagtgggatgggaaggaaagcacaataacaagaaaattgaaagatgggaaattagtggtggagtgtgtcatgaacaatgtcacctgtactcggatctatgaaaaagtagaataaaaattccatcatcactttggacaggagttaattaagagaatgaccaagctcagttcaatgagcaaatctccatactgtttctttcttttttttttcattactgtgttcaattatctttatcataaacattttacatgcagctatttcaaagtgtgttggattaattaggatcatccctttggttaataaataaatgtgtttgtgct

SEQ ID NO: 738 - protein, 135 aa, Homo sapien
MATVQQLEGRWRLVDSKGFDEYMKELGVGIALRKMGAMAKPDCIITCDGKNLTIKTESTLKTTQFSCTLGEKFEETTADGRKTQTVCNFTDGALVQHQEWDGKESTITRKLKDGKLVVECVMNNVTCTRIYEKVE

SEQ ID NO: 739 - DNA, 3548 bp, Homo sapien
tggccgaagcagggggacagcaagggacgctcaggcggggaccatggcggacggcggctcggagcgggctgacgggcgcatcgtcaagatggaggtggactacagcgccacggtggatcagcgcctacccgagtgtgcgaagctagccaaggaaggaagacttcaagaagtcattgaaacccttctctctctggaaaagcagactcgtactgcttccgatatggtatcgacatcccgtatcttagttgcagtagtgaagatgtgctatgaggctaaagaatgggatttacttaatgaaaatattatgcttttgtccaaaaggcggagtcagttaaaacaagctgttgccaaaatggttcaacagtgctgtacttatgttgaggaaatcacagaccttcctatcaaacttcgattaattgatactctacgaatggttaccgaaggcaagatttatgttgaaattgagcgtgcgcgactgactaaaacattagcaactataaaagaacaaaatggtgatgtgaaagaggcagcctccattttacaggagttacaggtggaaacctacgggtcaatggaaaagaaagagcgagtggaatttattttggagcaaatgaggctctgcctagctgtgaaggattacattcgaacacaaatcatcagcaagaaaattaacaccaaatttttccaggaagaaaatacagagaaattaaagttgaagtactataatttaatgattcagctggatcaacatgagggatcctatttgtctatttgtaagcactacagagcaatatatgatactccctgtatacaggcagaaagtgaaaaatggcagcaggctctgaagagtgttgtactctatgttatcctggctccttttgacaatgaacagtcagatttggttcaccgaataagtggtgacaagaagttagaagaaattcccaaatacaaggatcttttaaagctttttaccacaatggagttgatgcgttggtccacacttgttgaggactatggaatggaattaagaaaaggttcccttgagagtcctgcaacggatgtttttggttctacagaggaaggtgaaaaaaggtggaaagacttgaagaacagagttgttgaacataatattagaataatggccaagtattatactcggataacaatgaaaaggatggcacagcttctggatctatctgttgatgagtccgaagcctttctctcaaatctagtagttaacaagaccatctttgctaaagtagacagattagcaggaattatcaacttccagagacccaaggatccaaataatttattaaatgactggtctcagaaactgaactcattaatgtctctggttaacaaaactacgcatctcatagccaaagaggagatgatacataatctacaataagggtcttagtgctttagaaaaaagttaaaattggaagtcattaaaaaaagactgttataatggtgtatatgttggggttttttttctaagcttctttgtcttaaattttaaaatagtgaatatgtttgagactccctttgacctttcagttccccaagttcattgttaactttgcatttgcaattggtgcaaaaatacagatttctgtcgtctgaatacacaaaaagttgtgtcataacttacccagatatgtttttctatcatttgaaacctttttagctactgtttgttttcattcaactaacaaacatattccaataataaaagcagtatatacatatttcctttctacagttacctctgattctcaacattttgtggggtagtgatttggcaagtgttttttaaataaaacaaatctcattgtaaagttatcagtcatttagtagaatagaaaagcaacatagagcatacaagaacatttgggatagagttgtgatttgtgaagaatttgtactttgatattgtggcggaaagtctagactgagtgtgtatgctggtaaactgtagacttttttttttttttttgagtccggctggttccaatcacagtagcttgattgctttcagccctcatcctctcacttgatcagttgttcaacagaatcagctgacataattgacacagtttattgggtgttaagtccgctctatagggatagtgactacttttttttttttttttttttttgctcttcttcctctcccctttctttatatgggtttaaatttaacataaagttgtttttataaggcttatttgtggctttaacttgtaagtctgattacatcattattgttccaaattcattatctctgtaggaacttttagttccattatatgaacactggataacctaattttttttaatgctttaaaaaaatggcaaaaagacgtcaggccaccctcatagtaagtggtgtagtattaaaatattttcacggaattaaaagtagcttgctgtcaaagaaacacctgagatgaattggtgtgaacgaattttgcaagtttaatttgatttatttcagagaaaatagaaaaaacaatgttagaaggttatttaaaatgatacttaaataaagaaagtgtgaggtctactttaaaaaaattcaaatgaagagaaaaagaaaaacagcattctagaaatggcatttctcctaattaattttccacttaatggaagattatcaattgtcctattttatgatcccaggactgaagacagttgtgggatatctgtcatatttatcctgtgagtcattgtgaataatgacatacagtactgaagtaatctgattttattctttggaaattcaatgcattggtcacactaataacatcaacatctgctatcacttatctttttaaaactaaccaaaaaaggctgggattacaggcatgagccactgcacccaactcctctttcgtctttctttaacacacactaggctctttgtgtattatgattcagtgctatttgtaactgtgtcccagtgaccaaattgcactcgactcgatcagctgttcatccatttcgtgttttttcctgtcaaacattaatccagcaaatatatgaggtatttaccaatttattttcttagtattacaaaataattcattagcataaagtacaatagtgaaatatttgagttgttcggaacctcaattaatcctgttttacatttcagacctaaagctggcaatcaggagaagaagcactttgttttaaatgtggagaagataacacttgattccatttcattgtcattagtgtattaaccagcaggagaggtgatgagccatttttcaaatgaaataccttttatttccatataatttttttattttagagttcaatagctgtttctatgattatcctcaatttccatatgttactgaatctgaaaaacatctttaaaattcaaacagttccattttctctcttgtaagtgttaaatgtgataaaagtacatattttaaattgttttcagctcttggatatagcagcaataaaaacactaatttgtgggtatttaagaaaacctggagaataaactcatactttaaaagatc

SEQ ID NO: 740 - protein, 456 aa, Homo sapien
MADGGSERADGRIVKMEVDYSATVDQRLPECAKLAKEGRLQEVIETLLSLEKQTRTASDMVSTSRILVAVVKMCYEAKEWDLLNENIMLLSKRRSQLKQAVAKMVQQCCTYVEEITDLPIKLRLIDTLRMVTEGKIYVEIERARLTKTLATIKEQNGDVKEAASILQELQVETYGSMEKKERVEFILEQMRLCLAVKDYIRTQIISKKINTKFFQEENTEKLKLKYYNLMIQLDQHEGSYLSICKHYRAIYDTPCIQAESEKWQQALKSVVLYVILAPFDNEQSDLVHRISGDKKLEEIPKYKDLLKLFTTMELMRWSTLVEDYGMELRKGSLESPATDVFGSTEEGEKRWKDLKNRVVEHNIRIMAKYYTRITMKRMAQLLDLSVDESEAFLSNLVVNKTIFAKVDRLAGIINFQRPKDPNNLLNDWSQKLNSLMSLVNKTTHLIAKEEMIHNLQ

SEQ ID NO: 741 - DNA, 3988 bp, Homo sapien
tgcaactccgagcgtgagtccaggctaaggggacgccggccggggaagaggcgcggcgggagaagcgaccgcagcgggagcccggccaccgagggctgccggcactaggcgcagagccgccagcgctcggaagcccgcggggtgcgggagcgggaacagacttcttttgtagaattatcctatggaatgatattttcataatgagtcaacaaggttacgtggctacacctccgtattctcagcctcagcctggaataggcctttctccacctcattatgggcactatggggatccgtcgcacacagcatctccaacaggtatgatgaagccagcagggcctttgggggccaccgccactaggggaatgttgcctccgggtcccccacctcctggaccccatcagtttggtcagaatggagctcatgccactggtcaccctccccaaagatttccaggccctccacctgtcaacaatgtggcatcctcacatgcaccataccaaccctctgcacaatcttcttatccaggtcctatatccacttcatctgtcacccagctgggcagccagctcagtgctatgcaaatcaacagctatggttcaggcatggctcctccaagccagggaccccctggccctctgtcagccacatcattgcagactcctccacgacctccacagccttccattttgcagcctggatctcaagttcttccaccaccacccaccacactcaatggtcctggtgcctcacctttgcctctaccaatgtacagaccagatgggctctctgggcctcctcctccaaatgcccagtaccagcccccacctcttccaggccagaccttgggtgctggatatcctccgcagcaggccaactctggtccccagatggcaggcgcacaactgtcttacccaggaggcttccctggaggtcctgcacagatggctggtccgccacagccccagaagaagctggatcctgactctatccctagcccaatccaggtgattgagaatgatagagccagcagaggaggacaagtttatgccaccaacaccagaggccagatccctcccctggtcactacagattgcatgatacaagaccaaggaaatgccagtcctcgattcatccgttgtacaacatactgttttccatgcacgtcagatatggctaagcaagctcagattccattagctgctgtcatcaagccctttgccaccattccttcaaatgagagtcccctttacttggtaaatcacggcgagagtggaccagtcagatgcaacaggtgcaaggcctacatgtgcccatttatgcagttcatcgaaggaggaaggagatatcagtgtggattttgcaactgtgtgaatgatgttccaccattctatttccaacatctggaccacattggaagaagactggaccactatgagaaaccagagttatctctaggatcttatgaatatgttgccactttggattattgcagaaagagtaagcctcccaacccaccagcctttatcttcatgattgatgtttcatatagtaacataaagaatggacttgtcaagctcatatgtgaagaactgaagaccatgctggaaaaaattccaaaggaagagcaagaagagacgtctgcaattcgagtgggttttatcacatataacaaagttctccatttctttaatgtgaagagtaatctggcccagcctcagatgatggtggtgactgatgttggagaagtctttgttcctttgttggatggtttccttgtcaactatcaagaatcccaatctgtgattcataatttgttggaccagattccagacatgtttgcagactctaatgaaaatgagactgtctttgcttctgtcatccaggctggcatggaagcactaaaggcagcagactgtcctgggaagctgttcatcttccattcttccttgccaactgctgaagcaccagggaagctcaaaaacagagatgacaaaaaactggttaatacagacaaagagaagatacttttccagccccaaacaaatgtctatgactcattggccaaggactgcgtggctcacggctgctctgtgacactcttcctctttcctagtcagtatgtggacgtggcctcgctggggctggttcctcagctcactggaggaaccctttacaaatacaacaatttccagatgcacttggatagacaacaatttttgaacgacctcagaaatgatattgaaaagaaaataggctttgatgctattatgagggttcgtaccagcacaggtttcagagccactgatttctttggtggaatcttgatgaacaacaccaccgatgtagaaatggctgccatcgattgtgacaaggcagtgaccgtggagttcaagcacgatgacaaactcagtgaagacagtggagccttaatccagtgtgctgtgctttacacgacaatcagtggtcaaagaagacttcggattcacaatcttggcttaaactgcagctctcagctagctgatctttataagagctgtgagacagatgctcttatcaacttctttgccaagtcagcttttaaagcagttctccaccagcctttgaaggtcatccgggaaattctagttaatcagactgcccatatgttggcatgttaccggaagaattgtgcaagtccttctgcagcaagccagcttattctaccagattccatgaaagtattgccagtgtacatgaattgcttgttgaaaaactgtgtactactcagcagaccagagatctcaactgatgaacgagcataccagagacagctggtcatgaccatgggtgtggctgactctcagcttttcttctacccacaacttctgcccatacacacgttagatgtcaagagtacaatgttacctgctgccgttcgttgctctgagtcccgtctttcagaagaaggaatattcttactggctaatggtctacacatgttcctgtggttgggagtaagcagcccaccagaactgatccaaggaatatttaatgtgccatcttttgcacatatcaacacagatatgacattgctgcctgaagtgggaaacccatactctcaacaactcagaatgataatgggtattatccaacaaaagaggccatattcaatgaagctcacaattgtaaagcagcgagaacaaccagaaatggttttccgacagttcctggtagaagacaaaggactttacggaggctcttcttatgtggatttcctttgttgtgttcacaaggagatctgtcagctgcttaattaattgaaacttctctgtcattgatgttgcatttccaaggagataatctccttcttggtgcctaattttctagatgataataggctagttttgatttcttgctcattttcagaataactttccaggaagagatggcatttagaacttcagctttggtgctcaggtataaagccaattaaggtacaattgtaccataaagggaacaatctgtttctgattgcacagtttctaatttttaaaactgatgtggtttgcatttcataaaaggcaaagtttacagaaccataaacattctcaattttctttatgctagacatataaattatttttcaaactgtatagatttggggtaaaaagttgtctcagttcctctcccaattgcaatgagaaaaaaaagcttaatttttacattatacttaattttctaaaaccatgtaactccattgaacatttttcaacttaaggtctgcatagcagacttttaataaccttgggatttatctggtagaacaatatgtgttctacatttttttcataattatatattgtgtatgttaaaactattttccagttgttttgtctgtaaaactgtctttatcaatatgcttaatggttctttgtacaattttgaaagtttctacctgtatataatggatgttaaccagtatcaataaatcacttcgtataatctt

SEQ ID NO: 742 - protein, 1032 aa, Homo sapien
MSQQGYVATPPYSQPQPGIGLSPPHYGHYGDPSHTASPTGMMKPAGPLGATATRGMLPPGPPPPGPHQFGQNGAHATGHPPQRFPGPPPVNNVASSHAPYQPSAQSSYPGPISTSSVTQLGSQLSAMQINSYGSGMAPPSQGPPGPLSATSLQTPPRPPQPSILQPGSQVLPPPPTTLNGPGASPLPLPMYRPDGLSGPPPPNAQYQPPPLPGQTLGAGYPPQQANSGPQMAGAQLSYPGGFPGGPAQMAGPPQPQKKLDPDSIPSPIQVIENDRASRGGQVYATNTRGQIPPLVTTDCMIQDQGNASPRFIRCTTYCFPCTSDMAKQAQIPLAAVIKPFATIPSNESPLYLVNHGESGPVRCNRCKAYMCPFMQFIEGGRRYQCGFCNCVNDVPPFYFQHLDHIGRRLDHYEKPELSLGSYEYVATLDYCRKSKPPNPPAFIFMIDVSYSNIKNGLVKLICEELKTMLEKIPKEEQEETSAIRVGFITYNKVLHFFNVKSNLAQPQMMVVTDVGEVFVPLLDGFLVNYQESQSVIHNLLDQIPDMFADSNENETVFASVIQAGMEALKAADCPGKLFIFHSSLPTAEAPGKLKNRDDKKLVNTDKEKILFQPQTNVYDSLAKDCVAHGCSVTLFLFPSQYVDVASLGLVPQLTGGTLYKYNNFQMHLDRQQFLNDLRNDIEKKIGFDAIMRVRTSTGFRATDFFGGILMNNTTDVEMAAIDCDKAVTVEFKHDDKLSEDSGALIQCAVLYTTISGQRRLRIHNLGLNCSSQLADLYKSCETDALINFFAKSAFKAVLHQPLKVIREILVNQTAHMLACYRKNCASPSAASQLILPDSMKVLPVYMNCLLKNCVLLSRPEISTDERAYQRQLVMTMGVADSQLFFYPQLLPIHTLDVKSTMLPAAVRCSESRLSEEGIFLLANGLHMFLWLGVSSPPELIQGIFNVPSFAHINTDMTLLPEVGNPYSQQLRMIMGIIQQKRPYSMKLTIVKQREQPEMVFRQFLVEDKGLYGGSSYVDFLCCVHKEICQLLN

SEQ ID NO: 743 - DNA, 2239 bp, Homo sapien
cgtccgtgacaagatgaagctcatcatcctggagcactattctcaggcgagcgagtgggcggctaaatacatcaggaaccgtatcatccagtttaacccagggccagagaagtacttcaccctggggctccccactgggagtaccccacttggctgctacaagaagctgattgaatactataagaatggggacctgtcctttaaatatgtgaagaccttcaacatggatgagtacgtgggccttcctcgagaccacccggagagttaccactccttcatgtggaacaacttcttcaagcacattgacatccacccagaaaacacccacattctggatgggaatgcagtcgacctacaggcagaatgtgatgcctttgaagagaagatcaaggctgcaggtgggatcgagctatttgttggaggcatcggccctgatggacacattgccttcaacgagccaggctccagtctggtgtccaggacccgtgtgaagacgctggccatggataccatcctggccaatgctaggttcttcgatggagaactcaccaaggtgcccaccatggccttgacggtgggggtgggcactgtcatggatgctagagaggtgatgatccttatcacaggtgctcacaaggcatttgctctgtacaaggccatcgaggagggagtgaaccacatgtggaccgtgtctgccttccagcagcatccccgcaccgtgtttgtgtgtgacgaggatgccaccttggagctgaaagtgaagactgtcaagtatttcaaaggtttaatgcttgttcataacaagttggtggaccccttgtacagtatcaaagagaaagaaactgagaaaagccaatcttcgaagaaaccatacagcgattagcctgtgctgggacctagtgtcaagtacccatagggaaaggcaggtctttctggaaattgtctttagaagaaagaattgtatttctttaatctagtatggttactccagataagtgggtgaacttattgttcttggccatgaggctgggagcctagtcacggagtttagctatagggagaatgtttgtaacttaatcagaaaaaaaatatctgcaaaatgtactccatcattttgatgtctgccaaacccaggttgggagttttaaactttttgttctgcttcagccatggttcacacatatgacacactcccgtcaggaatttctctccttacacgcactgattttcaagtgggagggaattaggggcttatgtatattggataccacctcttgagagtccttcttgcacaggcctgccccttggttgagaaccattgttccaagtgaaggcacaaactctcaatatctaaaataagtgcaaggaagcagtctctttggtcagtaacaagtgcaatggaaagaaaacgatcccttccttcttccactttcacagcttttctctgaactaggagaacctgggggtggatttgggtgggtggggccaaagaggaggcttctattgataaatccagagcctcaaggggcccagccacgtcaaacttctctccctcagggactctccagcaccaaaaggcagaaggtggaagccgtttttcccccagagccctgtgtttttgtgaaaggcctcactgtggctcctctgttttacatactcattagtaagtgggaggtccactggggcaacagacactgccacaatttcagtgttgtgttcagccaaggggacggtctggacaggcagcttaagtgtgagtttagtcacaactcctgagtgtcccgctctcctgcttacctaggaggtgagtgccaggaaaatacaccaaatgcttctagtattgtttccccacttaaaatagtcctgcttaaattcacatggtgtggtctgatgttctgagagcatcaggaaatacaacccttttgcccatttacccttctccccggatcccaaggtggtctgttgctctggcttcctttcattgtcttaggccttcatggagtggatgctgcctcctcctggctgtttttgtgcctgtttgaagctactgctgcctccatttctgggaaagacctttgagagcctagcccaggcctaagggctatgtttggtaccagtgttttgtctttagcttttctatgtgattgtgccgtcattctgttttaagctcatggatcaatggatttgtttacaatgtgatattttctattaaatccagtattttcaaaaaaaaaaaaaa

SEQ ID NO: 744 - protein, 289 aa, Homo sapien
MKLIILEHYSQASEWAAKYIRNRIIQFNPGPEKYFTLGLPTGSTPLGCYKKLIEYYKNGDLSFKYVKTFNMDEYVGLPRDHPESYHSFMWNNFFKHIDIHPENTHILDGNAVDLQAECDAFEEKIKAAGGIELFVGGIGPDGHIAFNEPGSSLVSRTRVKTLAMDTILANARFFDGELTKVPTMALTVGVGTVMDAREVMILITGAHKAFALYKAIEEGVNHMWTVSAFQQHPRTVFVCDEDATLELKVKTVKYFKGLMLVHNKLVDPLYSIKEKETEKSQSSKKPYSD

SEQ ID NO: 745 - DNA, 1345 bp, Homo sapien
aaaacagccggggctccagcgggagaacgataatgcaaagtgctatgttcttggctgttcaacacgactgcagacccatggacaagagcgcaggcagtggccacaagagcgaggagaagcgagaaaagatgaaacggacccttttaaaagattggaagacccgtttgagctacttcttacaaaattcctctactcctgggaagcccaaaaccggcaaaaaaagcaaacagcaagctttcatcaagccttctcctgaggaagcacagctgtggtcagaagcatttgacgagctgctagccagcaaatatggtcttgctgcattcagggcttttttaaagtcggaattctgtgaagaaaatattgaattctggctggcctgtgaagacttcaaaaaaaccaaatcaccccaaaagctgtcctcaaaagcaaggaaaatatatactgacttcatagaaaaggaagctccaaaagagataaacatagattttcaaaccaaaactctgattgcccagaatatacaagaagctacaagtggctgctttacaactgcccagaaaagggtatacagcttgatggagaacaactcttatcctcgtttcttggagtcagaattctaccaggacttgtgtaaaaagccacaaatcaccacagagcctcatgctacatgaaatgtaaaagggagcccagaaatggaggacatttcattctttttcctgaggggaaggactgtgacctgccataaagactgaccttgaattcagcctgggtgttcaggaaacatcactcagaactattgattcaaagttgggtagtgaatcaggaagccagtaactgactaggagaagctggtatcagaacagcttccctcactgtgtacagaacgcaagaagggaataggtggtctgaacgtggtgtctcactctgaaaagcaggaatgtaagatgatgaaagagacaatgtaatactgttggtccaaaagcatttaaaatcaatagatctgggattatgtggccttaggtagctggttgtacatctttccctaaatcgatccatgttaccacatagtagttttagtttaggattcagtaacagtgaagtgtttactatgtgcaagggtattgaagttcttatgaccacagatcatcagtactgttgtctcatgtaatgctaaaactgaaatggtccgtgtttgcattgttaaaaatgatgtgtgaaatagaatgagtgctatggtgttgaaaactgcagtgtccgttatgagtgccaaaaatctgtcttgaaggcagctacactttgaagtggtctttgaatacttttaataaatttattttgataaataatattg

SEQ ID NO: 746 - protein, 211 aa, Homo sapien
MQSAMFLAVQHDCRPMDKSAGSGHKSEEKREKMKRTLLKDWKTRLSYFLQNSSTPGKPKTGKKSKQQAFIKPSPEEAQLWSEAFDELLASKYGLAAFRAFLKSEFCEENIEFWLACEDFKKTKSPQKLSSKARKIYTDFIEKEAPKEINIDFQTKTLIAQNIQEATSGCFTTAQKRVYSLMENNSYPRFLESEFYQDLCKKPQITTEPHAT

SEQ ID NO: 747 - DNA, 2524 bp, Homo sapien
ccggggcggcggttgcatcagattctaggaagtgtctgtagccgcagctgcgggtccgggattcccagccatggcagattcctccgggcagcagggcaaaggccggcgtgtgcagccccagtggtcccctcctgctgggacccagccatgcagactccacctttacaacagcctcaccaggaacaaggaagtgttcatacctcaagatgggaaaaaggtgacgtggtattgctgtgggccaaccgtctatgacgcatctcacatggggcacgccaggtcctacatctcttttgatatcttgagaagagtgttgaaggattacttcaaatttgatgtcttttattgcatgaacattacggatattgatgacaagatcatcaagagggcccggcagaaccacctgttcgagcagtatcgggagaagaggcctgaagcggcacagctcttggaggatgttcaggccgccctgaagccattttcagtaaaattaaatgagaccacggatcccgataaaaagcagatgctcgaacggattcagcacgcagtgcagcttgccacagagccacttgagaaagctgtgcagtccagactcacgggagaggaagtcaacagctgtgtggaggtgttgctggaagaagccaaggatttgctctctgactggctggattctacacttggctgtgatgtcactgacaattccatcttctccaagctgcccaagttctgggagggggacttccacagagacatggaagctctgaatgttctccctccagatgtcttaacccgggttagtgagtatgtgccagaaattgtgaactttgtccagaagattgtggacaacggttacggctatgtctccaatgggtctgtctactttgatacagcgaagtttgcttctagcgagaagcactcctatgggaagctggtgcctgaggccgttggagatcagaaagcccttcaagaaggggaaggtgacctgagcatctctgcagaccgcctgagtgagaagcgctctcccaacgactttgccttatggaaggcctctaagcccggagaaccgtcctggccgtgcccttggggaaagggtcgtccgggctggcatatcgagtgctcggccatggcaggcaccctcctaggggcttcgatggacattcacggaggtgggttcgacctccggttcccccaccatgacaatgagctggcacagtcggaggcctactttgaaaacgactgctgggtcaggtacttcctgcacacaggccacctgaccattgcaggctgcaaaatgtcaaagtcactaaaaaacttcatcaccattaaagatgccttgaaaaagcactcagcacggcagttgcggctggccttcctcatgcactcgtggaaggacaccctggactactccagcaacaccatggagtcagcgcttcaatatgagaagttcttgaatgagtttttcttaaatgtgaaagatatccttcgcgctcctgttgacatcactggtcagtttgagaagtggggagaagaagaagcagaactgaataagaacttttatgacaagaagacagcaattcacaaagccctctgtgacaatgttgacacccgcaccgtcatggaagagatgcgggccttggtcagtcagtgcaacctctatatggcagcccggaaagccgtgaggaagaggcccaaccaggctctgctggagaacatcgccctgtacctcacccatatgctgaagatctttggggccgtagaagaggacagctccctgggattcccggtcggagggcctggaaccagcctcagtctcgaggccacagtcatgccctaccttcaggtgttatcagaattccgagaaggagtgcggaagattgcccgagagcaaaaagtccctgagattctgcagctcagcgatgccctgcgggacaacatcctgcctgagcttggggtgcggtttgaagaccacgaaggactgcccacagtggtgaaactggtagacagaaacaccttattaaaagagagagaagaaaagagacgggttgaagaggagaagaggaagaagaaagaggaggcggcccggaggaaacaggaacaagaagcagcaaagctggccaagatgaagattccccccagtgagatgttcttgtcagaaaccgacaaatactccaagtttgatgaaaatggtctgcccacacatgacatggagggcaaagagctcagcaaagggcaagccaagaagctgaagaagctcttcgaggctcaggagaagctctacaaggaatatctgcagatggcccagaatggaagcttccagtgagggggcacaggactgactttttaaaccattgtggactagtggctgctgtctgcctcagtgacaatgtcccagcgctcctatcatgtttacagtcacccttgggtcctaaattaagagttgtgttcatgtaggttcgtgtcgtcgttggctctgagacattgataataaatttttctcaacagtgaaaaaaaaaaaaaaaaaaaaaaa

SEQ ID NO: 748 - protein, 748 aa, Homo sapien
MADSSGQQGKGRRVQPQWSPPAGTQPCRLHLYNSLTRNKEVFIPQDGKKVTWYCCGPTVYDASHMGHARSYISFDILRRVLKDYFKFDVFYCMNITDIDDKIIKRARQNHLFEQYREKRPEAAQLLEDVQAALKPFSVKLNETTDPDKKQMLERIQHAVQLATEPLEKAVQSRLTGEEVNSCVEVLLEEAKDLLSDWLDSTLGCDVTDNSIFSKLPKFWEGDFHRDMEALNVLPPDVLTRVSEYVPEIVNFVQKIVDNGYGYVSNGSVYFDTAKFASSEKHSYGKLVPEAVGDQKALQEGEGDLSISADRLSEKRSPNDFALWKASKPGEPSWPCPWGKGRPGWHIECSAMAGTLLGASMDIHGGGFDLRFPHHDNELAQSEAYFENDCWVRYFLHTGHLTIAGCKMSKSLKNFITIKDALKKHSARQLRLAFLMHSWKDTLDYSSNTMESALQYEKFLNEFFLNVKDILRAPVDITGQFEKWGEEEAELNKNFYDKKTAIHKALCDNVDTRTVMEEMRALVSQCNLYMAARKAVRKRPNQALLENIALYLTHMLKIFGAVEEDSSLGFPVGGPGTSLSLEATVMPYLQVLSEFREGVRKIAREQKVPEILQLSDALRDNILPELGVRFEDHEGLPTVVKLVDRNTLLKEREEKRRVEEEKRKKKEEAARRKQEQEAAKLAKMKIPPSEMFLSETDKYSKFDENGLPTHDMEGKELSKGQAKKLKKLFEAQEKLYKEYLQMAQNGSFQ

SEQ ID NO: 749 - DNA, 597 bp, Homo sapien
agctgaagttgaggatctcttactctctaagccacggaattaacccgagcaggcatggaggcctctgctctcacctcatcagcagtgaccagtgtggccaaagtggtcagggtggcctctggctctgccgtagttttgcccctggccaggattgctacagttgtgattggaggagttgtggccatggcggctgtgcccatggtgctcagtgccatgggcttcactgcggcgggaatcgcctcgtcctccatagcagccaagatgatgtccgcggcggccattgccaatgggggtggagttgcctcgggcagccttgtgggtactctgcagtcactgggagcaactggactctccggattgaccaagttcatcctgggctccattgggtctgccattgcggctgtcattgcgaggttctactagctccctgcccctcgccctgcagagaagagaaccatgccaggggagaaggcacccagccatcctgacccagcgaggagccaactatcccaaatatacctgggtgaaatataccaaattctgcatctccagaggaaaataagaaataaagatgaattgttgcaactcttaaaaaaa

SEQ ID NO: 750 - protein, 122 aa, Homo sapien
MEASALTSSAVTSVAKVVRVASGSAVVLPLARIATVVIGGVVAMAAVPMVLSAMGFTAAGIASSSIAAKMMSAAAIANGGGVASGSLVGTLQSLGATGLSGLTKFILGSIGSAIAAVIARFY

SEQ ID NO: 751 - DNA, 2513 bp, Homo sapien
cgcgcagcgatggaggcgccggggctcgggcggtggaggcggagccggagcgcggccatggcggggtccctgagtgccagaggtggtggtgttgcttatcttctggaaccccatgcagccagatcccaggcctagcggggctggggcctgctgccgattcctgcccctgcagtcacagtgccctgagggggcaggggacgcggtgatgtacgcctccactgagtgcaaggcggaggtgacgccctcccagcatggcaaccgcaccttcagctacaccctggaggatcataccaagcaggcctttggcatcatgaacgagctgcggctcagccagcagctgtgtgacgtcacactgcaggtcaagtaccaggatgcaccggccgcccagttcatggcccacaaggtggtgctggcctcatccagccctgtcttcaaggccatgttcaccaacgggctgcgggagcagggcatggaggtggtgtccattgagggtatccaccccaaggtcatggagcgcctcattgaattcgcctacacggcctccatctccatgggcgagaagtgtgtcctccacgtcatgaacggtgctgtcatgtaccagatcgacagcgttgtccgtgcctgcagtgacttcctggtgcagcagctggaccccagcaatgccatcggcatcgccaacttcgctgagcagattggctgtgtggagttgcaccagcgtgcccgggagtacatctacatgcattttggggaggtggccaagcaagaggagttcttcaacctgtcccactgccaactggtgaccctcatcagccgggacgacctgaacgtgcgctgcgagtccgaggtcttccacgcctgcatcaactgggtcaagtacgactgcgaacagcgacggttctacgtccaggcgctgctgcgggccgtgcgctgccactcgttgacgccgaacttcctgcagatgcagctgcagaagtgcgagatcctgcagtccgactcccgctgcaaggactacctggtcaagatcttcgaggagctcaccctgcacaagcccacgcaggtgatgccctgccgggcgcccaaggtgggccgcctgatctacaccgcgggcggctacttccgacagtcgctcagctacctggaggcttacaaccccagtgacggcacctggctccggttggcggacctgcaggtgccgcggagcggcctggccggctgcgtggtgggcgggctgttgtacgccgtgggcggcaggaacaactcgcccgacggcaacaccgactccagcgccctggactgttacaaccccatgaccaatcagtggtcgccctgcgcccccatgagcgtgccccgtaaccgcatcggggtgggggtcatcgatggccacatctatgccgtcggcggctcccacggctgcatccaccacaacagtgtggagaggtatgagccagagcgggatgagtggcacttggtggccccaatgctgacacgaaggatcggggtgggcgtggctgtcctcaatcgtctcctttatgccgtggggggctttgacgggacaaaccgccttaattcagctgagtgttactacccagagaggaacgagtggcgaatgatcacagcaatgaacaccatccgaagcggggcaggcgtctgcgtcctgcacaactgtatctatgctgctgggggctatgatggtcaggaccagctgaacagcgtggagcgctacgatgtggaaacagagacgtggactttcgtagcccccatgaagcaccggcgaagtgccctggggatcactgtccaccaggggagaatctacgtccttggaggctatgatggtcacacgttcctggacagtgtggagtgttacgacccagatacagacacctggagcgaggtgacccgaatgacatcgggccggagtggggtgggcgtggctgtcaccatggagccctgccggaagcagattgaccagcagaactgtacctgttgaggcacttttgtttcttgggcaaaaatacagtccaatggggagtatcattgtttttgtacaaaaaccgggactaaaagaaaagacagcactgcaaataacccatcttccgggaagggaggccaggatgcctcagtgttaaaatgacatctcaaaagaagtccaaagcgggaatcatgtgcccctcagcggagccccgggagtgtccaagacagcctggctgggaaagggggtgtggaaagagcaggcttccaggagagaggcccccaaaccctctggccgggtaataggcctgggtcccactcacccatgccggcagctgtcaccatgtgatttattcttggatacctgggagggggccaatgggggcctcagggggaggccccctctggaaatgtggttcccagggatgggcctgtacatagaagccaccggatggcacttccccaccggatggacagttattttgttgataagtaaccctgtaattttccaaggaaaataaagaacagactaactagtgtctttc

SEQ ID NO: 752 - protein, 624 aa, Homo sapien
MQPDPRPSGAGACCRFLPLQSQCPEGAGDAVMYASTECKAEVTPSQHGNRTFSYTLEDHTKQAFGIMNELRLSQQLCDVTLQVKYQDAPAAQFMAHKVVLASSSPVFKAMFTNGLREQGMEVVSIEGIHPKVMERLIEFAYTASISMGEKCVLHVMNGAVMYQIDSVVRACSDFLVQQLDPSNAIGIANFAEQIGCVELHQRAREYIYMHFGEVAKQEEFFNLSHCQLVTLISRDDLNVRCESEVFHACINWVKYDCEQRRFYVQALLRAVRCHSLTPNFLQMQLQKCEILQSDSRCKDYLVKIFEELTLHKPTQVMPCRAPKVGRLIYTAGGYFRQSLSYLEAYNPSDGTWLRLADLQVPRSGLAGCVVGGLLYAVGGRNNSPDGNTDSSALDCYNPMTNQWSPCAPMSVPRNRIGVGVIDGHIYAVGGSHGCIHHNSVERYEPERDEWHLVAPMLTRRIGVGVAVLNRLLYAVGGFDGTNRLNSAECYYPERNEWRMITAMNTIRSGAGVCVLHNCIYAAGGYDGQDQLNSVERYDVETETWTFVAPMKHRRSALGITVHQGRIYVLGGYDGHTFLDSVECYDPDTDTWSEVTRMTSGRSGVGVAVTMEPCRKQIDQQNCTC

SEQ ID NO: 753 - DNA, 1078 bp, Homo sapien
gtgtcgcgcggcgcggtggcctcggtcggtaccctgggcgcggacgagctgcctcattagtattcgtacccacgaggcggcgcacggggccctcggggacagcgagcgtcgcgccatggcttatcactcgggctacggagcccacggctccaagcacagggcccgggcagccccggatccccctcccctcttcgatgacacaagcggtggttattccagccagcccgggggatacccagccacaggagcagacgtggccttcagtgtcaaccacttgcttggggacccaatggccaatgtggctatggcctatggcagctccatcgcatcccatgggaaggacatggtgcacaaggagctgcaccgttttgtgtctgtgagcaaactcaagtatttttttgctgtggacacagcctacgtggccaagaagctagggctgctggtcttcccctacacacaccagaactgggaagtgcagtacagtcgtgatgctcctctgcccccccggcaagacctcaacgcccctgacctctatatccccacgaaggccttcattacttacgtgctcctggctgggatggcactgggcattcagaaaaggttctccccggaggtgctgggcctgtgtgcaagcacagcgctggtgtgggtggtgatggaggtgctggccctgctcctgggcctctacctggccaccgtgcgcagtgacctgagcacctttcacctgctggcctacagtggctacaaatacgtgggaatgatcctcagtgtgctcacggggctgctgttcggcagcgatggctactacgtggcgctggcctggacctcatcggcgctcatgtacttcattgtgcgctctttgcggacagcagccctgggccccgacagcatggggggccccgtcccccggcagcgtctccagctctacctgactctgggagctgcagccttccagcccctcatcatatactggctgactttccacctggtccggtgaccccctggccccagatggcactgagtttttcattcattgaagatttgatttccttgaaaaaaaaaaaaaaaaaaaaaaaaa

SEQ ID NO: 754 - protein, 293 aa, Homo sapien
MAYHSGYGAHGSKHRARAAPDPPPLFDDTSGGYSSQPGGYPATGADVAFSVNHLLGDPMANVAMAYGSSIASHGKDMVHKELHRFVSVSKLKYFFAVDTAYVAKKLGLLVFPYTHQNWEVQYSRDAPLPPRQDLNAPDLYIPTKAFITYVLLAGMALGIQKRFSPEVLGLCASTALVWVVMEVLALLLGLYLATVRSDLSTFHLLAYSGYKYVGMILSVLTGLLFGSDGYYVALAWTSSALMYFIVRSLRTAALGPDSMGGPVPRQRLQLYLTLGAAAFQPLIIYWLTFHLVR

SEQ ID NO: 755 - DNA, 2272 bp, Homo sapien
aggcgcccgcccgccgcgcgtgattctcgcctcgccgcagcccagccctgcgcgccttgcccggcggcccccgcccggccgctccgggcccctggccccgcggagcgatgctgctgctggctgccgccttcctcgtggccttcgtgctgctgctgtacatggtgtctccgctcatcagccccaagcccctcgccctgcccggggcgcatgtggtggttacaggaggttccagtggcatcgggaagtgcattgctatcgagtgctataaacaaggagcttttataactctggttgcacgaaatgaggataagctgctgcaggcaaagaaagaaattgaaatgcactctattaatgacaaacaggtggtgctttgcatatcagttgatgtatctcaagactataaccaagtagagaatgtcataaaacaagcacaggagaaactgggtccagtggacatgctggtaaattgtgcaggaatggcagtgtcaggaaaatttgaagatcttgaagttagtacctttgaaaggttaatgagcatcaattacctgggcagcgtgtaccccagccgggccgtgatcaccaccatgaaggagcgccgggtgggcaggatcgtgtttgtgtcctcccaggcaggacagttgggattattcggtttcacagcctactctgcatccaagtttgccataaggggattggcagaagctttgcagatggaggtgaagccatataatgtctacatcacagttgcttacccaccagacacagacacacctggctttgccgaagaaaacagaacaaagcctttggagactcgacttatttcagagaccacatctgtgtgcaaaccagaacaggtggccaaacaaattgttaaagatgccatacaaggaaatttcaacagttcccttggctcagatgggtacatgctctcggccctgacctgtgggatggctccagtaacttctattactgaggggctccagcaggtggtcaccatgggccttttccgcactattgctttgttttaccttggaagttttgacagcatagttcgtcgctgcatgatgcagagagaaaaatctgaaaatgcagacaaaactgcctaatcttcttaccccttggaagaagactgtttccaaataatttgaacagcttgctgctaaatgggacccaatttttggcctatagacacttatgtattgttttcgaatacgtcagattggaccagtgctcttcaggaatgtggctgcaagcaaggggctagaagttcacctcctgacagtattattaatactatgcaaatatggaataggagaccatttgattttctaggctttgtggtagagaggtgaaggtatgagaattaatagcgtgtgaacaaagtaaagaacaggattccagaatgatcattaaatttgtttctatttattcttttttgcccccctagagattaagtccagaaatgtactttctggcacataaagaaatcttgaggactttgtttaaaccttccataaaaaaacaattttcggtttctcgggttctctctctctgtctctctgtctctctgtctctctgtctctctgtctctctctctctctctctttctttctttgtgtattttattcaagatgagttggacccattgccagtgagtctgaatgtcactgacagccctgtgttgtgctcaggactcactctgctgctggtggaaactcatggcttctctctctctttgatcccataaagctacgagggggacgggagagggcagtgcaatgggaagtaaagagatattttccagtaggaaaagcaatgctttcttgtctttagactcaaatgcttagggaacgtttcatttctcattcatggggaaaggcagcctccttaaatgttttctgaagagcggtaaaatctagaagcttaagaatttacagttccttcaataaccatgatgacctgaagttcacctatcccattttagcatctacttgtttttcccatctcttcctttccaattttgcttatactgctgtaatatttttgtaaaaaaaaaaaaaaaggaaaaaaaagaccagctaaaattttcgacttgactttttaacttaactcatgaattaattaaagcaaatgaaaaaattaaaaagtgtgactttttctcggagcatatatgtagcttttaggaaaggctgatgatggtataaagtttgctcattaagaaaaaaagacaaggctgattttgaagagagttgcttttgaaataaaatgatca

SEQ ID NO: 756 - protein, 332 aa, Homo sapien
MLLLAAAFLVAFVLLLYMVSPLISPKPLALPGAHVVVTGGSSGIGKCIAIECYKQGAFITLVARNEDKLLQAKKEIEMHSINDKQVVLCISVDVSQDYNQVENVIKQAQEKLGPVDMLVNCAGMAVSGKFEDLEVSTFERLMSINYLGSVYPSRAVITTMKERRVGRIVFVSSQAGQLGLFGFTAYSASKFAIRGLAEALQMEVKPYNVYITVAYPPDTDTPGFAEENRTKPLETRLISETTSVCKPEQVAKQIVKDAIQGNFNSSLGSDGYMLSALTCGMAPVTSITEGLQQVVTMGLFRTIALFYLGSFDSIVRRCMMQREKSENADKTA

SEQ ID NO: 757 - DNA, 5356 bp, Homo sapien
cgggattcggctggctctgccacaccaccgcgcgcccccgctccgcccgcccctccgggcgcgtcttttccgggctcgcgctgagtcccgcctccgccggctgtccgggtgcgcgcgcgccgctgcggctttttctctggcctccgccgcgcgctcctcctcgtcccagcgctagcgggcacgcggttcctttttgcgagctttccgagtgccaggcgccggccggctgcgaagacgcggtgggccgcccctccgattgaaatcacagaagatattcgtgttcttcttaagagaaaaagaggacattttagctttctcagttgaaggcgtactttattgtcggcttccaaagattactaacttttatctgtatcactaagattgaactgccttggctgtactgctattcttactgctgcttctattattgccttcttcagcacaataaggctttcaaaagccaaagaataacaagaaataagcaccattttagaagcctttccactatgaaacttaagctaaatgtgctcaccattattttgctgcctgtccacttgttaataacaatatacagtgcccttatatttattccatggtattttcttaccaatgccaagaagaaaaacgctatggcaaagagaataaaagctaagcccacttcagacaaacctggaagtccatatcgctctgtcacacacttcgactcactagctgtaatagacatccctggagcagatactctggataaattatttgaccatgctgtatccaagtttgggaagaaggacagccttgggaccagggaaatcctaagtgaagaaaatgaaatgcagccaaatggaaaagtttttaagaagttaattcttgggaattataaatggatgaactatcttgaagtgaatcgcagagtgaataactttggtagtggactcactgcactgggactaaaaccaaagaacaccattgccatcttctgtgagaccagggccgaatggatgattgcagcacagacctgctttaagtacaactttcctcttgtgactttatatgccacacttggcaaagaagcagtagttcatgggctaaatgaatctgaggcttcctatctgattaccagtgttgaacttctggaaagtaaacttaagactgcattgttagatatcagttgtgttaaacatatcatttatgtggacaataaggctatcaataaagcagagtaccctgaaggatttgagattcacagcatgcaatcagtagaagagttgggatctaacccagaaaacttgggcattcctccaagtagaccaacgccttcagacatggccattgttatgtatactagtggttctactggccgacctaagggagtgatgatgcatcatagcaatttgatagctggaatgacaggccagtgtgaaagaatacctggactgggaccgaaggacacatatattggctacttgcctttggctcatgtgctagaactgacagcagagatatcttgctttacctatggctgcaggattggatattcttctccgcttacactctctgaccagtccagcaaaattaaaaaaggaagcaaaggagactgtactgtactgaagcccacacttatggctgctgttccggaaatcatggatagaatttataagaatgttatgagcaaagtccaagagatgaattatattcagaaaactctgttcaagatagggtatgattacaaattggaacagatcaaaaagggatatgatgcacctctttgcaatctgttactgtttaaaaaggtcaaggccctgctgggagggaatgtccgcatgatgctgtctggaggggccccgctatctcctcagacacaccgattcatgaatgtctgcttctgctgcccaattggccagggttatggactgacagaatcatgtggtgctgggacagttactgaagtaactgactatactactggcagagttggagcacctcttatttgctgtgaaattaagctaaaagactggcaagaaggcggttatacaattaatgacaagccaaaccccagaggtgaaatcgtaattggtggacagaacatctccatgggatattttaaaaatgaagagaaaacagcagaagattattctgtggatgaaaatggacaaaggtggttttgcactggtgatattggagaattccatcccgatggatgtttacagattatagatcgtaagaaagatctagtgaagttacaagcaggagagtatgtatctcttgggaaagtagaagctgcactgaagaattgtccacttattgacaacatctgtgcttttgccaaaagtgatcagtcctatgtgatcagttttgtggttcctaaccagaaaaggttgacacttttggcacaacagaaaggggtagaaggaacttgggttgatatctgcaataatcctgctatggaagctgaaatactgaaagaaattcgagaagctgcaaatgccatgaaattggagcgatttgaaattccaatcaaggttcgattaagcccagagccatggacccctgaaactggtttggtaactgatgctttcaaactgaaaaggaaggagctgaggaaccattacctcaaagacattgaacgaatgtatgggggcaaataaaatgttgttgtcttattgacagttgtgcaggaggtagcctggtggttttcaacctctagaattttaagcctttgttgaactgttagaatgtaaggtatatcattctaaagatagagtaaaaagaaaacaaaaccaaaagttattaaaattgttgtccggtttactttaacttagttttgcatagttctagtgcagctgaaattgaaaagttatttccctttagctgtgttattatagagcagaaattctgtttttaaaaattagcctaagatatacttgtttttgtaaagaaaaatatttaatgttgaacaaaataaattggagttggagtagaatgtagtttgaggaaatttgcagcttccaatgcctcttgtcttcctatttcagaagtttaaatattaagcatgacagaaaatatgtattaacactactcaaagcaaaagtgctgcagggctttaaaattctcttccaaccatttatcttgaaggaaaaattcaatagtaatataatacacaaaatcaaataataccttagaaggtattaagattataattgttgcataggttagatatagagtcattgtaatgttgtgaataattacagtgcctaaaataagaatagaacaacatatacaacaccaaaaaatatctagtaatatatttaaagggaaattgagctgctttttttgaaactttgagatctaaaaataactgtaattatttgaatgactaagaggaaagtacattttttgaaatgctgaaaattgcctttctgtgtttattcaaactgaaaagctgagaccaagagcaaggaaggtaaaaagttaacaggcaaacattttctcttagaaaaggtgataaaatcataagtatttggaattagaacccttgcacagcactgaacctgggaaagagatttaaactctgaatttatctttgataacagggattgattttaaaatgtacatgtattaaattacatttgtaatttaaggtctgtttgctgttgctgattttattcttgatcagtagtttgcatttcagaaagcctttcattttgctttaagtttagcaaagcggggttataatgaatgacttccccaatatcttgcttgaacttacagtgattaacttggatgagttttgggaagttaaagggaagaaaacactgttatcattttttcctgtttgggaagagcttagaaactggaaatactagatttgggagaagggcagagttacttgataagggacttgatgtttgtgcagtaacttgggagtgtggtttctttttgaatctttaattaaaacctgggattatatatccctgataaatattcacacttgaaccatagttactgtaaaatgcaaaaaatcttaatactgttattctttgcactttttcttaatcattttttatatatatgcatatatatatgtgtgtgtgtgtgttgcttatgttgttttgtacagatgtgggccaccattgcaacaaaatacattctttttgctctaaaatatttatgaagaaaatacttaaatgttatgtatatggtggtaataagggaaaaatcaagtattataaacaagaatgaaggtttttgtaaagatttctgttcagcgttttgcaaggtaaaattttaggcaagttttccctgaagttatgtgtatgtgagtattctcattcttcccaacttgcctttgaagagtgaaataccattattatcaagtagactactgttcagcttttattccttccctggttgtttatcccttaggaatgagtttcttagactttcccaatatgtgattttttttcccatttagaatggtgattttaaatgtgtgagtgcatgtactatcttatctcagatatttgcacccccaatctgcccccaactcccaaaagctagaacactgccaactgatctgttataggtcctttagaaacacataattaacacttaaggttgggtgctgctaattctttgcaaaaatccaaatattgttaagggaccagggagatgccactaccccttgattttccatctaaaaatatacatgtttatgtaaacaaatctttccatatccatagtgacttttcaagtatttaagcctaaagattttgatctcacatttttatacctgtttaaattgctcacagttattacatacacatcagccatcaactaaagttgtactttaaaaatttactacaatatgtacatttctaagtcaaacacttgtgacttttgctttaattccatgaatgttcctgcctccttgatatttgtatttattctttttttctctagagtagaggtataattgtgtgatatttcagaaatacagataaatgattcaaaaagtcacagttaaggagaatcatgtttctttgatcatgaataactgattagtaagtcttgcctatattttcctgatagcatatgacaaatgtttctaaggtaacaagatgagaacagataaagattgtgtggtgttttggatttggagagaaatattttaatttttaaatgcagttacaaattataatgtattcatatttgtactttctgttaaaatgcatgattgcagaattgtttagattttgtgtttattcttgatgaaaagctttgtttgttcttgtttttaagtttgcactcaaatcttaagaaataaatccacccatgttatcaaaaaaaaaaaaaaaaaaaa

SEQ ID NO: 758 - protein, 711 aa, Homo sapien
MKLKLNVLTIILLPVHLLITIYSALIFIPWYFLTNAKKKNAMAKRIKAKPTSDKPGSPYRSVTHFDSLAVIDIPGADTLDKLFDHAVSKFGKKDSLGTREILSEENEMQPNGKVFKKLILGNYKWMNYLEVNRRVNNFGSGLTALGLKPKNTIAIFCETRAEWMIAAQTCFKYNFPLVTLYATLGKEAVVHGLNESEASYLITSVELLESKLKTALLDISCVKHIIYVDNKAINKAEYPEGFEIHSMQSVEELGSNPENLGIPPSRPTPSDMAIVMYTSGSTGRPKGVMMHHSNLIAGMTGQCERIPGLGPKDTYIGYLPLAHVLELTAEISCFTYGCRIGYSSPLTLSDQSSKIKKGSKGDCTVLKPTLMAAVPEIMDRIYKNVMSKVQEMNYIQKTLFKIGYDYKLEQIKKGYDAPLCNLLLFKKVKALLGGNVRMMLSGGAPLSPQTHRFMNVCFCCPIGQGYGLTESCGAGTVTEVTDYTTGRVGAPLICCEIKLKDWQEGGYTINDKPNPRGEIVIGGQNISMGYFKNEEKTAEDYSVDENGQRWFCTGDIGEFHPDGCLQIIDRKKDLVKLQAGEYVSLGKVEAALKNCPLIDNICAFAKSDQSYVISFVVPNQKRLTLLAQQKGVEGTWVDICNNPAMEAEILKEIREAANAMKLERFEIPIKVRLSPEPWTPETGLVTDAFKLKRKELRNHYLKDIERMYGGK

SEQ ID NO: 759 - DNA, 2077 bp, Homo sapien
ccgagcgccagcgcggggaaccgggaaaaggaaaccgtgttgtgtacgtaagattcaggaaacgaaaccaggagccgcgggtgttggcgcaaaggttactcccagacccttttccggctgacttctgagaaggttgcgcacagctgtgcccggcagtctagaggcgcagaagaggaagccatcgcctggccccggctctctggaccttgtctcgctcgggagcggaaacagcggcagccagagaactgttttaatcatggacaaacaaaactcacagatgaatgcttctcacccggaaacaaacttgccagttgggtatcctcctcagtatccaccgacagcattccaaggacctccaggatatagtggctaccctgggccccaggtcagctacccacccccaccagccggccattcaggtcctggcccagctggctttcctgtcccaaatcagccagtgtataatcagccagtatataatcagccagttggagctgcaggggtaccatggatgccagcgccacagcctccattaaactgtccacctggattagaatatttaagtcagatagatcagatactgattcatcagcaaattgaacttctggaagttttaacaggttttgaaactaataacaaatatgaaattaagaacagctttggacagagggtttactttgcagcggaagatactgattgctgtacccgaaattgctgtgggccatctagaccttttaccttgaggattattgataatatgggtcaagaagtcataactctggagagaccactaagatgtagcagctgttgttgtccctgctgccttcaggagatagaaatccaagctcctcctggtgtaccaataggttatgttattcagacttggcacccatgtctaccaaagtttacaattcaaaatgagaaaagagaggatgtactaaaaataagtggtccatgtgttgtgtgcagctgttgtggagatgttgattttgagattaaatctcttgatgaacagtgtgtggttggcaaaatttccaagcactggactggaattttgagagaggcatttacagacgctgataactttggaatccagttccctttagaccttgatgttaaaatgaaagctgtaatgattggtgcctgtttcctcattgacttcatgttttttgaaagcactggcagccaggaacaaaaatcaggagtgtggtagtggattagtgaaagtctcctcaggaaatctgaagtctgtatattgattgagactatctaaactcatacctgtatgaattaagctgtaaggcctgtagctctggttgtatacttttgcttttcaaattatagtttatcttctgtataactgatttataaaggtttttgtacattttttaatactcattgtcaatttgagaaaaaggacatatgagtttttgcatttattaatgaaacttcctttgaaaaactgctttgaattatgatctctgattcattgtccattttactaccaaatattaactaaggccttattaatttttatataaattatatcttgtcctattaaatctagttacaatttatttcatgcataagagctaatgttattttgcaaatgccatatattcaaaaaagctcaaagataattttctttactattatgttcaaataatattcaatatgcatattatctttaaaaagttaaatgtttttttaatcttcaagaaatcatgctacacttaacttctcctagaagctaatctataccataatattttcatattcacaagatattaaattaccaattttcaaattattgttagtaaagaacaaaatgattctctcccaaagaaagacacattttaaatactccttcactctaaaactctggtattataacttttgaaagttaatatttctacatgaaatgtttagctcttacactctatccttcctagaaaatggtaattgagattactcagatattaattaaatacaatatcatatatatattcacagagtataaacctaaataatgatctattagattcaaatatttgaaataaaaacttgatttttttgt

SEQ ID NO: 760 - protein, 318 aa, Homo sapien
MDKQNSQMNASHPETNLPVGYPPQYPPTAFQGPPGYSGYPGPQVSYPPPPAGHSGPGPAGFPVPNQPVYNQPVYNQPVGAAGVPWMPAPQPPLNCPPGLEYLSQIDQILIHQQIELLEVLTGFETNNKYEIKNSFGQRVYFAAEDTDCCTRNCCGPSRPFTLRIIDNMGQEVITLERPLRCSSCCCPCCLQEIEIQAPPGVPIGYVIQTWHPCLPKFTIQNEKREDVLKISGPCVVCSCCGDVDFEIKSLDEQCVVGKISKHWTGILREAFTDADNFGIQFPLDLDVKMKAVMIGACFLIDFMFFESTGSQEQKSGVW

SEQ ID NO: 761 - DNA, 2121 bp, Homo sapien
ctgctcgcggccgccaccgccgggccccggccgtccctggctcccctcctgcctcgagaagggcagggcttctcagaggcttggcgggaaaaaagaacggagggagggatcgcgctgagtataaaagccggttttcggggctttatctaactcgctgtagtaattccagcgagaggcagagggagcgagcgggcggccggctagggtggaagagccgggcgagcagagctgcgctgcgggcgtcctgggaagggagatccggagcgaatagggggcttcgcctctggcccagccctcccgcttgatcccccaggccagcggtccgcaacccttgccgcatccacgaaactttgcccatagcagcgggcgggcactttgcactggaacttacaacacccgagcaaggacgcgactctcccgacgcggggaggctattctgcccatttggggacacttccccgccgctgccaggacccgcttctctgaaaggctctccttgcagctgcttagacgctggatttttttcgggtagtggaaaaccagcagcctcccgcgacgatgcccctcaacgttagcttcaccaacaggaactatgacctcgactacgactcggtgcagccgtatttctactgcgacgaggaggagaacttctaccagcagcagcagcagagcgagctgcagcccccggcgcccagcgaggatatctggaagaaattcgagctgctgcccaccccgcccctgtcccctagccgccgctccgggctctgctcgccctcctacgttgcggtcacacccttctcccttcggggagacaacgacggcggtggcgggagcttctccacggccgaccagctggagatggtgaccgagctgctgggaggagacatggtgaaccagagtttcatctgcgacccggacgacgagaccttcatcaaaaacatcatcatccaggactgtatgtggagcggcttctcggccgccgccaagctcgtctcagagaagctggcctcctaccaggctgcgcgcaaagacagcggcagcccgaaccccgcccgcggccacagcgtctgctccacctccagcttgtacctgcaggatctgagcgccgccgcctcagagtgcatcgacccctcggtggtcttcccctaccctctcaacgacagcagctcgcccaagtcctgcgcctcgcaagactccagcgccttctctccgtcctcggattctctgctctcctcgacggagtcctccccgcagggcagccccgagcccctggtgctccatgaggagacaccgcccaccaccagcagcgactctgaggaggaacaagaagatgaggaagaaatcgatgttgtttctgtggaaaagaggcaggctcctggcaaaaggtcagagtctggatcaccttctgctggaggccacagcaaacctcctcacagcccactggtcctcaagaggtgccacgtctccacacatcagcacaactacgcagcgcctccctccactcggaaggactatcctgctgccaagagggtcaagttggacagtgtcagagtcctgagacagatcagcaacaaccgaaaatgcaccagccccaggtcctcggacaccgaggagaatgtcaagaggcgaacacacaacgtcttggagcgccagaggaggaacgagctaaaacggagcttttttgccctgcgtgaccagatcccggagttggaaaacaatgaaaaggcccccaaggtagttatccttaaaaaagccacagcatacatcctgtccgtccaagcagaggagcaaaagctcatttctgaagaggacttgttgcggaaacgacgagaacagttgaaacacaaacttgaacagctacggaactcttgtgcgtaaggaaaagtaaggaaaacgattccttctaacagaaatgtcctgagcaatcacctatgaacttgtttcaaatgcatgatcaaatgcaacctcacaaccttggctgagtcttgagactgaaagatttagccataatgtaaactgcctcaaattggactttgggcataaaagaacttttttatgcttaccatcttttttttttctttaacagatttgtatttaagaattgtttttaaaaaattttaa

SEQ ID NO: 762 - protein, 439 aa, Homo sapien
MPLNVSFTNRNYDLDYDSVQPYFYCDEEENFYQQQQQSELQPPAPSEDIWKKFELLPTPPLSPSRRSGLCSPSYVAVTPFSLRGDNDGGGGSFSTADQLEMVTELLGGDMVNQSFICDPDDETFIKNIIIQDCMWSGFSAAAKLVSEKLASYQAARKDSGSPNPARGHSVCSTSSLYLQDLSAAASECIDPSVVFPYPLNDSSSPKSCASQDSSAFSPSSDSLLSSTESSPQGSPEPLVLHEETPPTTSSDSEEEQEDEEEIDVVSVEKRQAPGKRSESGSPSAGGHSKPPHSPLVLKRCHVSTHQHNYAAPPSTRKDYPAAKRVKLDSVRVLRQISNNRKCTSPRSSDTEENVKRRTHNVLERQRRNELKRSFFALRDQIPELENNEKAPKVVILKKATAYILSVQAEEQKLISEEDLLRKRREQLKHKLEQLRNSCA

SEQ ID NO: 763 - DNA, 1186 bp, Homo sapien
gatgtccggctggagctgtcgcctccgccgccgctgctgccggtgccggttgtgagcgggtctccagtcggctcctctgggcgtctcatggcctctagcagctccctggtgcccgaccggctgcgcctgccgctctgcttcctgggtgtctttgtctgctatttttactatgggatcctgcaggaaaagataacaagaggaaagtatggggaaggagccaagcaggagacgttcacctttgccttaactttggtcttcattcaatgtgtgatcaatgctgtgtttgccaagatcttgatccagttttttgacactgccagggtggatcgtacccggagctggctctatgctgcctgttctatctcctatctgggtgccatggtctccagcaattcagcactacagtttgtcaactacccaactcaggtccttggtaaatcctgcaagccaatcccagtcatgctccttggggtgaccctcttgaagaagaagtacccgttggccaagtacctgtgtgtgctgttaattgtggctggagtggcccttttcatgtacaaacccaagaaagttgttgggatagaagaacacacagtcggctatggagagctactcttgctattatcgctgaccctggatggactgactggtgtttcccaggaccacatgcgggctcattaccaaacaggctccaaccacatgatgctgaacatcaacctttggtcgacattgctgctgggaatgggaatcctgttcactggggagctctgggagttcttgagctttgctgaaaggtaccctgccatcatctataacatcctgctctttgggctgaccagtgccctgggtcagagcttcatctttatgacggttgtgtattttggtcccctgacctgctccatcatcactacaactcgaaagttcttcacaattttggcctctgtgatcctcttcgccaatcccatcagccccatgcagtgggtgggcactgtgcttgtgttcctgggtcttggtcttgatgccaagtttgggaaaggagctaagaagacatcccactaggaagagagagactacctccacatcaagaatatttaagttattatctcaaacagtgacatctcttgggaaaatggacttaataggaatatgggactgagttccagtcttttttaataaaataaaatcaagc

SEQ ID NO: 764 - protein, 322 aa, Homo sapien
MASSSSLVPDRLRLPLCFLGVFVCYFYYGILQEKITRGKYGEGAKQETFTFALTLVFIQCVINAVFAKILIQFFDTARVDRTRSWLYAACSISYLGAMVSSNSALQFVNYPTQVLGKSCKPIPVMLLGVTLLKKKYPLAKYLCVLLIVAGVALFMYKPKKVVGIEEHTVGYGELLLLLSLTLDGLTGVSQDHMRAHYQTGSNHMMLNINLWSTLLLGMGILFTGELWEFLSFAERYPAIIYNILLFGLTSALGQSFIFMTVVYFGPLTCSIITTTRKFFTILASVILFANPISPMQWVGTVLVFLGLGLDAKFGKGAKKTSH

SEQ ID NO: 765 - DNA, 3213 bp, Homo sapien
  Unsure 2368: Unknown base
gcggttggctcggcgcgggagtcggctgcacgtgcgggcgggggcgatgcgtcactgatcggtgaggcgcggccgaggggtcggctttcctcgcgagcctgcggctgggcttcttctcagaggaacgagaatgaatatgactcaagcccgggttctggtggctgcagtggtggggttggtggctgtcctgctctacgcctccatccacaagattgaggagggccatctggctgtgtactacaggggaggagctttactaactagccccagtggaccaggctatcatatcatgttgcctttcattactacgttcagatctgtgcagacaacactacaaactgatgaagttaaaaatgtgccttgtggaacaagtggtggggtcatgatctatattgaccgaatagaagtggttaatatgttggctccttatgcagtgtttgatatcgtgaggaactatactgcagattatgacaagaccttaatcttcaataaaatccaccatgagctgaaccagttctgcagtgcccacacacttcaggaagtttacattgaattgtttgatcaaatagatgaaaacctgaagcaagctctgcagaaagacttaaacctcatggccccaggtctcactatacaggctgtgcgtgttacaaaacccaaaatcccagaagccataagaagaaattttgagttaatggaggctgagaagacaaaactccttatagctgcacagaaacaaaaggttgtggaaaaagaagctgagacagagaggaaaaaggcagttatagaagcagagaagattgcacaagtggcaaaaattcggtttcagcagaaagtgatggaaaaagaaactgaaaagcgcatttctgaaatcgaagatgctgcattcctggcccgagagaaagcgaaagcagatgctgaatattatgctgcacacaaatatgccacctcaaacaagcacaagttgaccccggaatatctggagctcaaaaagtaccaggccgttgcttctaacagtaagatctattttggcagcaacatccctaacatgttcgtggactcctcatgtgctttgaaatattcagatattaggactggaagagaaagctcactcccctctaaggaggctcttgaaccctctggagagaacgtcatccaaaacaaagagagcacaggttgatgcaagaggtggaaatgttctccatatcaagatgtggcccaaggggttaagtgggaacaatcattatacggactcttcagatttacagagaacttacacttcatctgttccacctctcctgcgatagtcctgggtgctccactgattggaggatagagccagctgtctgacacacaaatggtcttttcagccacagtcttatcaagtatcctatatgtattcctttctaaactgctactcatgaatgaggaaagtctgatgctaagatactgcctgcactggaatgttaaacactaaatatataacaagctgtgttttcctaagctgagatctgttgaataatgtttacattcgtcccccggggaaatgtatgctcagccaccattcaagagatgactgagaaggagatggtaagttcaagaagactgattgcacctgggacccaggccctttctttgggatccagtcccagccttcatccatgtgattaagatccaggccgctgaagttccccaggaaatgatcttccacttgagcaaccttttacttgatacgatttgcacctttctgttttcctgcagtcagggtggtggcctgcagggacctgagctttgctacccaaccagattcctcatagagattcctaatcactagtttcttgtattcataaactcagagatacagagggcttggtttgaagttggggtgagatgaaacctttgctctgagccaaagctctggggccttgcattccctgcattgggttgatgactgtcagcatcactgccgcaggccatgcttgactaaggtacctggttttagccacagccacctccttgtatgttacctttcagctctggccaagagtgggacagggttttaaccacaaataggagcagcatgcaattcctagtgacttgctgcacagtattgtatcataattacaggaagtttttatttttaaaactggatctgggtatattcatttgccccatcacctctgtctaaaggcccaagtcctagggctgccatggtcacaagcacactgatgctccttaagattgtttatctggagcccacatagtgtggaacaaaaagtcacctagaaagcatccttggtcatcattgtctccttcccacctggcccagagatgcttaaatccaagttgtttctccagctgtcacctcccncaggagatcaggattccactgacgtcctgggcagccagtgaatttaattttccatgagaaacaacagagttaacctgtggcattaggagacctacttcatgtggacccttttttttccttcagtttaacttttctggagcagtgtgctgcgtagttcggcctgagtttgtgcagcttgttaagacaactcttgtgtacgctatgttgaagctcaacaaaaaagtcatgggaccacttctagaaatctttcagctgtcaggcctgtcagtctcatgacagtttgttggttgtgccaaacactttatttgggaaaggaaagcccagatttgaatgggtctttcccctgggccttatcctatagaggcatttgtaatatggagaaaataatttttcatttttgctcatttaattctataaattctctttataaatgaattttgtgttctttagttctccttaaaagaacttttgaattataaaaataaaatctttacctgtcgaattgttgctgcagatgattgttgtggaaaatctggatcattgacctctgtgctttcattcctagagatgttttatagttacatgagcaaaagctgttgccccaaagtgatggccctggaggcggggctgaggaacagggaaatgccgctgtgaagtcttaaagcacttctgcttaaactccatgtgtgaggagtgtgcctccctgtgccctctcagctctgaggctggccgtctttcggggtgttccttttggcaaatatacactgtaatcttgagtctaaatttatatgttgaaatgctaccttttttaaaataagaaactaaataaaattattttactatca

SEQ ID NO: 766 - protein, 348 aa, Homo sapien [sequence omitted]

SEQ ID NO: 767 - DNA, 2077 bp, Homo sapien; identical to SEQ ID NO: 759

SEQ ID NO: 768 - protein, 318 aa, Homo sapien; identical to SEQ ID NO: 760

SEQ ID NO: 769 - DNA, 2989 bp, Homo sapien
gaccccctagtaacagaggcggtggctactgctgcggccactgggtttcggcctcttcccagcagcggctctaagaagcgcagcggaactcgaccggatccaacccagttagttacttcctgtctagagttgtagcttccacctgcaccttctagccaccatggcaacctcatctgaagaagttttgctgattgtaaagaaagtgcgtcaaaagaagcaggatggagctctgtacctcatggcagaaagaattgcttgggcacctgaaggcaaagatagatttacaatcagccatatgtatgcagatattaaatgccagaaaattagtccagaaggaaaagctaaaattcagcttcagctggtcctacatgcaggggacacaactaacttccatttttccaatgaaagcacagcagtgaaagagcgagatgcagtaaaagaccttcttcagcagctgctgcccaaattcaagaggaaagcaaataaagaactggaagagaagaacagaatgctgcaagaagatcctgttttgtttcagctttataaagaccttgttgtgagtcaagtgatcagtgctgaggaattctgggccaatcgtttaaatgtgaatgcaacagatagttcttccacatccaatcataagcaggatgttggcatttctgctgcatttctggctgatgtccggccccaaactgatggctgtaacggtctaagatataatttaacttctgatatcattgagtccatatttaggacctatccagcagtaaaaatgaaatatgcagaaaatgttccccacaacatgacagagaaggaattctggacacgttttttccagtcccattattttcacagggatcggctgaatacagggtcaaaggatctctttgcagaatgtgccaaaatagatgaaaaaggcctaaaaacaatggtttcattaggagtgaaaaacccactactagatttaacagctttggaagataaaccattagatgagggctatggcatttcctctgtgccatctgcttccaattctaaatccataaaagagaatagtaatgctgccatcatcaagagatttaaccatcacagtgccatggtcctggcagctggactcagaaaacaagaagcacaaaatgaacaaactagtgagcccagcaacatggatggaaattccggagatgcagactgctttcagccagcagtcaaaagggcgaaattacaagagtccattgaatatgaagacttggggaaaaataattctgtaaaaacgattgcactaaacctcaagaagtcagataggtattatcatggtccaactccaatccagtcactacagtatgcaacaagtcaggacattattaattcttttcaaagtattagacaagaaatggaagcttatacacccaagttaactcaggttctctcaagtagtgctgccagtagtaccatcacagcactgtcacctggaggggcacttatgcagggaggaacacagcaagccataaaccagatggtgccaaatgatattcaatctgaattgaaacacttatatgtagctgttggagaacttctacgacatttctggtcctgctttcctgttaatacgccattcctagaagaaaaggtagtgaaaatgaaaagtaatttggaacgattccaagttacgaagctctgtccattccaagaaaagattcggagacagtatttaagcacaaatttggtaagtcacatagaagagatgctccagacagcctacaacaagctccacacatggcagtcacggcgtctgatgaagaaaacgtgaggtggccatgatgcttacaggttttgtgagattgagagaactatgacctgcagcaactctggaaacctggcctgacagacaagcagatgacctcacaggagtgataagaaacatctgctccacgccaactcccagagctgatgctattgtacttgcacattggagactgaaaggaaagaagggactaaatgctggggaggtaaattaagacagaaccaaatgagctaagttgcaaatatatatatatacacacacacacatatatgtacatgtgtatgtacatatatattttaaaagactgtttactgcagttgctcaggaactgcttttgattcacattaagctgctttcagaaattaaaaaaacactttttaaagggtgcattgataaaatctgaggttttttggttgtcgtttttttctgtgtacatttttttcctaagtttatggcacagggtagaccttaagtattcctcctccatccttcattcttcaccctccattggatcctcaagttttaatgaattccaattataccttacatcagcaagttaaaaaaagtactttaaaataaagcaaagggagactgttgctcaaccatcaggaaacagttgtcagaagacatcattggttctgtgtttcctacggaaataagaaacgataaatattgcactgaatgtttgtggtttggagtccctgaataataaagagggaatatatttgcagaaagtcgcatagggttttttaatgcagaattttgtcagaagacaatggcgctgcatgtttttctttgagtgcaaatgtacattgctaagatttttttaagatggcatgtgctttgaaaagaagatattgcatttttaagagtttaaaaatcttatgagtgagaaatattaaaaaaatcttattttcacctctttagaagaaataaaagatgtttctcctatctccttttctctagtatttgactgttactgtccttggcgaatcgataatcattgcatagtgactgaaaagcctaagtgcaaaaaaaaaaaaaaaaagatgttcttgtttctgaacttcgtgccatattttgttcctgatgggatcaacttaatgtttaagactttagatgtcttgtattaaaaattacacaaaaaaagtaaaactttttatacttaaaaaaaaaaaaaaaaaaaaa

SEQ ID NO: 770 - protein, 548 aa, Homo sapien
MATSSEEVLLIVKKVRQKKQDGALYLMAERIAWAPEGKDRFTISHMYADIKCQKISPEGKAKIQLQLVLHAGDTTNFHFSNESTAVKERDAVKDLLQQLLPKFKRKANKELEEKNRMLQEDPVLFQLYKDLVVSQVISAEEFWANRLNVNATDSSSTSNHKQDVGISAAFLADVRPQTDGCNGLRYNLTSDIIESIFRTYPAVKMKYAENVPHNMTEKEFWTRFFQSHYFHRDRLNTGSKDLFAECAKIDEKGLKTMVSLGVKNPLLDLTALEDKPLDEGYGISSVPSASNSKSIKENSNAAIIKRFNHHSAMVLAAGLRKQEAQNEQTSEPSNMDGNSGDADCFQPAVKRAKLQESIEYEDLGKNNSVKTIALNLKKSDRYYHGPTPIQSLQYATSQDIINSFQSIRQEMEAYTPKLTQVLSSSAASSTITALSPGGALMQGGTQQAINQMVPNDIQSELKHLYVAVGELLRHFWSCFPVNTPFLEEKVVKMKSNLERFQVTKLCPFQEKIRRQYLSTNLVSHIEEMLQTAYNKLHTWQSRRLMKKT

SEQ ID NO: 771 - DNA, 6245 bp, Homo sapien
gagaagaagtggcaggtgatgctgaagcgggggagaagcggcagagccggccacacagtgcaggggatggagacaggtgctgggctggtcctcctgcagcatcctcagttgttggagggcagtcatcctcaggccgtacccagccagagaagaaaaagaacagtgtgaagccacgtgtgatagccgtccaacatcggctcttccctccaattacattgtagttgattgtgtctcaaaccatgaattatgtgggacagctggctgggcaggtgattgtcactgtgaaggaactctacaagggcattaaccaggccaccctctctgggtgcattgatgtcatcgtggtacagcagcaggatggcagctatcagtgttcaccttttcacgttcggtttggaaagctgggagtcctgagatccaaagagaaagtgattgatatagaaatcaacggcagtgcagtggatcttcacatgaagttgggtgataacggagaagctttctttgttgaggagactgaagaagaatatgaaaagcttcctgcttaccttgccacctcaccaattcctactgaagatcagttctttaaagatattgacacccctttggtgaaatcgggtggagatgaaacaccatctcagagttcagacatctcacacgtcttggaaacagagacaatttttactccaagttctgtgaaaaagaaaaaacgaaggagaaagaaatacaaacaggacagtaagaaggaagagcaggccgcatctgctgctgcagaagacacatgtgatgtaggcgtgagctccgatgatgacaagggggcccaggcagcacgaggatcttcaaatgcttccttgaaagaagaagaatgtaaagagcctttgctcttccattctggggatcattaccccttatctgatggagattggtcccctttagagaccacctatccccagacagcgtgtcctaagagtgattcagagctggaggtgaaacctgcggagagcctgctcagatcagagtctcacatggagtggacgtggggcggattcccagagtccaccaaggtcagcaaaagagaacgatctgaccatcatcctaggacagctacaattacaccatcagaaaatactcattttcgggtaattcccagtgaggacaacctcatcagtgaagttgagaaggatgcttccatggaagacactgtctgtaccatagtgaagcccaaacccagagccctgggtacacagatgagcgacccaacatctgtggcagagcttctcgaacctcctcttgagagtactcagatttcatctatgttagatgctgaccaccttcccaacgcagccttagcggaggcgccctcagaatccaaaccggcagctaaagtagactcgccgtcaaagaagaaaggtgttcacaaaagaagccaacaccagggacctgatgatatttaccttgatgacttaaagggtctagaacctgaagttgcagctctttatttccctaaaagtgaatcggagcccggttccaggcagtggcccgagtctgacacactctctggctcccagtccccacagtccgtgggaagcgcagctgcagatagcggcaccgagtgcctctcagattctgccatggacttgcctgacgttaccctctccctttgcgggggcctcagtgaaaatggagaaatttcaaaagaaaaattcatggagcatatcattacttatcacgaatttgcagaaaaccctggacttatagacaatcctaaccttgtaataaggatatataatcgttactataactgggctttggcagctcccatgatccttagcttgcaagtattccagaagagcttgcctaaggccacagttgagtcctgggtgaaagacaagatgccaaagaaatctggtcgctggtggttttggcgaaagagagaaagcatgaccaaacagctgccagaatccaaggagggaaaatctgaggcaccgccagccagtgacctgccatccagctccaaggagccggccggtgccaggccggccgagaatgactcctcgagtgacgagggatcacaggagctcgaagaatccatcacagtggaccccatccccacagagcccctgagccacggcagcacaacttcatataagaagtctctccgcctctcctcagaccagatcgcaaaactgaagctccacgatggcccaaatgatgttgtgtttagtattacaacccagtatcaaggcacctgtcgctgtgcagggaccatttacctgtggaactggaatgacaagatcatcatttctgatattgatgggacaataaccaagtcggatgctttgggacagattctcccacagctgggcaaagactggacccaccagggtatagcaaagctctaccattccatcaatgagaatggctacaagtttctgtactgctcggctcgtgccatcggcatggccgacatgacccgtggctacctgcactgggtcaatgacaagggcacaatcttgccccggggccccctgatgctgtcccccagcagcttgttctccgccttccacagagaagtgatagaaaagaaaccagagaagttcaaaattgagtgtctaaatgatatcaagaatctgtttgccccgtctaagcagcccttctatgctgcctttggaaaccgtccaaatgatgtctatgcctacacacaagttggagttccagactgtagaatattcaccgtgaaccccaagggtgaattaatacaagaaagaaccaaaggaaacaagtcatcgtatcacaggctgagtgagctcgtggagcatgtgttcccccttctcagtaaggagcagaattccgcttttccctgcccggagttcagctccttctgctactggcgagacccgatccctgaagtggacctggatgacctgtcttgaggcggcacctcagtgggtgggcagggcttggtccccctccccacagcaagggaaggcagctggctcttctgctgacctcagataccagccttccccagcggggacgggtgcttctggagctggtcccgccatcctcctttgccttcccaggccagctgctcaggctcggcaggtctgcagctcagctcctggaaggagaagggaggaactgggcctggggctggaggcctgggatccctcctttgtgggtcgcacacatgtttcctgctgtgagctggggcctccttccattgcatcattttaaaggaagaaaaaagcagctaaaaaagagtggaccaaaacactgcacacagtgaagtgttccagtttccactgggcagttgaggtggcttctgtaaccagggctgtcttcagatgtcagggtccctgaactgctgcgggcccagtcagtgatgctggctgaagctgcctgtgcacgtttcttctctggtcgcctcatttcctgctacactgaaggggtcagctgctccagtgggccaagttgggcaggacccccgcccctgcagggcccatgcaccagagccactgagcccagtcccataaacctggccctctttggggaaagatccccacagagcatcctcctctcatctgtgacaactccacgagcccttaatttcttagtcctcaccagaagaacaggtctcacaagtatatatttgatgtctgtaataaaagtgggaaggtgggtcttaaaacagaccaaaccccgccccgcccccaacaactctgcttttagggaggcctccgaaatgcagataggcggttgagtggggtcctgggaagagcgctgaatccctctgcttgctgcctggtgtgggcctttggaaagcatcttgccttgggacaggatttctaaaattctgtgattcagatttgtcagggaagcacagtgaagcttgcttaaaggcactggccagcagtgtgtgactttggcttttgggatcacaccctgtaatcgggcccgtggaagcagcgtcaaagaggggtcttggagctcctatggagcagactgccccccgagcagtgtccccagcctagccctgtgagaccccatggggacacgggtgcctatgtattttcactaaaatatacatggtagctccatttactgatgcggttgtaatgagctcacatcgtgtctgaagagatggcaccagggaaaggtgtgccataagctgctccagagcttttggtatgctgagtgttgacagagctgcactcttaacatcaagagaactgtcaggagcccagaaccaaccccaggtcttggtctccattggcgagaacacaggacgtggtggttcctgagcagagagggatctgcagatacaggcttggcgctcggggtggtctcgtggccaactcttcatgcccctgccgttgtagtggaacctctacatgttttagtttgcttcacctaaaataatgctgatctagagatagagaaataggggtggttatttttccagattggagagttgaaagtccctgactgatttcagccattttcctagtgcttgtcggatgcagagacaatgttgaaatcccctaaacacagttctcagtggcaaaacctaggaaggctcatgttcccagagaagggaccacatgagccttctcccatgcaaagcttcccccagcttaaatagttgataaggactaattgtttaatgagtttatttatctacagtaggttagggatcctgggttctgtttatatgaagttcttcccagtttgtgaattctagtacagcagccatgcagccaccttatttcatagatgccatctgtgtgtcctcttgactaccttctatttagaggaagaatgagagctttgtgtgtttaactgagcttatagtaggacttctttgcatatgtatggtactgaaaaatcttaatatacatctttaatcctttttaggttgtcctttaaagagtttttgactagtttctttttcttgacagctcttctctttggacacatgggccttcttagagggttcagtctaggacccggctctcctggccctgtgttgagggtagctggtccctctgtccctgtgtctgctagcactagactttgttgctgcagattgatccagtgggtacataggctaattaatgtgagtctttttccttgtttaaaggagtccctcttgctgaaagtagatgattactattgctgtagtgttaggaaagtattaagtttgtgctgaaaatccattgccatttggtacaaatgacatttgttctttctgtgaaagagatgccctcgagtgtgtttgtacacaaacccttaggatggtgagttgaagcatcaccctcgcgctatcttcagtgacgggtgacggctcagggagatggcaggcagattgggctctaagtcattattctctcagttactccattggtgaaatggccctttccctctttgcagttcagtctaagtctcgtatttgctttgctgtctgtgtgctgaagctcgtcccgtgtgagttgctgtctgccccttgtcaggctgtgaggtgctcgtgtagacctggagcatgcaggctgcctccgtttttgggtactgtgttgtgttttgctctgtctaaaaacatctgcatagttttcaactggaaaaagaaaaaacttaaaaatgggatgtcctaaaatgaaagctgctcaaagtcacagaacaaccgagggacaaaggagattggatgactgggaagcgctggcccggaacagcccctgcaactgtggggcctgcacacagcccttccacagttggcactgcaggtgcaggccaaccctttaaagaataaacaaggaagtcagctctttcactttttacaagttggcaaaaacagacttccggggaatttcgatgttttcccgtgttgtagagcttccagggtttaataaaactggttaaaaattgagtctttccctgaagtaagtgctctttccagatgaaaactactcttttggttttgtttgaaagtaagaaagggaggggaaactttgctcttttaataattatgttcagcctatgatgaagtatttgattattagacagcaatgtcactaataagttttaagttgtccaaagttaattgtaaacatcatcagtacagtactcttagttacagtaaagcaattgttgcaagatgaatggctaatattttggtgcagtgtttgatgttcaaaacaaaatgttacaacaataaacgaacataacataaactgaaaaaaaaaaaaaaaaaa

SEQ ID NO: 772 - protein, 896 aa, Homo sapien
MNYVGQLAGQVIVTVKELYKGINQATLSGCIDVIVVQQQDGSYQCSPFHVRFGKLGVLRSKEKVIDIEINGSAVDLHMKLGDNGEAFFVEETEEEYEKLPAYLATSPIPTEDQFFKDIDTPLVKSGGDETPSQSSDISHVLETETIFTPSSVKKKKRRRKKYKQDSKKEEQAASAAAEDTCDVGVSSDDDKGAQAARGSSNASLKEEECKEPLLFHSGDHYPLSDGDWSPLETTYPQTACPKSDSELEVKPAESLLRSESHMEWTWGGFPESTKVSKRERSDHHPRTATITPSENTHFRVIPSEDNLISEVEKDASMEDTVCTIVKPKPRALGTQMSDPTSVAELLEPPLESTQISSMLDADHLPNAALAEAPSESKPAAKVDSPSKKKGVHKRSQHQGPDDIYLDDLKGLEPEVAALYFPKSESEPGSRQWPESDTLSGSQSPQSVGSAAADSGTECLSDSAMDLPDVTLSLCGGLSENGEISKEKFMEHIITYHEFAENPGLIDNPNLVIRIYNRYYNWALAAPMILSLQVFQKSLPKATVESWVKDKMPKKSGRWWFWRKRESMTKQLPESKEGKSEAPPASDLPSSSKEPAGARPAENDSSSDEGSQELEESITVDPIPTEPLSHGSTTSYKKSLRLSSDQIAKLKLHDGPNDVVFSITTQYQGTCRCAGTIYLWNWNDKIIISDIDGTITKSDALGQILPQLGKDWTHQGIAKLYHSINENGYKFLYCSARAIGMADMTRGYLHWVNDKGTILPRGPLMLSPSSLFSAFHREVIEKKPEKFKIECLNDIKNLFAPSKQPFYAAFGNRPNDVYAYTQVGVPDCRIFTVNPKGELIQERTKGNKSSYHRLSELVEHVFPLLSKEQNSAFPCPEFSSFCYWRDPIPEVDLDDLS

SEQ ID NO: 773 - DNA, 4322 bp, Homo sapien
gggaccgacgacacgcccccctctcctcctttgttccgggggtcggcggccgctctcctgccagagctcgggatctcggccccgggaggcgggcgctcgggcgcagccgcgaagatgccgttggaactgacgcagagccgagtgcagaagatctgggtgcccgtggaccacaggccctcgttgcccagatcctgtgggccaaagctgaccaactcccccaccgtcatcgtcatggtgggcctccccgcccggggcaagacctacatctccaagaagctgactcgctacctcaactggattggcgtccccacaaaagtgttcaacgtcggggagtatcgccgggaggctgtgaagcagtacagctcctacaacttcttccgccccgacaatgaggaagccatgaaagtccggaagcaatgtgccttagctgccttgagagatgtcaaaagctacctggcgaaagaagggggacaaattgcggttttcgatgccaccaatactactagagagaggagacacatgatccttcattttgccaaagaaaatgactttaaagcgtttttcatcgagtcggtgtgcgacgaccctacagttgtggcctccaatatcatggaagttaaaatctccagcccggattacaaagactgcaactcggcagaagccatggacgacttcatgaagaggatcagttgctatgaagccagctaccagcccctcgaccccgacaaatgcgacagggacttgtcgctgatcaaggtgattgacgtgggccggaggttcctggtgaaccgggtgcaggaccacatccagagccgcatcgtgtactacctgatgaacatccacgtgcagccgcgtaccatctacctgtgccggcacggcgagaacgagcacaacctccagggccgcatcgggggcgactcaggcctgtccagccggggcaagaagtttgccagtgctctgagcaagttcgtggaggagcagaacctgaaggacctgcgcgtgtggaccagccagctgaagagcaccatccagacggccgaggcgctgcggctgccctacgagcagtggaaggcgctcaatgagatcgacgcgggcgtctgtgaggagctgacctacgaggagatcagggacacctaccctgaggagtatgcgctgcgggagcaggacaagtactattaccgctaccccaccggggagtcctaccaggacctggtccagcgcttggagccagtgatcatggagctggagcggcaggagaatgtgctggtcatctgccaccaggccgtcctgcgctgcctgcttgcctacttcctggataagagtgcagaggagatgccctacctgaaatgccctcttcacaccgtcctgaaactgacgcctgtcgcttatggctgccgtgtggaatccatctacctgaacgtggagtccgtctgcacacaccgggagaggtcagaggatgcaaagaagggacctaacccgctcatgagacgcaatagtgtcaccccgctagccagccccgaacccaccaaaaagcctcgcatcaacagctttgaggagcatgtggcctccacctcggccgccctgcccagctgcctgcccccggaggtgcccacgcagctgcctggacaaaacatgaaaggctcccggagcagcgctgactcctccaggaaacactgaggcagacgtgtcggttccattccatttccatttctgcagcttagcttgtgtcctgccctccgcccgaggcaaaacgtatcctgaggacttcttccggagagggtggggtggagcagcgggggagccttggccgaagagaaccatgcttggcaccgtctgtgtcccctcggccgctggacaccagaaagccacgtgggtccctggcgcctgcctttagcctgggggcccccacctccactctctgggttcctaggaatgtccagcctcggagaccttcacaaagccttgggagggtgatgagtgctggtcctgacaagaggccgctggggacactgtccgttttgtttcgtttctgtgatctcccggcacgtttggagctgggaagaccacactggtggcagaatcctaaaattaaaggaggcagcctcctagttgctgaaagttaaggaatgtgtaaaacctccacgtgactgtttggtgcatcttgacctgggaagacgcctcatgggaacgaacttggacaggtgttgggttgacccctcttctgcaggaagtccctgagctgagacgcaaagttggctgggtggtggtcggcaccctggctcctgcaggtccacacaccttccaggcctgtggcctgcctccaaagatgtgcaagggcaggctggctgcacggggagagggaagtattttgccgaaatatgagaactggggcctcctgctcccagggagctccagggcccctctctcctcccacctggacttggggggaactgagaaacactttcctggagctgctggcttttgcacttttttgatggcagaagtgtgacctgagagtcccaccttctcttcaggaacgtagatgtcggggtgtcttgccctggggggcttggaacctctgaaggtggggagcggaacacctggcatccttccccagcacttgcattacggtccctgctcttccaaggtggggacagtggcccaagcaaggcctcacacgcagccacttcttcaagagctgcctgcacactgtcttggagcatctgccttgtgcctggcactctgccggtgccttgggaaggtcggtaagagtggactttgtcctgggcttcccttcatggcgtctagacacttttgtggtgatggaaagcatgggacctgtcgtctcagcctgttggtttctcctcattgcctcaaaccctggggtaggtggaacggggggtctcgtgcccagatgaaaccatttggaaactcggcagcagagtttgtccaaatgacccttttcaggatgtctcaaagcttgtgccaaaggtcacttttctttcctgccttctgctgtgagccctgagatcctcctcccagctcaagggacaggtcctgggtgagggtgggagatttagacacctgaaactgggcgtggagagaagagccgttgctgtttgttttttgggaagagcttttaaagaatgcatatttttttacctggttggaattgagtaggaactgaggctgtgcttcaggtatggtacaatcaagtgggggattttcatgctgaacccattcaaagccctccccgtccccgcatttccaggccaccctttggctggcgtctgctggagaggatgtctctgtcgcattcccgtgcagctcagctcgcgcaggttttctctctctccctggatgttgagctctcatcagaatatgtgggtggggggtggacgtgcacgggtgcatgattgtgcttaacttggttgtatttttcgatttgacatggaagcctgttgctttgctctagagaatagtttctcgtgtccccttcgcacgcctcattctttgaacctcatctctgatgtttgatacagatgggggcttgatagctgtggtcccctttcccttctgactacgtgaaaatcaatacctaaatacagaagccttggtctaaacaccgagacttttagtttgcgaaggggcttagatagggagagaggtaacatgaatctggacaggggagggagatactatagaaaggagaacactgcatactttgcaaagccagtgacctccttttgaaggggacattggacgggggccgggggcgggggttcggtttgactaccgtcatgaacttttggcgtatactgattcctccaactctccaccccacaaaataacggggaccaatatttttaactttgcctatttgtttttgggtgagtttcccccctccattattctgtcctgagaccacgggcaaagctcttccattttgagagagaagaaaaactgtttggaaccacaccaatgatatttttctttgtaatacttgaaatttatttttttattattttgatagcagatgtgctatttatttatttaatatatgtataaggagtcctaaacaatagaaagctgtagaagctgtagagataggcttcagttgttaattggtttggagcctcctatgtgtgacttatgactctctgtgttctgtgtatttgtctgaattaatgacctgggatataaagctatgctagctttcaaacaggagatgccttcagaaagctttgtatattttgcagttgccagaccaataaaatacctggttgaaatacatggacgaaaaaaaaaaaaaaaaaaaaaaa

SEQ ID NO: 774 - protein, 520 aa, Homo sapien
MPLELTQSRVQKIWVPVDHRPSLPRSCGPKLTNSPTVIVMVGLPARGKTYISKKLTRYLNWIGVPTKVFNVGEYRREAVKQYSSYNFFRPDNEEAMKVRKQCALAALRDVKSYLAKEGGQIAVFDATNTTRERRHMILHFAKENDFKAFFIESVCDDPTVVASNIMEVKISSPDYKDCNSAEAMDDFMKRISCYEASYQPLDPDKCDRDLSLIKVIDVGRRFLVNRVQDHIQSRIVYYLMNIHVQPRTIYLCRHGENEHNLQGRIGGDSGLSSRGKKFASALSKFVEEQNLKDLRVWTSQLKSTIQTAEALRLPYEQWKALNEIDAGVCEELTYEEIRDTYPEEYALREQDKYYYRYPTGESYQDLVQRLEPVIMELERQENVLVICHQAVLRCLLAYFLDKSAEEMPYLKCPLHTVLKLTPVAYGCRVESIYLNVESVCTHRERSEDAKKGPNPLMRRNSVTPLASPEPTKKPRINSFEEHVASTSAALPSCLPPEVPTQLPGQNMKGSRSSADSSRKH

SEQ ID NO: 775 - DNA, 2446 bp, Homo sapien
gcgccgcggcgcggagtcccggctgcgggatagaccgagggccatggccgcctctcccggacccgccggcgttggcggcgccggagcagtctacggctccggctcttcgggcttcgccctcgactcgggactggagatcaaaactcgctcggtggagcagacgctactcccgctggtttctcagatcaccacgcttattaatcataaagataataccaaaaagtctgataaaactctgcaagcaattcagcgtgtaggacaagctgtcaacttggcagttggaagatttgttaaagtaggagaagctatagccaatgaaaactgggatttgaaagaagaaataaatattgcttgtattgaagctaaacaagcaggagaaacaattgcagcacttacagacataaccaacttgaaccatctggaatctgatgggcagatcacaatttttacagacaaaacaggagtgataaaggctgcaagattacttctttcttcagtgacaaaagtgttgttgctggcagaccgagtagtcattaaacagataataacatcaagaaataaggttctcgcaactatggaaagactagagaaagtgaatagctttcaagagtttgtccaaatattcagtcaatttggaaatgaaatggtggagtttgcacatctgagtggagatagacaaaatgatttgaaagatgaaaagaaaaaggcaaaaatggcagcagctagggcagttcttgaaaagtgtacaatgatgcttctcacagcttcaaagacatgtctgaggcatcctaactgcgaatcagcccataaaaacaaagaaggagtatttgaccgtatgaaagtggcattggataaggtcattgaaattgtgactgactgtaaaccgaatggagagactgacatttcatctatcagtatttttactggaattaaggaattcaagatgaatattgaagctcttcgggagaatctttattttcagtccaaagagaacctttctgtgacattggaagtcatcttggagcgtatggaggactttactgattctgcctacaccagccatgagcacagagaacgcatcttggaactgtcaactcaggcgagaatggaactgcagcagttaatttctgtgtggattcaagctcaaagcaagaaaacaaaaagcatcgctgaagaactggaactcagtattttgaaaatcagtcacagtcttaatgaacttaagaaagaacttcatagtacagcgacacagctggcagcagatctattaaaataccatgctgatcatgtggttctaaaagcattaaaacttactggagtagaaggaaatttagaagctttggctgaatatgcctgtaaactctctgaacagaaagagcagcttgttgagacctgtcgattgttacgacacatatctgggacagaacctctggaaataacctgtatacatgcagaggagacatttcaggtgactggccaacagataatttctgctgctgaaacattgacattgcatccatctagtaaaattgctaaagaaaacctagatgtattttgtgaagcttgggaatcccaaattagtgacatgtcaacactgctgagagaaatcaatgacgtgtttgaaggaagacgaggagagaagtatggctacctttcacttccaaagccaatgaagaataatgcaaacctgaaatcattaaagccagacaagcctgactctgaggagcaagccaagatagcaaagcttggacttaagctgggtttgctcacctctgacgctgactgcgaaattgagaagtgggaagatcaggagaatgagattgttcaatatggacggaacatgtccagtatggcctattctctgtatttatttactagaggagaggggccactgaaaacttcccaggatttaattcatcaactagaggtttttgctgcagagggtttaaagcttacttccagtgttcaagctttttcaaaacagctgaaagacgatgacaagcttatgcttctcctggaaataaacaagctaattcctctatgccaccagctccagacagtaactaagacttctttgcagaataaagtatttctaaaggttgacaagtgtattacgaagacaagatccatgatggctctcttagtccaacttctttcactttgttataaactgctgaagaagcttcagatggaaaataacggatgggtctcagttacaaataaggacactatggatagtaaaacttgagaagcttttggggtcagatctctggaacatcatgtgatgaagctgacatttttaaaaatcaaatgatcctttatcttttcagaaattcatcaattttataaagaaaacaatattgaaattttgctctattttctgatcatgaaactgattgtaaagctttttgacaactaataaatgtcttggtaattgctagattct

SEQ ID NO: 776 - protein, 734 aa, Homo sapien
MAASPGPAGVGGAGAVYGSGSSGFALDSGLEIKTRSVEQTLLPLVSQITTLINHKDNTKKSDKTLQAIQRVGQAVNLAVGRFVKVGEAIANENWDLKEEINIACIEAKQAGETIAALTDITNLNHLESDGQITIFTDKTGVIKAARLLLSSVTKVLLLADRVVIKQIITSRNKVLATMERLEKVNSFQEFVQIFSQFGNEMVEFAHLSGDRQNDLKDEKKKAKMAAARAVLEKCTMMLLTASKTCLRHPNCESAHKNKEGVFDRMKVALDKVIEIVTDCKPNGETDISSISIFTGIKEFKMNIEALRENLYFQSKENLSVTLEVILERMEDFTDSAYTSHEHRERILELSTQARMELQQLISVWIQAQSKKTKSIAEELELSILKISHSLNELKKELHSTATQLAADLLKYHADHVVLKALKLTGVEGNLEALAEYACKLSEQKEQLVETCRLLRHISGTEPLEITCIHAEETFQVTGQQIISAAETLTLHPSSKIAKENLDVFCEAWESQISDMSTLLREINDVFEGRRGEKYGYLSLPKPMKNNANLKSLKPDKPDSEEQAKIAKLGLKLGLLTSDADCEIEKWEDQENEIVQYGRNMSSMAYSLYLFTRGEGPLKTSQDLIHQLEVFAAEGLKLTSSVQAFSKQLKDDDKLMLLLEINKLIPLCHQLQTVTKTSLQNKVFLKVDKCITKTRSMMALLVQLLSLCYKLLKKLQMENNGWVSVTNKDTMDSKT

SEQ ID NO: 777 - DNA, 4221 bp, Homo sapien
gtcggccgtcccctttaatttttaaatacacggtcccctcttttctctggggggggcaagcaagaaatcaaagaaggaggagacaagccgtcaattttctccaaaacaaaccccaccgggcaatttggtctcggggtagggggagacggggtgattgcaaattattccaggacgagatccagttctccagcgggaaaggggcaaaggaacgccgcgcgttggaagggccagggtacgcagctccccttgcagcgcccgcaggacccccgcaagctcgtgccggcgaaatcggagaccgccgatctgtcctcgttctctcctgcacgtctggctgcattcggaggaagacctggggcgcgagcgagcggcgacagcatgagcctgtgctgacctccgcgcggcgggccgagcccagggctttgtcgcggtacctgcgcccagcccgcgccgcaactctgtgcccagcttttgcaatcttttgttgcagcgctgaccgcaccaagttaaatgctcccttgcaatttttcttttttttgtttgtttgtttaatttttggagagctcgcgatcttggaaaagcctcagacgccatctacagttaaaacgtaggtaactgccctctcccgcaccccccccttacacgccccccaccctttccaccaaaaaaagggggtgcagcgcggattctggctgccgtgcgtcgccagccggtagacccgtgcttgtttcctttctctttttgtttggcttctaacgcgttgggactgagtcgccgccgtgagctccccgaagactgcacaaactaccgcgggctcctccgccccgtctgcgattcggaagccggcctgggggtcgcgtcgggagccctgcgctgcagctccgcaccttagcagcccgggtactcatccagatccacgccggggacacacacacagagtaactaaaagtgcggcgattctgcacatcgccgactgctttggggtaacaaaaagacccgagttgcctgccgaccgaggacccccgggagccgggctcggagcagacgaggtatccggcggcgcccatttgggggcttctaactctttctccacgcagcccctcttctgtcccctcccctctcgctcccttttaaaatcagtggcaccgaggcgcctgcagccgcactcgccagcgactcatctctccagcgggtttttttttgtttgtcgtgtgcgatcctcacactcatgaacatacacaggtctacccccatcacaatagcgagatatgggagatcgcggaacaaaacccaggatttcgaagagttgtcgtctataaggtccgcggagcccagccagagtttcagcccgaacctcggctccccgagcccgcccgagactccgaacttgtcgcattgcgtttcttgtatcgggaaatacttattgttggaacctctggagggagaccacgtttttcgtgccgtgcatctgcacagcggagaggagctggtgtgcaaggtgtttgatatcagctgctaccaggaatccctggcaccgtgcttttgcctgtctgctcatagtaacatcaaccaaatcactgaaattatcctgggtgagaccaaagcctatgtgttctttgagcgaagctatggggacatgcattccttcgtccgcacctgcaagaagctgagagaggaggaggcagccagactgttctaccagattgcctcggcagtggcccactgccatgacggggggctggtgctgcgggacctcaagctgcggaaattcatctttaaggacgaagagaggactcgggtcaagctggaaagcctggaagacgcctacattctgcggggagatgatgattccctctccgacaagcatggctgcccggcttacgtaagcccagagatcttgaacaccagtggcagctactcgggcaaagcagccgacgtgtggagcctgggggtgatgctgtacaccatgttggtggggcggtaccctttccatgacattgaacccagctccctcttcagcaagatccggcgtggccagttcaacattccagagactctgtcgcccaaggccaagtgcctcatccgaagcattctgcgtcgggagccctcagagcggctgacctcgcaggaaattctggaccatccttggttttctacagattttagcgtctcgaattcagcatatggtgctaaggaagtgtctgaccagctggtgccggacgtcaacatggaagagaacttggaccctttctttaactgagctcatgccccacggagacttagcaggttccaggagtgagcgagggcagcggaaaggagttcttccgggggacacgaattgcctggctgagtagcaagaaagacacactcttaagtttcttggttcagagcaggaaaaccttcaaggagctgactgaccacgtagcatgggggcaagaggcgtgggatggggattggggtgagatggatgggagcccgctggagcttgtcttccctaacatagcctgggagaccaccccttgccacttgggccacttccgcctaccccacttttcattttgttccaaaatagttgcagatcctgacagaatcaaaactctctgcctcaaacacacatcctggcatcgcactgttagcatttaacttcttgttaggattcagggaaggaacagttggccaagaattttttttcttttaaacaagccaaccacctagctggtaattaatgaggttcacttaaaaaaaaaattcggtgcacacagactgacatgaaacctgggtgctacagtaaaagaaaacaaaagtccagtttgtgtctcttaatcgctcacttcaactcatttcttctaaataaactatttaatatcctggtcaggaaatgacatgttaatgctttgctccctgaagggggaaaaaatctgtcctttaacaagctattctgttttgtgtcaattgggtccgtggcaaggaagctattaggaagtcaaacggtccaggatgcattacctgctaatccttaggtttaaagggggaaagaaaagggaagaagaaaggaaaagagaaatccaactcctttttcatgttttgcttttgaacaatgagggtttgtgtgacaggcattcctctttgctgagatgatagcaatggcctgagattttagcaagctcctggagtctgatgcttttgcagtactctgatcgcaactaaacatttgtctttgttttattagaaactagtgaaacaaagcaggttgtcccacatgtataaaatacagggcagctatttagttttctttacagagaatgatccttttaaggcttgtaaggccctctggtttggacaaaaaccctcagtagagacaagcgggaaggataattagctgaaagctatgatgatataaataaaaacagctctctatcccaatacgcacctttgtattttcaagaactcttctatttattaaggaaaatgtcacattgtgatgtattaagccagtacttcaattacgggttgacttgggatgacatattacatgctgtagttaacatttataattctttttccttgtttgagtatttctgtctctgaaataaccttttacttggcttttctagatagctttatttgatttcgagtggcaaaatgttttttattacggcttttctattgctgtatgatacagaactcttttggcataaatatttgtgttcccagtacctcacttgttcggatttgactgcctgtatatgttttgtgaaatggtcctgtttttgggtaggtgacacgtggactctagtatgtaaatgttacttgaatctgtgcttcataatagtgtgtggcatgtatgtgcagactcttggatgctttatgcctgcgcaccaggagccctgtcctcacgttcccaggagggcggcttcacccttcgtaaccaggagacaaggcggccatggatttgcccttgattctattttgctaatggaagatagaaaggagagaaggtttttttttttttttaacattctgaagatggtgctgtgtcaagaaggaccttttttttcccctctcccctattttttaagtaccttggaggaggagaggttggtgacatgcatggtggggatctatggcctctggtgctttgtcctgtatttggtttaatgtttttgtcctaatctcttcaatcaataaaattgtgcgtatttaactaaaaaaaaaaaaaaaaaa

SEQ ID NO: 778 - protein, 343 aa, Homo sapien
MNIHRSTPITIARYGRSRNKTQDFEELSSIRSAEPSQSFSPNLGSPSPPETPNLSHCVSCIGKYLLLEPLEGDHVFRAVHLHSGEELVCKVFDISCYQESLAPCFCLSAHSNINQITEIILGETKAYVFFERSYGDMHSFVRTCKKLREEEAARLFYQIASAVAHCHDGGLVLRDLKLRKFIFKDEERTRVKLESLEDAYILRGDDDSLSDKHGCPAYVSPEILNTSGSYSGKAADVWSLGVMLYTMLVGRYPFHDIEPSSLFSKIRRGQFNIPETLSPKAKCLIRSILRREPSERLTSQEILDHPWFSTDFSVSNSAYGAKEVSDQLVPDVNMEENLDPFFN

SEQ ID NO: 779 - DNA, 884 bp, Homo sapien
cgaggttcgggtcgtggggcggagggaagagcgggcgggcgggaggcgccggcgccagacgcggagggaaggagctacgagtagccgccgagaggccgcggagccagcgacgaccgacccagccgagccgccgccgccgccgcgcccccatggcggccgccaaggacactcatgaggaccatgatacttccactgagaatacagacgagtccaaccatgaccctcagtttgagccaatagtttctcttcctgagcaagaaattaaaacactggaagaagatgaagaggaactttttaaaatgcgggcaaaactgttccgatttgcctctgagaacgatctcccagaatggaaggagcgaggcactggtgacgtcaagctcctgaagcacaaggagaaaggggccatccgcctcctcatgcggagggacaagaccctgaagatctgtgccaaccactacatcacgccgatgatggagctgaagcccaacgcaggtagcgaccgtgcctgggtctggaacacccacgctgacttcgccgacgagtgccccaagccagagctgctggccatccgcttcctgaatgctgagaatgcacagaaattcaaaacaaagtttgaagaatgcaggaaagagatcgaagagagagaaaagaaagcaggatcaggcaaaaatgatcatgccgaaaaagtggcggaaaagctagaagctctctcggtgaaggaggagaccaaggaggatgctgaggagaagcaataaatcgtcttattttattttcttttcctctctttcctttcctttttttaaaaaattttaccctgcccctctttttcggtttgtttttattctttcatttttacaagggacgttatataaagaactgaactc

SEQ ID NO: 780 - protein, 201 aa, Homo sapien
MAAAKDTHEDHDTSTENTDESNHDPQFEPIVSLPEQEIKTLEEDEEELFKMRAKLFRFASENDLPEWKERGTGDVKLLKHKEKGAIRLLMRRDKTLKICANHYITPMMELKPNAGSDRAWVWNTHADFADECPKPELLAIRFLNAENAQKFKTKFEECRKEIEEREKKAGSGKNDHAEKVAEKLEALSVKEETKEDAEEKQ

SEQ ID NO: 781 - DNA, 3915 bp, Homo sapien
gtggggtggggtggggctgggggcttgtcgccctttcaggctccaccctttgcggagattataaatagtcatgatcccagcgagacccagagatgcctgtaatggtgagactttggatccttcctgaggacgtggagaaaactttctgctgagaaggacattttgaaggttttgttggctgaaaaagctgtttctggaatcacccctagatctttcttgaagacttgaattagattacagcgatggggacacagaaggtcaccccagctctgatatttgccatcacagttgctacaatcggctctttccaatttggctacaacactggggtcatcaatgctcctgagaagatcataaaggaatttatcaataaaactttgacggacaagggaaatgccccaccctctgaggtgctgctcacgtctctctggtccttgtctgtggccatattttccgtcgggggtatgatcggctccttttccgtcggactcttcgtcaaccgctttggcaggcgcaattcaatgctgattgtcaacctgttggctgtcactggtggctgctttatgggactgtgtaaagtagctaagtcggttgaaatgctgatcctgggtcgcttggttattggcctcttctgcggactctgcacaggttttgtgcccatgtacattggagagatctcgcctactgccctgcggggtgcctttggcactctcaaccagctgggcatcgttgttggaattctggtggcccagatctttggtctggaattcatccttgggtctgaagagctatggccgctgctactgggttttaccatccttcctgctatcctacaaagtgcagcccttccattttgccctgaaagtcccagatttttgctcattaacagaaaagaagaggagaatgctaagcagatcctccagcggttgtggggcacccaggatgtatcccaagacatccaggagatgaaagatgagagtgcaaggatgtcacaagaaaagcaagtcaccgtgctagagctctttagagtgtccagctaccgacagcccatcatcatttccattgtgctccagctctctcagcagctctctgggatcaatgctgtgttctattactcaacaggaatcttcaaggatgcaggtgttcaagagcccatctatgccaccatcggcgcgggtgtggttaatactatcttcactgtagtttctctatttctggtggaaagggcaggaagaaggactctgcatatgataggccttggagggatggctttttgttccacgctcatgactgtttctttgttattaaaggataactataatgggatgagctttgtctgtattggggctatcttggtctttgtagccttctttgaaattggaccaggccccattccctggtttattgtggccgaactcttcagccagggcccccgcccagctgcgatggcagtggccggctgctccaactggacctccaacttcctagtcggattgctcttcccctccgctgctcactatttaggagcctacgtttttattatcttcaccggcttcctcattaccttcttggcttttaccttcttcaaagtccctgagacccgtggcaggacttttgaggatatcacacgggcctttgaagggcaggcacacggtgcagatagatctggaaaggacggcgtcatggagatgaacagcatcgagcctgctaaggagaccaccaccaatgtctaagtcgtgcctccttccacctccctcccggcatgggaaagccacctctccctcaacaagggagagacctcatcaggatgaacccaggacgcttctgaatgctgctacttaattcctttctcatcccacgcactccatgagcaccccaaggctgcggtttgttggatcttcaatggctttttaaattttatttcctggacatcctcttctgcttaggagagaccgagtgaacctaccttcatttcaggagggattggccgcttggcacatgacaactttgccagcttttcctcccttgggttctgatattgccgcactaggggatataggagaggaaaagtaaggtgcagttcccccaacctcagacttaccaggaagcagatacatatgagtgtggaagccggagggtgtttatgtaagagcaccttcctcacttccatacagctctacgtggcaaattaacttgagttttatttattttatcctctggtttaattacataatttttttttttttactttaagtttcaggatacatgtgccgaatgtgcaggtttgttacataggtatatatatgccatgatggaaatatttatttttttaagcgtaattttgccaaataataaaaacagaaggaaattgagattagagggaggtgtttaaagagaggttatagagtagaagatttgatgctggagaggttaaggtgcaataagaatttagggagaaatgttgttcattattggagggtaaatgatgtggtgcctgaggtctgtacgttacctcttaacaatttctgtccttcagatggaaactctttaacttctcgtaaaagtcatatacctatataataaagctactgatttccttggagcttttttctttaagataatagtttacatgtagtagtacttgaaatctaggattattaactaatatgggcattgtagttaatgatggttgatgggttctaattttggatggagtccagggaagagaaagtgatttctagaaagcctgttcccctcactggatgaaataactccttcttgtagtagtctcattacttttgaagtaatcccgccacctatctcgtgggagagccatccaaataagaaacctaaaataattggttcttggtagagattcattatttttccactttgttctttaggagattttaggtgttgattttctgttgtattttaactcatacctttaaaggaattccccaaagaatgtttatagcaaacttggaatttgtaacctcagctctgggagaggatttttttctgagcgattattatctaaagtgtgttgttgctttaggctcacggcacgcttgcgtatgtctgttaccatgtcactgtggtcctatgccgaatgccctcaggggacttgaatctttccaataaaccaggtttagacagtatgagtcaatgtgcagtgtagcccacacttgagaggatgaatgtatgtgcactgtcactttgctctgggtggaagtacgttattgttgacttattttctctgtgtttgttcctacagcccctttttcatatgttgctcagtctccctttcccttcttggtgcttacacatctcagaccctttagccaaacccttgtcagtgacagtattttggttcttagttctcactgttccctctgctcctggagcctttgaataaaaatgcacgtagctgaggccggatgcggtggctcacgcctgtaatcccagcactttgggaggcctaggcgggcggtcaggggttcgagaccagtctggccaacatcgtgaaaccctgtctctactaaaaatgcaaaaattagccgggcgtggtggcgggcgcctgtaatcccagctacttgggaagctgaggcgggagaatcatgtgaacccgggacgcaggggttgcagtgagcggagatcgcatcattgcactctagcctgggccacagggcgagactccgtctcaaaaaaaaaaaaatgcacatagctatcgagtgtgctttagcttgaaaaggtgaccttgcaacttcatgtcaactttctggctcctcaaacagtaggttggcagtaaggcagggtcccatttctcactgagaagattgtgaatatttccatatggattttctattgttactctggttctttgttttaaaataaaaattctgaatgtacacg

SEQ ID NO: 782 - protein, 496 aa, Homo sapien
MGTQKVTPALIFAITVATIGSFQFGYNTGVINAPEKIIKEFINKTLTDKGNAPPSEVLLTSLWSLSVAIFSVGGMIGSFSVGLFVNRFGRRNSMLIVNLLAVTGGCFMGLCKVAKSVEMLILGRLVIGLFCGLCTGFVPMYIGEISPTALRGAFGTLNQLGIVVGILVAQIFGLEFILGSEELWPLLLGFTILPAILQSAALPFCPESPRFLLINRKEEENAKQILQRLWGTQDVSQDIQEMKDESARMSQEKQVTVLELFRVSSYRQPIIISIVLQLSQQLSGINAVFYYSTGIFKDAGVQEPIYATIGAGVVNTIFTVVSLFLVERAGRRTLHMIGLGGMAFCSTLMTVSLLLKDNYNGMSFVCIGAILVFVAFFEIGPGPIPWFIVAELFSQGPRPAAMAVAGCSNWTSNFLVGLLFPSAAHYLGAYVFIIFTGFLITFLAFTFFKVPETRGRTFEDITRAFEGQAHGADRSGKDGVMEMNSIEPAKETTTNV

SEQ ID NO: 783 - DNA, 2578 bp, Homo sapien
cgagcaggcggcaggcacggtccgtgcggagaggcgagcgagcgggaagacgcagccaccttcctcaccagccagcccacagcggtttgttccccttctcgggagtgcgccaatgcctgggccgacccaaaccctgtccccaaatggcgagaacaacaacgacatcatccaggataataacgggaccatcattcctttccggaagcacacagtgcgcggggagcgttcctacagttggggaatggcggtcaatgtgtattctacctcgataacccaagagactatgagcagacatgacatcattgcatgggttaatgacatagtatctttaaactacacaaaagtggaacagctttgttcaggagcggcctattgccaattcatggacatgctcttccctggctgcattagtttgaagaaagtaaaatttcaagcaaagctggaacatgaatatattcacaattttaaacttctgcaagcatcatttaagcgaatgaacgttgataaggtaattccagtggagaagctagtgaaaggacgtttccaggacaacctggattttattcaatggtttaagaaattctatgatgctaactacgatgggaaggagtatgatcctgtagaggcacgacaagggcaagatgcaattcctcctcctgaccctggtgaacagatcttcaacctgccaaaaaagtctcaccatgcaaactcccccacagcaggtgcagctaaatcaagtccagcagctaaaccaggatccacaccttctcgaccctcatcagccaaaagggcttcttccagtggctcagcatccaaatccgataaagatttagaaacgcaggtcatacagcttaatgaacaggtacattcattaaaacttgcccttgaaggcgtggaaaaggaaagggatttctactttgggaagttgagagagatcgagctactctgccaagaacacgggcaggaaaatgatgacctcgtgcagagactaatggacatcctgtatgcttcagaagaacacgagggccacacagaagagccggaagcagaggagcaagcccacgaacagcagcccccgcagcaggaagagtactgacccaccccggctgctcttgacacttccattgtgtgtgggaacgtttcttctggagaattggaacatgtgtggccccaagctcaacagaaaccagttgttcccaatctgccgttaccatcaacgcactgttgcatatgccagccactgcgcttggttcccattttctttgctaaggtgtattagcggacggccctctggccacctacccgagagatcgtagggtcacattcatccaacttcaccacttggctgcttgagattggttctgctcttttcttcattcctttccagaacaactctttcccaccccaacaccactgccaccacccctctttttatcctggtgtgaaacaatggtaatttgatatatggtatttatattggcatttttcaacccagtgtcactagatgtcacacacatttgtggtgctttgatgtttgcaagtctaacctctgaacataaatttggtcaaataattggaacaaagggaaacagatacttgatatgaaagccataatgacggtgacttgtgtcgtgggggaaaacataaggtcattttctccctctactcacaatactaaagggaaaaaatggattcaaagctaggatttcagggcccagcagtgttcctccatcagcatgttagacaactacacagtatgttgttagttttgaaagacattcactcaaggaaaacaccatctcaactttgcccgctcaccatgtcccttgcccccatgtagcccatttcccaggttatgctcttttctttctcagggtcctctttggtgggcagccactccccgagatgttgccatcagttttctgcagtccaaagagggtatggttaggtacgggtcttcctgcctcattcctcttcctctttgtgtaggtttcagccacaaaactgtcattcactctaggggacccctactaaagggtaacttcaggtgtgcagccctgagctccaaggctctgcaccatgccacacacttgctgtaaggctagaagtgaagaccttattaataggagcataattgcgagggagaatcatggttctgcagtctggtgtagacactggaataacagcacagaaaaatctatgactcccaatatcttctagaataaagaattttccctctttaacacaagggccctccttgtcattgaccttagctaaaccatggcaattcataaatagaggaaacattaatgaattaaaagcattccttattttttaactaatatttgtacattttcttagtctctttccaagtctttgcctcttttttttctttatttttattttttcctttgacagatggtatcccttcctggatcattcatttcaccttggtttctaactttaggtttactttcacttgttatttgacttagcaggtgcaacaaaaacaagaaacaaatgtgcccaccccactttccgcttaactgaaaagcttaaaataaatttccgaattatg

SEQ ID NO: 784 - protein, 327 aa, Homo sapien
MPGPTQTLSPNGENNNDIIQDNNGTIIPFRKHTVRGERSYSWGMAVNVYSTSITQETMSRHDIIAWVNDIVSLNYTKVEQLCSGAAYCQFMDMLFPGCISLKKVKFQAKLEHEYIHNFKLLQASFKRMNVDKVIPVEKLVKGRFQDNLDFIQWFKKFYDANYDGKEYDPVEARQGQDAIPPPDPGEQIFNLPKKSHHANSPTAGAAKSSPAAKPGSTPSRPSSAKRASSSGSASKSDKDLETQVIQLNEQVHSLKLALEGVEKERDFYFGKLREIELLCQEHGQENDDLVQRLMDILYASEEHEGHTEEPEAEEQAHEQQPPQQEEY

SEQ ID NO: 785 - DNA, 836 bp, Homo sapien
gtgaaacaccctcggctgggaagtcagttcgttctctcctctcctctcttcttgtttgaacatggtgcggactaaagcagacagtgttccaggcacttacagaaaagtggtggctgctcgagcccccagaaaggtgcttggttcttccacctctgccactaattcgacatcagtttcatcgaggaaagctgaaaataaatatgcaggagggaaccccgtttgcgtgcgcccaactcccaagtggcaaaaaggaattggagaattctttaggttgtcccctaaagattctgaaaaagagaatcagattcctgaagaggcaggaagcagtggcttaggaaaagcaaagagaaaagcatgtcctttgcaacctgatcacacaaatgatgaaaaagaatagaactttctcattcatctttgaataacgtctccttgtttaccctggtattctagaatgtaaatttacataaatgtgtttgttccaattagctttgttgaacaggcatttaattaaaaaatttaggtttaaatttagatgttcaaaagtagttgtgaaatttgagaatttgtaagactaattatggtaacttagcttagtattcaatataatgcattgtttggtttcttttaccaaattaagtgtctagttcttgctaaaatcaagtcattgcattgtgttctaattacaagtatgttgtatttgagatttgcttagattgttgtactgctgccatttttattggtgtttgattattggaatggtgccatattgtcactccttctacttgctttaaaaagcagagttagatttttgcacattaaaaaattcagtattaatt

SEQ ID NO: 786 - protein, 111 aa, Homo sapien
MVRTKADSVPGTYRKVVAARAPRKVLGSSTSATNSTSVSSRKAENKYAGGNPVCVRPTPKWQKGIGEFFRLSPKDSEKENQIPEEAGSSGLGKAKRKACPLQPDHTNDEKE

SEQ ID NO: 787 - DNA, 4339 bp, Homo sapien
tgcagcgctagaaaggaattgtctgaccccagcattgcttcctggctcctttcttcctttttcaggagagcatcctgccgaccacagccctccccactgtgagccttcctgacagcctcatcgcgccccctaccgccccatccctggctcacatggatgagcagggctgtgaacacacctcccggactgaggacccgtttatccagcccacggacttcggtccctcagagccgccactgagtgtcccgcagcccttcctccctgtcttcaccatgcccctgctgtctcccagccccgccccaccgcccatctcccccgtgttaccattagttcctcctcctgccactgccctgaaccccccggctccacccaccttccatcagccacagaagtttgctggagtcaacaaagcgccgtctgtcatcacccacacggcctctgccaccctcacccacgatgcccccgccaccacctttagccagagtcagggccttgtgatcaccacccatcaccctgccccgtcagcggccccttgtgggctggcactgtctcctgtcacccggcctccccagccacggttaacttttgtgcaccccaaacctgtatccttgactgggggcaggcctaagcagccccacaaaatagtgcctgctcccaaaccagagcccgtgtccttggtgttgaagaatgcccgtatcgccccagctgccttttcaggccaaccacaagcggtgatcatgacgtcagggcctctgaagagagaagggatgttggcctccaccgtgtcccagtccaacgtggtcattgcgcctgctgccatcgccagggctcctggggtcccggagttccacagcagcatcctggtgacagatctcggccatggcacgagcagcccgcctgcccccgtctcccggctcttcccaagcacagcgcaagaccccctggggaagggcgagcaggtcccgctgcatgggggcagcccccaggtcactgtcacagggcccagtcgggactgcccaaactcagggcaggcctctccgtgtgcatcggagcagagccccagtcctcaatctccccagaacaactgctcagggaaatccgaccccaaaaatgtggctgcactaaagaaccggcagatgaagcacatctcagctgagcagaaaaggcgcttcaacatcaagatgtgcttcgacatgctcaacagcctcatctccaacaattccaagctgaccagtcacgccatcacactgcagaagactgtggagtacatcaccaagctgcagcaggagagaggccagatgcaggaggaggcccggcggctgcgggaggagatcgaggagctcaatgccaccatcatctcctgccagcagctgctccctgccacgggagtccccgttacccggcgccagtttgatcacatgaaagacatgtttgacgaatacgtgaaaacccggaccttgcagaattggaagttctggattttcagcatcatcatcaagccgctgtttgagtcgttcaagggcatggtgtccaccagcagcctggaggagctgcaccggacggcgctctcctggctggaccagcactgctccctgcccatcctcaggccgatggtattgagcacgctgcggcagctgagcacctccacctccatcctcacagacccggcacagctgccagagcaggcgtccaaggctgtcaccaggattggcaagagattgggagagtcctagctgcttagctggcatgtggccgcatgagatgccaggagacccttccctgcccatggagagtaggctgcgccccccagcccttcctgacgctcagcctcggggcctctctccaactctgccggcccaccgtggcatcgggaggccatgctcaggtctgaagcaggtttggggcctgctgacagcaatagcccgcctttgggaaccccttgctgtgaactctctcactcagtgacctcagtcaccaacctcctctgccctcggggcagcccacacaaaagggaagtgctggccgtgctggtcctgccctgctggtggcctgccgggcctggcgccggtgagcggaatcgatgggatgagggtgacagggcctgctcctgtcctgaggcccagccttgtccctcctgccacgtcctgtccacatgcatgcctctgcctgatgccctgctccactctctggtctgcccgtggggcagttggaaggcgtctttctttctcccctcaactctgacagcacccagcccttgtggatggacttgggcttctattcaggcttatgcatggcaggctgccagggggaagtgccttcttcagaggtcctccaggacacatgtgtgcagaaacggtggatgtggaacacacaggaccagaatggaagcgtgtgatgcacggtggctgctctggctgagaggccctgctgggcatgtttcatctgtccccttttagctccacctgacattgcaggatccatggggactcagcccagggccttctcggatgtcacctcaccgctgtggcccttctgccgttcttctccacttggctccagctgcagctgttgacagatcaagcatgtcctgtgggagcttagaaccctgaagttctagtgtctgaaagatcagactccacgtcctgctgtcagccttgtcatcttgtctgatgtctttcagctgggagccccaaaccaggacagttctcggaccaaagatgcccccacactcaaaagtctgtcccgtcttgtgtttggagaaggaaacaatgttggcaggcagcactctgtggtggtcagccctcagagctgtttctaggcatctctcagatcagacagcaaagaatctacccagatctgggctgggtggaggtgtggctgggctgggggccattctgagcctgcagtgagagtttggcccagcctcagtccttgctcttctctggctacctctgcagggagctgcaggggcaagcactctctccagcactcaggaagcccggccgagggtacctcctcgtggaaagaatgcactttaaagctctgctgaggagttcggagcccaggctttcaggcgacctctgccctccctgcctctcctcaccctccctctcttcctgcagggcctgggaagggctttgagggagcctgggagccatgtgaagaggggcacgcctgggctgtcccacagtttagatccagttggaggttctccctggctcctgcaggcctgcggggatctctccccacttcaggcctccggccagctgcctgccctcttgtctgtgcttcagccctgcacaaaagcagcttggtgacaccactcagccacccagagtacgtgtttacaggctttccagatcaccttcctgtggggtgaacgtaatgaggcggggctggtccttggaatttcccctggaaaatggtaacagactccatccttgacccggggatgagcatgaaggcattgtcccaaaggcagaggccaccgtggtaggaattccaccaaggccagaagggaaaaaggaagaacccaccgtgtctggctgtgcgggccctggggagggtcgtgagtgcagcccctctctacttctgtgcctttgtaaaacgtgtagataaccgcagtggttggctgagccaagaactctcctaaatcagtggctttctccccaccccttgctggggagtcatttttaaaaaaatctgtgggatataaaattggcctcctgctgcttcagcctacctctccctctgctgacttaatgtcgtgattctgtttcttcagatatttaaggctgttaggttgtgtgagccttgaagtgtgtgtgtgtgtcccagcgactgtccactgtccaggagatgcatgtctttgtattggagatatttctgtaactcattctcttggtgctcacgattgccatggccatagggccacagtgccgtatctgctgcagacatgattgtttcttgttctagaggttttcttgttttcgaatcttgcctgatgaatccagccagaccaaggggcctagatttgacctctgtcctgggctcctgggccaggtgcaggaacatctgaggccactctgctggccacctccagtgggtgctgaccacaggatgggctttgtttacactcattttcaccctgattcttgcccccactttcataaaagaaacttcaaaatgctgacgctttggagagtaagaaaatcaatcttggctgggcacggtggctcctgcctgtgatcctagcactttgggaggctgaagctgaaggatcacttgagctcaggagttggagaccaaccctggcaacataacaagaccctgtctctac

SEQ ID NO: 788 - protein, 526 aa, Homo sapien
MDEQGCEHTSRTEDPFIQPTDFGPSEPPLSVPQPFLPVFTMPLLSPSPAPPPISPVLPLVPPPATALNPPAPPTFHQPQKFAGVNKAPSVITHTASATLTHDAPATTFSQSQGLVITTHHPAPSAAPCGLALSPVTRPPQPRLTFVHPKPVSLTGGRPKQPHKIVPAPKPEPVSLVLKNARIAPAAFSGQPQAVIMTSGPLKREGMLASTVSQSNVVIAPAAIARAPGVPEFHSSILVTDLGHGTSSPPAPVSRLFPSTAQDPLGKGEQVPLHGGSPQVTVTGPSRDCPNSGQASPCASEQSPSPQSPQNNCSGKSDPKNVAALKNRQMKHISAEQKRRFNIKMCFDMLNSLISNNSKLTSHAITLQKTVEYITKLQQERGQMQEEARRLREEIEELNATIISCQQLLPATGVPVTRRQFDHMKDMFDEYVKTRTLQNWKFWIFSIIIKPLFESFKGMVSTSSLEELHRTALSWLDQHCSLPILRPMVLSTLRQLSTSTSILTDPAQLPEQASKAVTRIGKRLGES

SEQ ID NO: 789 - DNA, 5316 bp, Homo sapien
cggacgcgtgggaacgaagccacccattacggtatgatgatgtcaaacgtgatgctgatgctacagttacagcccctgctggcgcagcctctctgattctctctccctctccgcgtccagtgctgggctttttcagacaagtgcatctcctaaccaggtcacatttcagccgcgacccactctccgccagtcaccggaggcagaccgcgggaggagagctgaggacagccgcgtgcgcttcgccagcagcggggtgggaggaaggacattaaaatactgcagaagtcaagaccccccaggtcgaacccagaccacgatgcgcgccccgggctgcgggcggctggtgctgccgctgctgctcctggccgcggcagccctggccgaaggcgacgccaaggggctcaaggagggcgagacccccggcaatttcatggaggacgagcaatggctgtcgtccatctcgcagtacagcggcaagatcaagcactggaaccgcttccgagacgaagtggaggatgactatatcaagagctgggaggacaatcagcaaggagatgaagccctggataccaccaaggacccctgccagaaggtgaagtgcagccgccacaaggtgtgcattgcccagggctaccagcgggccatgtgcatcagtcgcaagaagctggagcacaggatcaagcagccgaccgtgaaactccatggaaacaaagactccatctgcaagccctgccacatggcccagcttgcctctgtctgcggctcagatggccacacttacagctctgtgtgtaagctggagcaacaggcgtgcctgagcagcaagcagctggcggtgcgatgcgagggcccctgcccctgccccacggagcaggctgccacctccaccgccgatggcaaaccagagacttgcaccggtcaggacctggctgacctgggagatcggctgcgggactggttccagctccttcatgagaactccaagcagaatggctcagccagcagtgtagccggcccggccagcgggctggacaagagcctgggggccagctgcaaggactccattggctggatgttctccaagctggacaccagtgctgacctcttcctggaccagacggagctggccgccatcaacctggacaagtacgaggtctgcatccgtcccttcttcaactcctgtgacacctacaaggatggccgggtctctactgctgagtggtgcttctgcttctggagggagaagcccccctgcctggcagagctggagcgcatccagatccaggaggccgccaagaagaagccaggcatcttcatcccgagctgcgacgaggatggctactaccggaagatgcagtgtgaccagagcagcggtgactgctggtgtgtggaccagctgggcctggagctgactggcacgcgcacgcatgggagccccgactgcgatgacatcgtgggcttctcgggggactttggaagcggtgtcggctgggaggatgaggaggagaaggagacggaggaagcaggcgaggaggccgaggaggaggagggcgaggcaggcgaggctgacgacgggggctacatctggtagacgccctcagaagccggctgccgggggggactcaacagcagagctctgagcagcagcaggcaacttcgagaacggatccagaaatgcagtcagaaggaccctgctccacctggggggactgggagtgtgagtgtgcatggcatgtgtgtggcacagatggctgggacgggtgacagtgtgagtgcatgtgtgcatgcatgtgtgtatgtgtgtgtgtgtgtggcatgcgctgacaaatgtgtccttgatccacactgctcctggcagagtgagtaacccaaaggccccttcggcctccttgtagctgttttctttccttttgttgttggttttaaaatacattcacacacaaatacaaattgacaggtcaaaatccatgaaatgagatcccccagccgtgtcctccagcccagccctgaccccttggtttctaccctggctccccttggtttctaccctggctcaaccgacccctgtctgcccttctccctcctgcttctgaggtcaagctctggcctgcgagcctgtccccattgcaaaggggagggaggggcagggagctgtctaccagctgaggtcctcccaaaactgggccgatgtggtgtgacatccccaccagcctcagatgagacgggccaggacgcccagccacagcaagccctgtccctttgccggatccccaaacactagagaagctctcctaacccaaggcggagaatgaaggtggtggcggcagaggaggagggcagcagctgagaggccagggacagggtgcctcgccaagctgtctgaggtctgtcccaggtggcccaggtggtgcaggtagaacagggtgaggagagggggtcggctcaacaggaggaggctgtggctgcagagcctggaggagcttttaggtgttgagatggggcagctctgaatcctagaccctggaatagcctgtcccttttctctgggtctcgtggtggagccatgatctgggctgctctcttggggacactgggtggtggttacacagttgacctctgcctggctcccccttggtgcaactcctgcctccatcccccttgctggggtcccctcatccacttgagggcgcctgagggccaggagcagcaggcaaggagcctgggtctaggctaagggggtgtgtgcccacctcctccctgacccttaacactcctgtcctgcccagaccaacagagagagctgtccctgagaccccggagagaagcagctgccgaaagctgcagcctttccgcactctgagaccatgatcttcctcctgccaggggagagccacccacaggccatgtccagccccacttccctcagcccccagggcttccttctggcccctctgaggattccctagggctgccccgcagaggggcttccccaagctctgttttgaagcctgcaatgtggaaaagtgagaagtcagagggaacaggacaggtgcagccgggctctgaggccacacctcacacctcgctgttccccaacatcccctgagcagtgtgagctcatctcaccagatgagaagaggccctgtgcatttcttttgtttgtttgttgctgttttcccccacccatccagttctcctcagcaaagcaaattccttaacacctttggtggagaatttcttacccagacttggggctgtgatgcccttcagtgcgtggtgagtgcagcgtgtgtgcgtgtgcctgtgtgtgaacctgggggccatcctggtggcctgggagcgtgaggagaggccccctgtgtgctgggtgagtggtgggtgtggggtcaatgcagtgaggctctctgggtgaggctcccaacctggcagtccccagcctcccagcatctgtgagcgtctgttggactttacagaagagcctcatcccgtctgcccctcactctgccctggaatcaacatcttccgagtccttcttgggggaaatagcagagccccacttaactccataaactgcttcccattccgcagcccagttctgattgttgaggtgtcgcgtcgttccaggtcccccagtcccctctttctcctgtcctctctctgtccttcacctccccactccagccccggctcagttcagggaaatgctgttccatatcagccctctgctctctgaggcagccgcgcctctgactcggagctacttgaaacttctgctcttgctaggattggagtctacctatctcttccatttgtcccagctggagttctggaactttcctcctcggggtgggggtgggggttgttaaggatgctggggggcctggggaaggaaggagttcagaggaagggtgtcccctgtcctcttgatgtcaccctccgctcctgggacacgtgctctctctgtctctgggtcttctggctgtgcacgtttgtgtgtccttgtaaatatgttttaggaagaaagcaaaagggactgaactagcctctggtaggattgcaggggtccagccttgcctgtttccgaagcccccacactgcctttcgccccactgagactggtcccctcaaaaggtagacaaaacagcagctccctgtggagctgaagggcggcctcaaagtggctttttgttagacaaggttaaggtttcctcatgagcaaggttgcagatcggtccttcctcagctccttgatttgtgaccttgaccaaggggcctgccacccagcccctccagtgccctctcctcgatgcctcgctccttcctgcccccactcccctggcttaggcaggtaggggaattagggccatgctggaagaagcttaaccatgtgttcaaagaacggtttcttgcttgcttggtcctggaactccccttggctgccccaggcctccttggcccatgggtgctgggggaggtggatgtcagatctggtaggttgcagcagagaaaataaatgtgccttgagagaccactcagagagggtccaagggtgatggagaaggaagcatggcctgggagcttggaagggaggggtggtgggtggcggcatcttgactgccccctgttgtcccacacgtggggggtggtcaccccccttcactccagcccgcctgccttcagccttccatgagcttcacctgcttccaacttcactttggagggggtggggtccgttggcatcaacacggggaccctctgcttcaccaaagcccgagccctcagcccctggggagaacaaatggctgagctttgatacctggggtcgtcgagaggctgcgggctggcggcagtcccaggggagagacaccacagaaggagacccagacatcccgaggaagttcccagcagagcaaactgctttccagcctgaagcctgcttaaactgtgtgatgtgcaataactgagcttagagttaggaattgtgttcaagtgcttggatttccgtctgtagatttaactgctgaaattgtatctctcagtaattttagatgtcttttaaaaaattgaaaaacaaagtgttagactgtgtgcgtgtgcgttgatgggcactcaagagtcccgtgagtcatccagccctgcctttcccctgcgcccccatcctctcacgtcccgccctgcctccacttggggaccctgcctcgtgtcgtctttatctgcctattactcagcctaaggaaacaagtacactccacacatgcataaaggaaatcaaatgttatttttaagaaaatggaaaataaaaactttataaacacc

SEQ ID NO: 790 - protein, 424 aa, Homo sapien
MRAPGCGRLVLPLLLLAAAALAEGDAKGLKEGETPGNFMEDEQWLSSISQYSGKIKHWNRFRDEVEDDYIKSWEDNQQGDEALDTTKDPCQKVKCSRHKVCIAQGYQRAMCISRKKLEHRIKQPTVKLHGNKDSICKPCHMAQLASVCGSDGHTYSSVCKLEQQACLSSKQLAVRCEGPCPCPTEQAATSTADGKPETCTGQDLADLGDRLRDWFQLLHENSKQNGSASSVAGPASGLDKSLGASCKDSIGWMFSKLDTSADLFLDQTELAAINLDKYEVCIRPFFNSCDTYKDGRVSTAEWCFCFWREKPPCLAELERIQIQEAAKKKPGIFIPSCDEDGYYRKMQCDQSSGDCWCVDQLGLELTGTRTHGSPDCDDIVGFSGDFGSGVGWEDEEEKETEEAGEEAEEEEGEAGEADDGGYIW

SEQ ID NO: 791 - DNA, 1471 bp, Homo sapien
gactctccagtcctcagtcaccttggacaaagaagtgtggatcctcagattccatcttttccaactccaaggtgccatggcagagaaggtgctggtaacaggtggggctggctacattggcagccacacggtgctggagctgctggaggctggctacttgcctgtggtcatcgataacttccataatgccttccgtggagggggctccctgcctgagagcctgcggcgggtccaggagctgacaggccgctctgtggagtttgaggagatggacattttggaccagggagccctacagcgtctcttcaaaaagtacagctttatggcggtcatccactttgcggggctcaaggccgtgggcgagtcggtgcagaagcctctggattattacagagttaacctgaccgggaccatccagcttctggagatcatgaaggcccacggggtgaagaacctggtgttcagcagctcagccactgtgtacgggaacccccagtacctgccccttgatgaggcccaccccacgggtggttgtaccaacccttacggcaagtccaagttcttcatcgaggaaatgatccgggacctgtgccaggcagacaagacttggaacgtagtgctgctgcgctatttcaaccccacaggtgcccatgcctctggctgcattggtgaggatccccagggcatacccaacaacctcatgccttatgtctcccaggtggcgatcgggcgacgggaggccctgaatgtctttggcaatgactatgacacagaggatggcacaggtgtccgggattacatccatgtcgtggatctggccaagggccacattgcagccttaaggaagctgaaagaacagtgtggctgccggatctacaacctgggcacgggcacaggctattcagtgctgcagatggtccaggctatggagaaggcctctgggaagaagatcccgtacaaggtggtggcacggcgggaaggtgatgtggcagcctgttacgccaaccccagcctggcccaagaggagctggggtggacagcagccttagggctggacaggatgtgtgaggatctctggcgctggcagaagcagaatccttcaggctttggcacgcaagcctgaggaccctcccctaccaaggaccaggaaaagcagcagctgcctgctctccagcctctggaggaactcagggccctggagctgctggggccaagccaagggcctcccctacctcaaaccccagctgggcccgcttagcccaccaggcatgaggccaaggctccactgaccaggaggccgaggtctctaactcttatcttccacagggtccaagagttcatcaggacccccaagagtgagtgagggggcaaggctctggcacaaaacctcctcctcccaggcactcatttatattgctctgaaagagctttccaaagtatttaaaaataaaaacaagttttcttacactgg

SEQ ID NO: 792 - protein, 348 aa, Homo sapien
MAEKVLVTGGAGYIGSHTVLELLEAGYLPVVIDNFHNAFRGGGSLPESLRRVQELTGRSVEFEEMDILDQGALQRLFKKYSFMAVIHFAGLKAVGESVQKPLDYYRVNLTGTIQLLEIMKAHGVKNLVFSSSATVYGNPQYLPLDEAHPTGGCTNPYGKSKFFIEEMIRDLCQADKTWNVVLLRYFNPTGAHASGCIGEDPQGIPNNLMPYVSQVAIGRREALNVFGNDYDTEDGTGVRDYIHVVDLAKGHIAALRKLKEQCGCRIYNLGTGTGYSVLQMVQAMEKASGKKIPYKVVARREGDVAACYANPSLAQEELGWTAALGLDRMCEDLWRWQKQNPSGFGTQA

SEQ ID NO: 793 - DNA, 3900 bp, Homo sapien; identical to SEQ ID NO: 102

SEQ ID NO: 794 - protein, 187 aa, Homo sapien; identical to SEQ ID NO: 103

SEQ ID NO: 795 - DNA, 1133 bp, Homo sapien
aacctactacgtgcggcggcagctggggcgggaaggcgggcgctgggggcgctgcggccgctgcagcgccagggtccacctggtcggctgcacctgtggaggaggaggtggatttcaggcttcccgtagactggaagaatcggctcaaaaccgcttgcctcgcaggggctgagctggaggcagcgaggccgcccgacgcaggcttccggcgagacatggcagggcaaggatggcagcccggcggcagggcccggcgaggagcgcgaacccgcggccgcagttcccaggcgtctgcgggcgcgagcacgccgcgaccctgcgtgcgccggggcgggggggcggggcctcgcctgcacaaatagggacgagggggcggggcggccacaatttcgcgccaaacttgaccgcgcgttctgctgtaacgagcgggctcggaggtcctcccgctgctgtcatggttggttcgctaaactgcatcgtcgctgtgtcccagaacatgggcatcggcaagaacggggacctgccctggccaccgctcaggaatgaattcagatatttccagagaatgaccacaacctcttcagtagaaggtaaacagaatctggtgattatgggtaagaagacctggttctccattcctgagaagaatcgacctttaaagggtagaattaatttagttctcagcagagaactcaaggaacctccacaaggagctcattttctttccagaagtctagatgatgccttaaaacttactgaacaaccagaattagcaaataaagtagacatggtctggatagttggtggcagttctgtttataaggaagccatgaatcacccaggccatcttaaactatttgtgacaaggatcatgcaagactttgaaagtgacacgttttttccagaaattgatttggagaaatataaacttctgccagaatacccaggtgttctctctgatgtccaggaggagaaaggcattaagtacaaatttgaagtatatgagaagaatgattaatatgaaggtgttttctagtttaagttgttccccctccctctgaaaaaagtatgtatttttacattagaaaaggttttttgttgactttagatctataaaaaaaaaaaaaaaaaaa

SEQ ID NO: 796 - protein, 262 aa, Homo sapien [sequence omitted]

SEQ ID NO: 797 - DNA, 1742 bp, Homo sapien
cgcttttttttttttttttttttttttttttttttttattaacaagtgtaactctttattaagatggaattgttcttattaaagaaatagatgaaaatggttaagtacaattaaatggctccaaaagtcttacaatgaaaacaacagtcctgccagttgttctttccagaggcaaatacttttcattctcttagtttttccttccgttagttaccttcatgggtttttccaaattattgtttttactattcacccatctgcctcagtctgggccaaatctattgcccaatcttcaattggttgcgacttttttgtctcttcccgattctggcattccagagggtcaataggttccttctccacgtgcttttgagggaaatgccccccccccaaaaaacttttcacaccaccttgaacagactctaaacttaggcactacagttactaagcagcctttggattctttgtttttgaagttagatcttttcagctattagtggaaaatgtgcctcactctactccaggattaccaatagaaatgaaaggacagaaatggcattagtgtttagagaagattatgtatatatggctgtgtgaacactgaaaattatgagggtcaacataaaatcagcattacaggtactaaaacataaatcctgatggctttcaccgttttcttaagagcaaaattgcaaaaagtgatattaacagtcatcctagacgaatatgagcaaatgatttgtttttccttaaaagagcctccaagtgtattgtgatcattttcacactgatcaaagagagcacccttctgtcaacaggtatctgcagttttcaggacctggcagaaattcttctatgttctgcctttaaaggtcaggtacaaaagcagagacagctgccaggcccctctgcccagagctaagtgtctgggaccatgagtgggaaggacaggcttgagcctccttggtcctccagacagcatggggcgctacttgccccttctgcagctgcgcgcggcaaagctgtggcctggccgtggcctcctgccccatgcaacagttggtggacagaccgtacctggcacacggcgccttgtgcactttccaacattttgatgccaaccgtcgctagtcactgagccctgacatttgatctctggccttgaccgcagatttcggaaacttctggcagcccagtgtctactggaaggcccaagccgcttgccagaaagctgcgccccgcccaaaagcactgggttctgcagtccaggcccttcctcagctcccaggtccaggagaactgcaaggtcacctacttccacaggaagcactgggtccgcatccggcccctccgcaccactcctcccagctgggactacacccgcatctgcatccagagagagatggtccccgcccgcatccgcgtcctgagagagatggtccccgaggcctggaggtgctttcccaacaggctgccgctgctgagcaacatcaggcctgatttctccaaggctcccctggcctacgtgaagcggtggctttggaccgcccgccacccccacagcctgtccgcagcctggtgaccgtgaaaatcgccccgccagagagcagaggaagcccgacgcccaggccatctgccttcaggtctgtgatgagaaacggagtggcctgctccgttgtgcccaggtctaggccgctgagcagagccctcactcccaggcagagttgtctgaatccttcctg

SEQ ID NO: 798 - protein, 214 aa, Homo sapien
MAWASGFLCSLAGRFSRSPGCGQAVGVAGGPKPPLHVGQGSLGEIRPDVAQQRQPVGKAPPGLGDHLSQDADAGGDHLSLDADAGVVPAGRSGAEGPDADPVLPVEVGDLAVLLDLGAEEGPGLQNPVLLGGAQLSGKRLGPSSRHWAARSFRNLRSRPEIKCQGSVTSDGWHQNVGKCTRRRVPGTVCPPTVAWGRRPRPGHSFAARSCRRGK

SEQ ID NO: 799 - DNA, 1873 bp, Homo sapien
gacgatacgccgggcgcaggcgcagaagccgcgcccgtccgcggcgccgccagccagggcggaaacggctgcggcttcgctagggacgcatgcgcgggtcccttagttttcgcgagataacggtcgaaaacgcgctcttgtcgatttcctgtagtgaatcaggcaccggagtgcaggttcgggggtggaatccttgggccgctgggcaagcggcgagacctggccagggccagcgagccgaggacagagggcgcacggagggccgggccgcagccccggccgcttgcagaccccgccatggacccgttcctggtgctgctgcactcggtgtcgtccagcctgtcgagcagcgagctgaccgagctcaagttcctatgcctcgggcgcgtgggcaagcgcaagctggagcgcgtgcagagcggcctagacctcttctccatgctgctggagcagaacgacctggagcccgggcacaccgagctcctgcgcgagctgctcgcctccctgcggcgccacgacctgctgcggcgcgtcgacgacttcgaggcgggggcggcggccggggccgcgcctggggaagaagacctgtgtgcagcatttaacgtcatatgtgataatgtggggaaagattggagaaggctggctcgtcagctcaaagtctcagacaccaagatcgacagcatcgaggacagatacccccgcaacctgacagagcgtgtgcgggagtcactgagaatctggaagaacacagagaaggagaacgcaacagtggcccacctggtgggggctctcaggtcctgccagatgaacctggtggctgacctggtacaagaggttcagcaggcccgtgacctccagaacaggagtggggccatgtccccgatgtcatggaactcagacgcatctacctccgaagcgtcctgatgggccgctgctttgcgctggtggaccacaggcatctacacagcctggactttggttctctccaggaaggtagcccagcactgtgaagacccagcaggaagccaggctgagtgagccacagaccacctgcttctgaactcaagctgcgtttattaatgcctctcccgcaccaggccgggcttgggccctgcacagatatttccatttcttcctcactatgacactgagcaagatcttgtctccactaaatgagctcctgcgggagtagttggaaagttggaaccgtgtccagcacagaaggaatctgtgcagatgagcagtcacactgttactccacagcggaggagaccagctcagaggcccaggaatcggagcgaagcagagaggtggagaactgggatttgaacccccgccatccttcaccagagcccatgctcaaccactgtggcgttctgctgcccctgcagttggcagaaaggatgttttgtcccatttccttggaggccaccgggacagacctggacactagggtcaggcggggtgcgtggtggggagaggcatggctggggtgggggtggggagacctggttggccgtggtccagctcttggcccctgtgtgagttgagtctcctctctgagactgctaagtaggggcagtgatggttgccaggacgaattgagataatatctgtgaggtgctgatgagtgattgacacacagcactctctaaatcttccttgtgaggattatgggtcctgcaattctacagtttcttactgttttgtatcaaaatcactatctttctgataacagaattgccaaggcagcgggatctcgtatctttaaaaagcagtcctcttattcctaaggtaatcctattaaaacacagctttacaacttccatatcacaaaaaaaaaaaaaaaaaaaaaaaaaaaaaaaaaaaaaaa

SEQ ID NO: 800 - protein, 208 aa, Homo sapien
MDPFLVLLHSVSSSLSSSELTELKFLCLGRVGKRKLERVQSGLDLFSMLLEQNDLEPGHTELLRELLASLRRHDLLRRVDDFEAGAAAGAAPGEEDLCAAFNVICDNVGKDWRRLARQLKVSDTKIDSIEDRYPRNLTERVRESLRIWKNTEKENATVAHLVGALRSCQMNLVADLVQEVQQARDLQNRSGAMSPMSWNSDASTSEAS

SEQ ID NO: 801 - DNA, 2410 bp, Homo sapien
gtccttttcctcctgtcctttgccagcgttgggccggaccgggccgagccgggccgcccgggcgcagtctttaaccatggcgtccctcttcaagaagaaaaccgtggatgatgtaataaaggaacagaatcgagagttacgaggtacacagagggctataatcagagatcgagcagctttagagaaacaagaaaaacagctggaattagaaattaagaaaatggccaagattggtaataaggaagcttgcaaagttttagccaaacaacttgtgcatctacggaaacagaagacgagaacttttgctgtaagttcaaaagttacttctatgtctacacaaacaaaagtgatgaattcccaaatgaagatggctggagcaatgtctaccacagcaaaaacaatgcaggcagttaacaagaagatggatccacaaaagacattacaaacaatgcagaatttccagaaggaaaacatgaaaatggaaatgactgaagaaatgatcaatgatacacttgatgacatctttgacggttctgatgacgaagaagaaagccaggatattgtgaatcaagttcttgatgaaattggaattgaaatttctggaaagatggccaaagctccatcagctgctcgaagcttaccatctgcctctacttcaaaggctacaatctcagatgaagagattgaacggcaactcaaggctttaggagtagattagtcaaaagaagtcatactattttgcttacttataattatgtagtataaaccaagcacagtgcagatttcttttacaaaacacatgtattttgcaaaaaaaaaaaaaatgaagaccatgagtgaacagttgtttcctaacccatggctatttagaatcttttgccaaagaatgacaatgatgcaaaaatgggaacagtttggattttaattagaactgtttaggagtgatgatgtgtaaaaagttgacttctcttttgcatggcacagagaaattatattccttacttcatgtcagtttatgttctaaatctttttcactgaatataaaaatcttgttaaatgccattaggcaccaacttaaagagggttgtaaaaatattaaaagtatatcgttaattctgtatctgttgcttgtcttttgtaagtgattatgtgttatgaccataggtggttacagctgccaaattatttttaaatggtcaaaaagaagagtgctatttaaacatctgtcttaaacaaaaactgtcataacttttcttttttctttttccattaggagaacattctagttggtaaatttcaaaatgtgcttgacacctgccttaaatagcacagacctattgtgcacatctttaaattatttcagctggcagaaaagaattacatttaaaactgaaatcaaggcctcaatacaaagattatcctggctcttttctatctctgtgggcctaattgaaatatgtactcttattttagacacgcctctgttaaaacagaccaggttttcctggtctcagacctatgatgacttgtccctttgatgtcactactgtgaattgaatataattagtaaaaatagacgatgaataaataacactttatagtaagaaaacaatatattttggccatctaaaaatgagaattataattatatgaattataatttaaactgtttaattttgtttaatgtgtatattgaatcttccaaattgaagccattattctcaattaagtactacaactatgacaatgcttgacctacatttctaaaataaaaattcacattttttgataaataaactacagttttaccagaaattactatctaaatgtgtattagcagtattttttaaggtgaaattgccttggtatctaatgaatgtgtagacagggagataaaatgaaggattgccagactagttagaatagaatttaggattaggttagttttgaaaaatgatgttgtaatatatgggttctaacacatcctaccataaaaactggaggagatatgtgtaacctggttaatttgggatggtggacattttgggctaatactgacaaaatacatcttaggactagtatacatgtgacacggattgctaggaggaatgaaaaactaaactgtatagtttatattccgtaaaccattttataatgttcaaagattaggttttgttattgatagtattaaatacacagtttctcttaacagtgatgggtgaaaacattttaccggattatggaatgtttaccagaacatgttttgattcttgaatgtacataataatgccatctaacttatttacattcttgtttacatgtgggagcttttgttttcaaaaattattttgttaaaaaatctcaataaagatttattattgttgttcttttcttaaaaaaaaaaaaaaaa

SEQ ID NO: 802 - protein, 213 aa, Homo sapien
MASLFKKKTVDDVIKEQNRELRGTQRAIIRDRAALEKQEKQLELEIKKMAKIGNKEACKVLAKQLVHLRKQKTRTFAVSSKVTSMSTQTKVMNSQMKMAGAMSTTAKTMQAVNKKMDPQKTLQTMQNFQKENMKMEMTEEMINDTLDDIFDGSDDEEESQDIVNQVLDEIGIEISGKMAKAPSAARSLPSASTSKATISDEEIERQLKALGVD

SEQ ID NO: 803 - DNA, 4471 bp, Homo sapien
ttcggtggcctctagtgagatctggaggatccaaggattctgtagctacaatgttgtcaagactttttcgaatgcatggcctctttgtggcctcccatccctgggaagtcatagtggggacagtgacactgaccatctgcatgatgtccatgaacatgtttactggtaacaataagatctgtggttggaattatgaatgtccaaagtttgaagaggatgttttgagcagtgacattataattctgacaataacacgatgcatagccatcctgtatatttacttccagttccagaatttacgtcaacttggatcaaaatatattttgggtattgctggccttttcacaattttctcaagttttgtattcagtacagttgtcattcacttcttagacaaagaattgacaggcttgaatgaagctttgccctttttcctacttttgattgacctttccagagcaagcacattagcaaagtttgccctcagttccaactcacaggatgaagtaagggaaaatattgctcgtggaatggcaattttaggtcctacgtttaccctcgatgctcttgttgaatgtcttgtgattggagttggtaccatgtcaggggtacgtcagcttgaaattatgtgctgctttggctgcatgtcagttcttgccaactacttcgtgttcatgactttcttcccagcttgtgtgtccttggtattagagctttctcgggaaagccgcgagggtcgtccaatttggcagctcagccattttgcccgagttttagaagaagaagaaaataagccgaatcctgtaactcagagggtcaagatgattatgtctctaggcttggttcttgttcatgctcacagtcgctggatagctgatccttctcctcaaaacagtacagcagatacttctaaggtttcattaggactggatgaaaatgtgtccaagagaattgaaccaagtgtttccctctggcagttttatctctctaaaatgatcagcatggatattgaacaagttattaccctaagtttagctctccttctggctgtcaagtacatcttctttgaacaaacagagacagaatctacactctcattaaaaaaccctatcacatctcctgtagtgacacaaaagaaagtcccagacaattgttgtagacgtgaacctatgctggtcagaaataaccagaaatgtgattcagtagaggaagagacagggataaaccgagaaagaaaagttgaggttataaaacccttagtggctgaaacagataccccaaacagagctacatttgtggttggtaactcctccttactcgatacttcatcagtactggtgacacaggaacctgaaattgaacttcccagggaacctcggcctaatgaagaatgtctacagatacttgggaatgcagagaaaggtgcaaaattccttagtgatgctgagatcatccagttagtcaatgctaagcatatcccagcctacaagttggaaactctgatggaaactcatgagcgtggtgtatctattcgccgacagttactttccaagaagctttcagaaccttcttctctccagtacctaccttacagggattataattactccttggtgatgggagcttgttgtgagaatgttattggatatatgcccatccctgttggagtggcaggacccctttgcttagatgaaaaagaatttcaggttccaatggcaacaacagaaggttgtcttgtggccagcaccaatagaggctgcagagcaataggtcttggtggaggtgccagcagccgagtccttgcagatgggatgactcgtggcccagttgtgcgtcttccacgtgcttgtgactctgcagaagtgaaagcctggctcgaaacatctgaagggttcgcagtgataaaggaggcatttgacagcactagcagatttgcacgtctacagaaacttcatacaagtatagctggacgcaacctttatatccgtttccagtccaggtcaggggatgccatggggatgaacatgatttcaaagggtacagagaaagcactttcaaaacttcacgagtatttccctgaaatgcagattctagccgttagtggtaactattgtactgacaagaaacctgctgctataaattggatagagggaagaggaaaatctgttgtttgtgaagctgtcattccagccaaggttgtcagagaagtattaaagactaccacagaggctatgattgaggtcaacattaacaagaatttagtgggctctgccatggctgggagcataggaggctacaacgcccatgcagcaaacattgtcaccgccatctacattgcctgtggacaggatgcagcacagaatgttggtagttcaaactgtattactttaatggaagcaagtggtcccacaaatgaagatttatatatcagctgcaccatgccatctatagagataggaacggtgggtggtgggaccaacctactacctcagcaagcctgtttgcagatgctaggtgttcaaggagcatgcaaagataatcctggggaaaatgcccggcagcttgcccgaattgtgtgtgggaccgtaatggctggggaattgtcacttatggcagcattggcagcaggacatcttgtcaaaagtcacatgattcacaacaggtcgaagatcaatttacaagacctccaaggagcttgcaccaagaagacagcctgaatagcccgacagttctgaactggaacatgggcattgggttctaaaggactaacataaaatctgtgaattaaaaaagctcaatgcattgtcttgtggaggatgaataaatgtgatcactgagacagccacttggtttttggctctttcagagaggtctcaggttctttccatgcagactcctcagatctgaacacagtttagtgctttacatgctgtgctctttgaagagatttcaacaagaatattgtatgttaaagcatcagagatggtaatctacagctcacctctgaaagcaaatataagctgggaaaaaagttttgatgaaattcttgaagttcatggtgatcagtgcaattgaccttctccctcactcctgccagttgaaaatggatttttaaattatactgtagctgatgaaactcctgattttgtagttaatttattaagtctgggatgtagaacttcaagaagtaagagctaagttctaagttcatgtttgtaaattaatacttcatttggtgctggtctattttgattttggggggtaatcagcattattcttcagaaggggacctgttttcttcaagggaagaaacactcttattcccaaactacagaataatgtgttaaacatgctaaatagttctatcaggaaaacaaatcactgtatttatctccgcaggctatttgttcagagaggccttttgtttaaatataaatgtttaaatataaatgtttgtctggattggctataacatgtctttcagcattaggcttttaagaaacacagggttttgtattctttactaaagatatcagagctcttaatgttgcttagatgagggtgactgtcaagtacaagcaagactgggaccttagaaatcattgtagaaacacagttttgaaagatttttaccatgtctctaagccaactttaattgcttaaaagacatttttatttagttgaaaaatctagttttttttgtaaactgtaccaaatctgtatatgttgtaataaaacttatgctagtttattggaagtgttcaagaaataaaaatcaacttgtgtactgataaaatactctagcctgggccagagaagataatgttctttaatgttgtcaggaaaccctggcttgcttgccgagcctaatgaaagggaaagtcagctttcagagccagtgaaggagccacgtgaatggccctagaactgtgcctagttcctgtggccaggaggttggtgactgaaacattcacacagggctcttggatggacccacgaacgctcttagctttctcagggggtcagcagagttattgaatcttaattttttttaatgtacaagttttgtataaataataaagaactccttattttgtattacatctaatgcttaagtgttgctcttggaaagctgatgatgtctcttgtagagatgactctgaaaaacattccaggaaaccatggcagcatggagagcctcttagtgattgtgtctgcattgttattgtggaagatttaccttttctgttgtacgtaaagcttaaattacttttgttgtgactttttagccagtgactttttctgagcttttcatggaagtggcagtgaaaaatatgttgagtgttcaaaaaagtgactgtaattaatatcttgctggattaatgttttgtacaattactaaattgtatacattttgttatagaatacttttttctagtttcagtaaataatgaaaaggaagttaatacca

SEQ ID NO: 804 - protein, 888 aa, Homo sapien [sequence omitted]

SEQ ID NO: 805 - DNA, 4471 bp, Homo sapien; identical to SEQ ID NO: 803

SEQ ID NO: 806 - protein, 888 aa, Homo sapien [sequence omitted]

SEQ ID NO: 807 - DNA, 4131 bp, Homo sapien
ctgggccaggcgccggggcaggaagggaggcggccgccgtggccattcttaaaggcgcccgagtgtaggcgacaggccgctgacggcgggaaggaaaatgagtgagtctttggttgtttgtgatgttgccgaagatttagtggaaaagctgagaaagtttcgttttcgcaaagaaacgaacaacgctgctattataatgaagattgacaaggataaacgcctggtggtactggatgaggagcttgagggcatttcaccagatgaacttaaagatgaactacctgaacgacaacctcgcttcattgtgtatagttataaatatcaacatgatgatggaagagtttcatatcctctgtgctttattttctccagtcctgttggatgtaagcctgaacaacagatgatgtatgctggaagtaagaataagctagtccagacagctgaactaaccaaggtatttgaaataagaaataccgaagacctaactgaagaatggttacgtgagaaacttggattttttcactaatgtgaacttctgtgtttctaaagtatttatgtattaacctgaccatactggaatcagacataaatacttatttatgcctaaaaatgcactgttacttacagtttgtttcctgcagtaaagaaaaattcttcatttgtgcaaaatttgaacaaagaggaaatcatcttcatagtaatgaaactttgtaaagtgtttccttatattggtaattgttaggtggactacttttctccagggactttttgcactcttgtgactaatttctataacttatggttcggaatttgttactatttacagacaccattggaaagtggatatattagattgtgagagacaacagttgcctccttttgacaaatactggatattagcagtttatttatgaaaatagcgtattatcacttgtcaaatcattgaaattcatttggggtcaaagacttgagtgacccagtattgagccatgaataatttagtgtaacctgtattacaagtacattgatgaattctgtatcttctttggtttcctgtatctttttaatcaagtctagaaactatgttcatcagtcactcatttttaaggtcgggagttagattttatgatagaattatgactgttagcttttctccttatagcatcttagtcttagaaattggtgggttgtaataatcaagggcttcattccttttatgtcatttctagacagttttgaatctaggttaataacactttatttataaagcacctcaatgtcctgtgaacactaattattttaaatgtgttaatactgtgcctttgatttgttagctttaaagttagtttaagacttttacactgccagtattccacatttggtgaaattaatacttttttaaagggtccaaataaaataattttctaatgtgtatatctgaaatttgtaataaaatcaacttcatattttaaaaattccaactatctgcttgcattggtgtaatatatggcagtcgagagttataattttgggtatacttgtggttagttttgtgccataggaaaaaattatcttaaaactttggccatagttaataacattaacacttcaatagcaatcacatcttatatcctaaatgtcagaagatattctgaactggatgcctgaatagttaactaaaccagtcttggttagatgatggtactcttggcataaagcgtaggattctgatatttggcatacttgtaaaaacaaatacataagtaaccattgaacattaatttgataataggtctagagactctaaaaactaaccaaacttggtgagtgtattcttatattaagaatatcttagtcatctcaaaactagcaaaatttaaattttggcatgttttccattcatatgttctttgcattttatttttgaggtttctgtgagaagtaaagatagttggaatttttgcgatattgaatagaacatcttctgttcccaacactgtttggcttcactaatttagaagtcaggaagcaatagaaagttggagatgaggaagtgctagagtaggtgtttgttttggttcttggagggaaaagattctttattccaatttccagagagaagagaaaactcacccaggaagtttaaaaattctttaaacaggtattttgatattggagaataacatgcatataattctgtaggaatgcacatgtaatccaagtgagtggagagtgtttttaatgtttttgaatgaaggaaatgaggttttgtttcacctgttttgcagcagtaagagaaactagtgctgcaagaatgtattttttaatgaagttccttattttgtcttgcatgttttagttttgcttatttttaaatttggaggtcctccataatgtcagataatattgacctgccatacgttagcactcttagttccgctactgtctttaacaggagcaaagagctgtgataaaccatgcttttttgagcttgtctgactcctaattaataacatgtttttggcaagacaacagattgaggttagaggatcagtaggacatttttattccatctgtcctatggggaaatttacaaatcccgtgctctaaaatgttctcaaacatttatatagatttccctttcatcttactaaattttgcattgttcttttcaagtatgtttcgtatttactgtctttttttctgccatttcccaaataataactccagatttcataattccagtttttacattccgttatctttctggtacaaccattcccattcagccttaaatctgagtcctttttagcagcaacttttttcctgggatcctccttcgtggtcttctaagtcagtgttagttttgaaatttttggccctgcataagttctgcatagcatctaatgtcaaaatagaaccaactggtaatcacagtattatttagtgtggtttccatgacaacaaaaatacatacgaagaaaacttctcaggttactatgctgaaattccaaaatgtctgagttttgaatagtgatcactttgttctggtattgacgcaattatattaggaaaaaagttggttgactgtttttgtttaattgacttctaaaatgttcaaattgtctagttctaaaagtttactaaatgcctagtgcagttaaacatactcttgtttaagtgtgtgttgctaaattttttactgtcattactaaataatctgtgtggcaaaatgtgtgtcagcacttttccctccttttttatctcctattttcaggagtcaaatgtagccataaactgtatccttgtctgacactttagctaaaaatttccagttaggggagtttattgccaaattaaatttggctgttccccccaacccatatagatattaaggaaggtgtacttaaaaaatgtttggactgcttttaaaacctgagcaatgtcattaatccatatgtggactagtgatgaatagatattttcataagagtttaaatgactgatatttggtggaagtagagagtaactcaatattctatcaattcaagtattcttactatggttgcctttccctatttgttcaatagactgataatactggtatttatagagtttgagccattacaacttttgtgaggatgtgtttcaaacatttctggacaaatcttattttgtatttctggaagaatgtagtaatcttctagaccgcttaaaaccaatgctcccaagctgaatattcttgagcaaatttgttttttattatgccatttgacatttcaaatcagtgctcatatacagtaaacttgtgatagaaattgtattttattgctttttggattataattcatataaatataattacttgaatattgtttgagatcattaacatgccagggcagttcccactgatttagatggtccaagataatctcattcaggaggcttgaaacattaatggtttagtcttgtgaattttaacagttctctgtcatcgtttaacaaaaccaacaactgacacaactccttaagctgtggtttcagtctctgctagttcatattgcatgtttattttggacagtcttttgttaagcatggtgcttgtactggtttaaataaaatgttaacatt

SEQ ID NO: 808 - protein, 142 aa, Homo sapien
MSESLVVCDVAEDLVEKLRKFRFRKETNNAAIIMKIDKDKRLVVLDEELEGISPDELKDELPERQPRFIVYSYKYQHDDGRVSYPLCFIFSSPVGCKPEQQMMYAGSKNKLVQTAELTKVFEIRNTEDLTEEWLREKLGFFH

SEQ ID NO: 809 - DNA, 1238 bp, Homo sapien
ggcacgaggaagatatatggatacagattatatatatatatacatattttccttaatagaggaatgcttcatattattcaaaaattatatcctgatcacctttttttgttttttattgtaaagtatctctgctttatccattgctgaattcgataggatgttgaaatgctggtcaccaaaaaaggaaactgagcaaattcatttcaacaacatcaaaacttcagcttctcatagtaaaaagctgaatgttactaatatttttcatatctaaaaaaaaattcttagcaatgaaattgctgttaaaacacaaatttcaatcaaatacttttgtgtatagaaaatatgtatagtaggtagatagaaaagtataaaatgtttgttgaagtatcttattttagaatgaatggagaaatgccaaagatgaatccttcactgcattatgaaaatatttcacatgttctcttggactttatataaatctgtaatagattttagaattgaaaaattctttgtgaaggtcttctaaaagtgttccaatttatctcaaaatctccatatataggatcagcttaaaacataaagaaaaccttgaatttctcaaatgtttgagatgttcaagacagtctcttaatccgttaatgcttttggaaacaattgacaaaatagggcaggcagctcatctcatgtcctgaagttggaatttaaataattcctatttgcaaattagaatgacagtgttggaatttggaggcagtagttgagcatattctctagtatatagctacacctttaataaaatgaaggaatgtcttcaatcatattttagtgggctatttataaatagtcttgaagtcaatttagtttatttatttaaaagataatgcatcctgaaagggatcatttatgaataacaatctgaagtcttttcataaaaaaaattaataaactttagttgtacatttagccagtgttatttgaagtatgtaacttttaaaatattaagtgtcttgtatgattagaatatgtgaatgagtaacttattttgtatcaggaatgttttggtactgtgttttcactcaaaccactgacttaacagatactgctgtgtataacatgtactaaatattacagttattgtgcataacagattgttcctcttatatttgtgtgtatacaggcaattcatgttttaatgtaaataaataccattttgcagttaaaaaaaaaaaaaaaaaaaa

SEQ ID NO: 810 - DNA, 8300 bp, Homo sapien
cactgctctgactgcgtcctccccaggctgaagtgtcctcaggtttcatgtggatttgcccagtaatggatggctccaccgaggccaggttggggaagttcagcctcgaggacactaggggacgaaaaacttcaaaaagaagactctttttattaatattttggcgttctttttggagaggaacttttgggatgtagcctttacctgtttcctgaatttgacatccaaaaagccttttggaaaacaccattctaaatttatcctgttctgaatcatcatcgcttctgatagatgcagttgcttgctgacatcgtgatctttgattttgtacaacgctatttgggctaacttttgggattttactttgtgcttagaatttgaaagtagtattcattggaaagagactccaagaaaatactcgaagacatcaaaagctggattcgagggtataacgtgttttgttttgttttttaaattagaaaaataaggaattgcagtgtgattttctttccccctttaacttagaggaacgaggattatacagaaatttgaaatttcaacaagaaaaacttaagcttccttggattcccacgtcaaaggaaagtttcaagctttcagaaggagttctcactcgaagataaagaacagctcgctaaccacgaaagaggaatcgatgctcagcttttagttgcacttcctaaagttgcagaattaagacaaatctttgaaccaaagaagaaagaattcttagaaatgaaaagaaaagaaagaattgccaggcgcctggaaggaattgaaaatgacactcagcccatcctcttgcagagctgcacaggattggtgactcaccgcctgctggaggaagacacccctcgatacatgagagccagcgaccctgccagcccccacatcggccgatcaaatgaagaggaggaaacttccgattcttctctagaaaagcaaactcgatccaaatactgcacagaaacctccggtgtccacggtgactcaccctatggttcgggtaccatggacacccacagtctggagtccaaagccgaaagaattgcaaggtacaaagcagaaagaaggcgacagctggcagagaagtatgggctgactctggatcccgaggccgactccgagtatttatcccgctataccaagtccaggaaggagcctgatgctgtcgagaagcggggaggaaaaagtgacaaacaggaagagtcaagcagagatgcgagttctctgtaccccgggaccgagacgatggggctcaggacctgtgccggtgaatccaaggactatgccctccatgcgggtgacggctcttccgacccggaggtgctgctgaacatagaaaaccaaagacgaggtcaagagctgagtgccacccggcaggcccatgacctgtccccagcagccgagagttcctcgaccttctctttctctgggcgagactcctccttcactgaagtgccacggtcccccaagcacgcccacagctcctccctgcagcaggcagcctcccggagcccctcctttggtgacccacagctatcccctgaggcccgacccagtacagggaaacccaaacatgagtggtttctccagaaagattccgaaggggacacaccttcacttatcaactggccttccagagttaaagttagagaaaaattggtgaaagaggaaagtgctcgaaacagccctgaactcgcctcagagtccgtaactcagaggagacaccagccagcgccagtccattacgtgtcatttcagtctgagcactcagcctttgatagggtccccagcaaggcagcaggctctacacgacagccaatccgtggctatgtccaacccgcagataccggtcacaccgccaagctggtgacgccagaaaccccagaaaatgcatctgagtgtagctgggtagcatcagccacccagaatgtccccaaacctcccagcttgacggttctagaaggtgacggaagggatagcccagttctccatatctgcgagtcaaaagcagaagaagaagaaggggaaggagaaggagaagaaaaagaagaagatgtgtgcttcactgaagctctcgagcaaagcaagaaaaccctactggctttggagggtgatgggctagtgagaagcccagaagatccctctagaaatgaggactttggtaagcctgctgtgagcacagtcaccttagagcatcagaaggaactggaaaacgtggcacaaccccctcaagctccgcaccagcccactgagaggacaggcaggagcgagatggttctctacattcaaagtgagcctgtgtcccaagacgccaaaccaactggtcacaacagggaagcctcgaaaaagcgcaaggtccgtacccgctctctgtcagatttcacaggcccccctcagctccaggccttgaagtataaggacccagcttccaggagagagctggagctgcccagctccaagaccgaagggccttatggggagatcagcatgctggacacaaaggtctctgtcgcccagctccgaagtgcgttcctggcatctgccaacgcctgcaggagacctgaactcaaatcacgggtagagaggtcggctgaaggacctggcttgcccaccggtgtggaacgggagagagggtcccggaaaccaagacgctatttttctcctggtgaaagtagaaaaacttccgagagatttagaacccaacctataacttcagcagaacgaaaggaatcggataggtgcacttcacattcagaaacgccaactgtcgatgatgaagaaaaggtggatgaacgagccaagctgagcgtcgccgccaagaggttgcttttcagggagatggaaaaatcttttgatgaacaaaatgttccaaagcgacgctcaagaaacacagctgtggagcagaggctacgccgtctgcaggacaggtccctcacccagcccatcaccactgaagaggtggtcatcgcagccactgaacctatccccgcttcgtgttctgggggcacccaccctgtaatggcgagacttcctagccccactgtagctaggagcgctgtgcagcctgccagattgcaggcctctgctcaccaaaaggccttagccaaggaccagacaaatgagggcaaagagcttgctgagcaaggagaacctgattcctccactctaagcttggccgaaaagttggccttgtttaacaaattgtcccagccagtctcaaaagcgatttctacccggaacagaatagacacgagacagaggagaatgaacgctcgctatcaaactcagccagtcacactgggagaggtggagcaggtgcagagtggaaagctcattcctttctcacctgccgtgaacacatcagtgtctaccgtagcatccacggttgctccaatgtatgccggagatcttcgcacaaagccacctcttgaccacaatgcaagtgccactgactataagttttcttcttcaatagaaaattcggactctccagttagaagcattctgaaatcgcaagcttggcagcctttggtagagggtagcgagaacaagggaatgttgagagaatatggagagacagaaagcaagagagctttgacaggtcgagacagtgggatggagaagtatgggtcctttgaggaagcagaagcatcctaccccatcctgaaccgagccagggaaggagacagccataaggaatctaaatatgctgttcccagaagaggaagcctggaacgggcgaaccctcccatcacccacctcggggatgaaccgaaggaattttccatggctaaaatgaatgcacaaggaaacttggacttgagggacaggctgccctttgaagagaaggtggaggtggagaatgttatgaaaaggaagttttcactaagagcggcagagttcggggagcccacttccgagcagacggggacagctgctgggaaaactattgctcaaaccacagcccccgtgtcctggaagccccaggattcttcggaacagccacaggagaagctctgcaagaatccatgtgcgatgtttgctgctggagagatcaaaacgccgacaggggagggccttcttgactcacccagcaaaaccatgtctattaaagaaagattggcactgttgaagaaaagcggggaggaagattggagaaacagactcagcaggaggcaggagggcggcaaggcgccggccagcagcctgcacacccaggaagcagggcggtccctcatcaagaagcgggtcacagaaagtcgagagagccaaatgacgattgaggagaggaagcagctcatcactgtgagagaggaggcctggaagacgagaggcagaggagcggccaacgactcgacccagttcactgtggctggcaggatggtgaagaaaggtttggcgtcacctactgccataaccccagtagcctcagccatttgcggtaaaacaagaggcaccacacccgtttccaaacccctggaagatatcgaagccagaccagatatgcagttagaatcggacctgaagttggacaggctggaaacctttctaagaaggctgaataacaaagttggcgggatgcacgaaacggtgctcactgtcaccggcaaatctgtgaaggaggtgatgaagccagatgatgatgaaacctttgccaaattttaccgcagcgtggattataatatgccaagaagtcctgtggagatggatgaggacttcgatgtcattttcgatccttatgcacccaaattgacgtcttccgtggccgagcacaagcgggcagttaggcccaagcgccgggttcaggcctccaaaaaccccctgaaaatgctggcggcaagagaagatctccttcaggaatacactgagcagagattaaacgttgccttcatggagtcaaagcggatgaaagtagaaaagatgtcttccaactccaacttctcagaagtcaccctggcgggtttagccagtaaagaaaacttcagcaacgtcagcctgcggagcgtcaacctgacggaacagaactctaacaacagcgccgtgccctacaagaggctgatgctgttgcagattaaaggaagaagacatgtgcagaccaggctggtggaacctcgagcttcggcgctcaacagtggggactgcttcctcctgctctctccccactgctgcttcctgtgggtaggagagtttgcaaacgtcatagaaaaggcgaaggcctcagaacttgcaactttaattcagacaaagagggaacttggttgtagagctacttatatccaaaccattgaagaaggaattaatacacacactcatgcagccaaagacttctggaagcttctgggtggccaaaccagttaccaatctgctggagacccaaaagaagatgaactctatgaagcagccataatagaaactaactgcatttaccgtctcatggatgacaaacttgttcctgatgacgactactgggggaaaattccgaagtgctcccttctgcaacccaaagaggtactggtgtttgattttggtagtgaagtttacgtatggcatgggaaagaagtcacattagcacaacgaaaaatagcatttcagctggcaaagcacttatggaatggaacctttgactatgagaactgtgacatcaatcccctggatcctggagaatgcaatccgcttatccccagaaaaggacaggggcggcccgactgggcgatatttgggagacttactgaacacaatgagacgattttgttcaaagagaagtttctggattggacggaactgaagagatcgaatgagaagaaccccggggaacttgcccagcacaaggaagaccccaggactgatgtcaaggcatacgatgtgacacggatggtgtccatgccccagacgacagcaggcaccatcctggacggagtgaacgtcggccgtggctatggcctggtggaaggacacgacaggaggcagtttgagatcaccagcgtttccgtggatgtctggcacatcctggaattcgactatagcaggctccccaaacaaagcatcgggcagttccatgagggggatgcctatgtggtcaagtggaagttcatggtgagcacggcagtgggaagtcgccagaagggagagcactcggtgagggcagccggcaaagagaagtgcgtctacttcttctggcaaggccggcactccaccgtgagtgagaagggcacgtcggcgctgatgacggtggagctggacgaggaaaggggggcccaggtccaggttctccagggaaaggagcccccctgtttcctgcagtgtttccagggggggatggtggtgcactcggggaggcgggaagaggaagaagaaaatgtgcaaagtgagtggcggctgtactgcgtgcgtggagaggtgcccgtggaagggaatttgctggaagtggcctgtcactgtagcagcctgaggtccagaacttccatggtggtgcttaacgtcaacaaggccctcatctacctgtggcacggatgcaaagcccaggcccacacgaaggaggtcggaaggaccgctgcgaacaagatcaaggaacaatgtcccctggaagcaggactgcatagtagcagcaaagtcacaatacacgagtgtgatgaaggctccgagccactcggattctgggatgccttaggaaggagagacaggaaagcctacgattgcatgcttcaagatcctggaagttttaacttcgcgccccgcctgttcatcctcagcagctcctctggggattttgcagccacagagtttgtgtaccctgcccgagccccctctgtggtcagttccatgcccttcctgcaggaagatctgtacagcgcgccccagccagcacttttccttgttgacaatcaccacgaggtgtacctctggcaaggctggtggcccatcgagaacaagatcactggttccgcccgcatccgctgggcctccgaccggaagagtgcgatggagactgtgctccagtactgcaaaggaaaaaatctcaagaaaccagcccccaagtcttaccttatccacgctggtctggagcccctgacattcaccaatatgtttcccagctgggagcacagagaggacatcgctgagatcacagagatggacacggaagtttccaatcagatcaccctcgtggaagacgtcttagccaagctctgtaaaaccatttacccgctggccgacctcctggccaggccactcccggagggggtcgatcctctgaagcttgagatctatctcaccgacgaagacttcgagtttgcactagacatgacgagggatgaatacaacgccctgcccgcctggaagcaggtgaacctgaagaaagcaaaaggcctgttctgagtggggagacgccagaggagcctcacggtcacgtccaacaacaccactgcaccagggaaatggatatatatttttggactggtgtttttcacaaagtatttttcaatcagagttttcagaacctgacattgttaaagatactgcttgtcccggagttgtgtattttgtaaatgttcaagggaactgtttggaaacttctttccaccattcaggaggttatcagaattaataaaagtatctgttatgtgcacttaagccgcagctgctatagatagcactgccttcttgttccagctaggcaatgcctttttttttttttttgaagcagttctctttataaagtgttattttgatagtttgtggattctaaaatatatatatatttatataaacaccatataagtcaaatatgtatttaacaaagcaatatgtattcattcactttcaagatttgttttggtgtcaaaataacatgaaaaggtagatggagttgcttctgttgaattagctctgccaccaatatgtatcttcatacacgtttggaaatgtttcctgcagcattaggtatgacttgttctgagtactgcttccggtgctaaaatgaacaaagaatttgtacttaatggcatggactctggagaatctatgcgaatcaacctttctaccttaatatctccccaaaaatgtatagtgccttgtttttatgtacagtttatatacagaaaagtttgctctgcatttttgatgatggtttggaacattatctacaattttactctcaaatagtcaaaataaaaacatctcaatttctaataccggttgtaaacaaacagtacacatgtcattttgtgatataggactcccaaataaaagtatcagaataaacacaacaattaactggt

SEQ ID NO: 811 - protein, 2000 aa, Homo sapien
MKRKERIARRLEGIENDTQPILLQSCTGLVTHRLLEEDTPRYMRASDPASPHIGRSNEEEETSDSSLEKQTRSKYCTETSGVHGDSPYGSGTMDTHSLESKAERIARYKAERRRQLAEKYGLTLDPEADSEYLSRYTKSRKEPDAVEKRGGKSDKQEESSRDASSLYPGTETMGLRTCAGESKDYALHAGDGSSDPEVLLNIENQRRGQELSATRQAHDLSPAAESSSTFSFSGRDSSFTEVPRSPKHAHSSSLQQAASRSPSFGDPQLSPEARPSTGKPKHEWFLQKDSEGDTPSLINWPSRVKVREKLVKEESARNSPELASESVTQRRHQPAPVHYVSFQSEHSAFDRVPSKAAGSTRQPIRGYVQPADTGHTAKLVTPETPENASECSWVASATQNVPKPPSLTVLEGDGRDSPVLHICESKAEEEEGEGEGEEKEEDVCFTEALEQSKKTLLALEGDGLVRSPEDPSRNEDFGKPAVSTVTLEHQKELENVAQPPQAPHQPTERTGRSEMVLYIQSEPVSQDAKPTGHNREASKKRKVRTRSLSDFTGPPQLQALKYKDPASRRELELPSSKTEGPYGEISMLDTKVSVAQLRSAFLASANACRRPELKSRVERSAEGPGLPTGVERERGSRKPRRYFSPGESRKTSERFRTQPITSAERKESDRCTSHSETPTVDDEEKVDERAKLSVAAKRLLFREMEKSFDEQNVPKRRSRNTAVEQRLRRLQDRSLTQPITTEEVVIAATEPIPASCSGGTHPVMARLPSPTVARSAVQPARLQASAHQKALAKDQTNEGKELAEQGEPDSSTLSLAEKLALFNKLSQPVSKAISTRNRIDTRQRRMNARYQTQPVTLGEVEQVQSGKLIPFSPAVNTSVSTVASTVAPMYAGDLRTKPPLDHNASATDYKFSSSIENSDSPVRSILKSQAWQPLVEGSENKGMLREYGETESKRALTGRDSGMEKYGSFEEAEASYPILNRAREGDSHKESKYAVPRRGSLERANPPITHLGDEPKEFSMAKMNAQGNLDLRDRLPFEEKVEVENVMKRKFSLRAAEFGEPTSEQTGTAAGKTIAQTTAPVSWKPQDSSEQPQEKLCKNPCAMFAAGEIKTPTGEGLLDSPSKTMSIKERLALLKKSGEEDWRNRLSRRQEGGKAPASSLHTQEAGRSLIKKRVTESRESQMTIEERKQLITVREEAWKTRGRGAANDSTQFTVAGRMVKKGLASPTAITPVASAICGKTRGTTPVSKPLEDIEARPDMQLESDLKLDRLETFLRRLNNKVGGMHETVLTVTGKSVKEVMKPDDDETFAKFYRSVDYNMPRSPVEMDEDFDVIFDPYAPKLTSSVAEHKRAVRPKRRVQASKNPLKMLAAREDLLQEYTEQRLNVAFMESKRMKVEKMSSNSNFSEVTLAGLASKENFSNVSLRSVNLTEQNSNNSAVPYKRLMLLQIKGRRHVQTRLVEPRASALNSGDCFLLLSPHCCFLWVGEFANVIEKAKASELATLIQTKRELGCRATYIQTIEEGINTHTHAAKDFWKLLGGQTSYQSAGDPKEDELYEAAIIETNCIYRLMDDKLVPDDDYWGKIPKCSLLQPKEVLVFDFGSEVYVWHGKEVTLAQRKIAFQLAKHLWNGTFDYENCDINPLDPGECNPLIPRKGQGRPDWAIFGRLTEHNETILFKEKFLDWTELKRSNEKNPGELAQHKEDPRTDVKAYDVTRMVSMPQTTAGTILDGVNVGRGYGLVEGHDRRQFEITSVSVDVWHILEFDYSRLPKQSIGQFHEGDAYVVKWKFMVSTAVGSRQKGEHSVRAAGKEKCVYFFWQGRHSTVSEKGTSALMTVELDEERGAQVQVLQGKEPPCFLQCFQGGMVVHSGRREEEEENVQSEWRLYCVRGEVPVEGNLLEVACHCSSLRSRTSMVVLNVNKALIYLWHGCKAQAHTKEVGRTAANKIKEQCPLEAGLHSSSKVTIHECDEGSEPLGFWDALGRRDRKAYDCMLQDPGSFNFA

SEQ ID NO: 812 - DNA, 8300 bp, Homo sapien; identical to SEQ ID NO: 810

SEQ ID NO: 813 - protein, 2214 aa, Homo sapien
MKRKERIARRLEGIENDTQPILLQSCTGLVTHRLLEEDTPRYMRASDPASPHIGRSNEEEETSDSSLEKQTRSKYCTETSGVHGDSPYGSGTMDTHSLESKAERIARYKAERRRQLAEKYGLTLDPEADSEYLSRYTKSRKEPDAVEKRGGKSDKQEESSRDASSLYPGTETMGLRTCAGESKDYALHAGDGSSDPEVLLNIENQRRGQELSATRQAHDLSPAAESSSTFSFSGRDSSFTEVPRSPKHAHSSSLQQAASRSPSFGDPQLSPEARPSTGKPKHEWFLQKDSEGDTPSLINWPSRVKVREKLVKEESARNSPELASESVTQRRHQPAPVHYVSFQSEHSAFDRVPSKAAGSTRQPIRGYVQPADTGHTAKLVTPETPENASECSWVASATQNVPKPPSLTVLEGDGRDSPVLHICESKAEEEEGEGEGEEKEEDVCFTEALEQSKKTLLALEGDGLVRSPEDPSRNEDFGKPAVSTVTLEHQKELENVAQPPQAPHQPTERTGRSEMVLYIQSEPVSQDAKPTGHNREASKKRKVRTRSLSDFTGPPQLQALKYKDPASRRELELPSSKTEGPYGEISMLDTKVSVAQLRSAFLASANACRRPELKSRVERSAEGPGLPTGVERERGSRKPRRYFSPGESRKTSERFRTQPITSAERKESDRCTSHSETPTVDDEEKVDERAKLSVAAKRLLFREMEKSFDEQNVPKRRSRNTAVEQRLRRLQDRSLTQPITTEEVVIAATEPIPASCSGGTHPVMARLPSPTVARSAVQPARLQASAHQKALAKDQTNEGKELAEQGEPDSSTLSLAEKLALFNKLSQPVSKAISTRNRIDTRQRRMNARYQTQPVTLGEVEQVQSGKLIPFSPAVNTSVSTVASTVAPMYAGDLRTKPPLDHNASATDYKFSSSIENSDSPVRSILKSQAWQPLVEGSENKGMLREYGETESKRALTGRDSGMEKYGSFEEAEASYPILNRAREGDSHKESKYAVPRRGSLERANPPITHLGDEPKEFSMAKMNAQGNLDLRDRLPFEEKVEVENVMKRKFSLRAAEFGEPTSEQTGTAAGKTIAQTTAPVSWKPQDSSEQPQEKLCKNPCAMFAAGEIKTPTGEGLLDSPSKTMSIKERLALLKKSGEEDWRNRLSRRQEGGKAPASSLHTQEAGRSLIKKRVTESRESQMTIEERKQLITVREEAWKTRGRGAANDSTQFTVAGRMVKKGLASPTAITPVASAICGKTRGTTPVSKPLEDIEARPDMQLESDLKLDRLETFLRRLNNKVGGMHETVLTVTGKSVKEVMKPDDDETFAKFYRSVDYNMPRSPVEMDEDFDVIFDPYAPKLTSSVAEHKRAVRPKRRVQASKNPLKMLAAREDLLQEYTEQRLNVAFMESKRMKVEKMSSNSNFSEVTLAGLASKENFSNVSLRSVNLTEQNSNNSAVPYKRLMLLQIKGRRHVQTRLVEPRASALNSGDCFLLLSPHCCFLWVGEFANVIEKAKASELATLIQTKRELGCRATYIQTIEEGINTHTHAAKDFWKLLGGQTSYQSAGDPKEDELYEAAIIETNCIYRLMDDKLVPDDDYWGKIPKCSLLQPKEVLVFDFGSEVYVWHGKEVTLAQRKIAFQLAKHLWNGTFDYENCDINPLDPGECNPLIPRKGQGRPDWAIFGRLTEHNETILFKEKFLDWTELKRSNEKNPGELAQHKEDPRTDVKAYDVTRMVSMPQTTAGTILDGVNVGRGYGLVEGHDRRQFEITSVSVDVWHILEFDYSRLPKQSIGQFHEGDAYVVKWKFMVSTAVGSRQKGEHSVRAAGKEKCVYFFWQGRHSTVSEKGTSALMTVELDEERGAQVQVLQGKEPPCFLQCFQGGMVVHSGRREEEEENVQSEWRLYCVRGEVPVEGNLLEVACHCSSLRSRTSMVVLNVNKALIYLWHGCKAQAHTKEVGRTAANKIKEQCPLEAGLHSSSKVTIHECDEGSEPLGFWDALGRRDRKAYDCMLQDPGSFNFAPRLFILSSSSGDFAATEFVYPARAPSVVSSMPFLQEDLYSAPQPALFLVDNHHEVYLWQGWWPIENKITGSARIRWASDRKSAMETVLQYCKGKNLKKPAPKSYLIHAGLEPLTFTNMFPSWEHREDIAEITEMDTEVSNQITLVEDVLAKLCKTIYPLADLLARPLPEGVDPLKLEIYLTDEDFEFALDMTRDEYNALPAWKQVNLKKAKGLF

SEQ ID NO: 814 - DNA, 626 bp, Homo sapien
tcttgactcacgccttcgccgtagcatctttcgcagcggaccgaagagaagaaaagtaggccagagccgaactctcttcctgccaagatgtctattggtgtgccgattaaagtactgcatgaggccgagggccacattgtgacatgtgagacgaacaccggtgaggtatatcgggggaagctcattgaagcagaggacaacatgaactgccagatgtccaacatcacagtcacatacagagatggccgagtggcacagctggagcaggtatacatccgtggcagcaaaatccgctttctgattttgcctgacatgctgaagaacgcacccatgttaaagagcatgaaaaataaaaaccaaggctcaggggctggccgaggaaaagctgccattctcaaggcccaagtggccgcaagaggaagaggacgtggaatgggacgtggaaacatctttcaaaagcgaagataattttctaagttgaacagaactttgtccttttttctttcaggttatctgagttcattggagtgggtgcttgtgcatatatctaggtatcttttgccatctttctctttagatcaggggaaatgtttaagctaaataaatctggggggttttttgttctg

SEQ ID NO: 815 - protein, 126 aa, Homo sapien
MSIGVPIKVLHEAEGHIVTCETNTGEVYRGKLIEAEDNMNCQMSNITVTYRDGRVAQLEQVYIRGSKIRFLILPDMLKNAPMLKSMKNKNQGSGAGRGKAAILKAQVAARGRGRGMGRGNIFQKRR

SEQ ID NO: 816 - DNA, 3336 bp, Homo sapien
  Unsure 3317: Unknown base
cggcggcgactgcagtctggagggtccacacttgtgattctcaatggagagtgaaaacgcagattcataatgaaagctagcccccgtcggccactgattctcaaaagacggaggctgccccttcctgttcaaaatgccccaagtgaaacatcagaggaggaacctaagagatcccctgcccaacaggagtctaatcaagcagaggcctccaaggaagtggcggagtccaactcttgcaagtttccagctgggatcaagattattaaccaccccaccatgcccaacacgcaagtagtggccatccccaacaatgctaatattcacagcatcatcacagcactgactgccaagggaaaagagagtggcagtagtgggcccaacaaattcatcctcatcagctgtgggggagccccaactcagcctccaggactccggcctcaaacccaaaccagctatgatgccaaaaggacagaagtgaccctggagaccttgggaccaaaacctgcagctagggatgtgaatcttcctagaccacctggagccctttgcgagcagaaacgggagacctgtgcagatggtgaggcagcaggctgcactatcaacaatagcctatccaacatccagtggcttcgaaagatgagttctgatggactgggctcccgcagcatcaagcaagagatggaggaaaaggagaattgtcacctggagcagcgacaggttaaggttgaggagccttcgagaccatcagcgtcctggcagaactctgtgtctgagcggccaccctactcttacatggccatgatacaattcgccatcaacagcactgagaggaagcgcatgactttgaaagacatctatacgtggattgaggaccactttccctactttaagcacattgccaagccaggctggaagaactccatccgccacaacctttccctgcacgacatgtttgtccgggagacgtctgccaatggcaaggtctccttctggaccattcaccccagtgccaaccgctacttgacattggaccaggtgtttaagccactggacccagggtctccacaattgcccgagcacttggaatcacagcagaaacgaccgaatccagagctccgccggaacatgaccatcaaaaccgaactccccctgggcgcacggcggaagatgaagccactgctaccacgggtcagctcatacctggtacctatccagttcccggtgaaccagtcactggtgttgcagccctcggtgaaggtgccattgcccctggcggcttccctcatgagctcagagcttgcccgccatagcaagcgagtccgcattgcccccaaggtgctgctagctgaggaggggatagctcctctttcttctgcaggaccagggaaagaggagaaactcctgtttggagaagggttttctcctttgcttccagttcagactatcaaggaggaagaaatccagcctggggaggaaatgccacacttagcgagacccatcaaagtggagagccctcccttggaagagtggccctccccggccccatctttcaaagaggaatcatctcactcctgggaggattcgtcccaatctcccaccccaagacccaagaagtcctacagtgggcttaggtccccaacccggtgtgtctcggaaatgcttgtgattcaacacagggagaggagggagaggagccggtctcggaggaaacagcatctactgcctccctgtgtggatgagccggagctgctcttctcagaggggcccagtacttcccgctgggccgcagagctcccgttcccagcagactcctctgaccctgcctcccagctcagctactcccaggaagtgggaggaccttttaagacacccattaaggaaacgctgcccatctcctccaccccgagcaaatctgtcctccccagaacccctgaatcctggaggctcacgcccccagccaaagtagggggactggatttcagcccagtacaaacctcccagggtgcctctgaccccttgcctgaccccctggggctgatggatctcagcaccactcccttgcaaagtgctcccccccttgaatcaccgcaaaggctcctcagttcagaacccttagacctcatctccgtcccctttggcaactcttctccctcagatatagacgtccccaagccaggctccccggagccacaggtttctggccttgcagccaatcgttctctgacagaaggcctggtcctggacacaatgaatgacagcctcagcaagatcctgctggacatcagctttcctggcctggacgaggacccactgggccctgacaacatcaactggtcccagtttattcctgagctacagtagagccctgcccttgcccctgtgctcaagctgtccaccatcccgggcactccaaggctcagtgcaccccaagcctctgagtgaggacagcaggcagggactgttctgctcctcatagctccctgctgcctgattatgcaaaagtagcagtcacaccctagccactgctgggaccttgtgttccccaagagtatctgattcctctgctgtccctgccaggagctgaagggtgggaacaacaaaggcaatggtgaaaagagattaggaaccccccagcctgtttccattctctgcccagcagtctcttaccttccctgatctttgcagggtggtccgtgtaaatagtataaattctccaaattatcctctaattataaatgtaagcttatttccttagatcattatccagagactgccagaaggtgggtaggatgacctggggtttcaattgacttctgttccttgcttttagttttgatagaagggaagacctgcagtgcacggtttcttccaggctgaggtacctggatcttgggttcttcactgcagggacccagacaagtggatctgcttgccagagtcctttttgcccctccctgccacctccccgtgtttccaagtcagctttcctgcaagaagaaatcctggttaaaaaagtcttttgtattgggtcaggagttgaatttggggtgggaggatggatgcaactgaagcagagtgtgggtgcccagatgtgcgctattagatgtttctctgataatgtccccaatcataccagggagactggcattgacgagaactcaggtggaggcttgagaaggccgaaagggcccctgacctgcctggcttccttagcttgcccctcagctttgcaaagagccaccctaggccccagctgaccgcatgggtgtgagccagcttgagaacactaactactcaataaaagcgaaggtggaccnaaaaaaaaaaaaaaaaaaa

SEQ ID NO: 817 - protein, 763 aa, Homo sapien
MKASPRRPLILKRRRLPLPVQNAPSETSEEEPKRSPAQQESNQAEASKEVAESNSCKFPAGIKIINHPTMPNTQVVAIPNNANIHSIITALTAKGKESGSSGPNKFILISCGGAPTQPPGLRPQTQTSYDAKRTEVTLETLGPKPAARDVNLPRPPGALCEQKRETCADGEAAGCTINNSLSNIQWLRKMSSDGLGSRSIKQEMEEKENCHLEQRQVKVEEPSRPSASWQNSVSERPPYSYMAMIQFAINSTERKRMTLKDIYTWIEDHFPYFKHIAKPGWKNSIRHNLSLHDMFVRETSANGKVSFWTIHPSANRYLTLDQVFKPLDPGSPQLPEHLESQQKRPNPELRRNMTIKTELPLGARRKMKPLLPRVSSYLVPIQFPVNQSLVLQPSVKVPLPLAASLMSSELARHSKRVRIAPKVLLAEEGIAPLSSAGPGKEEKLLFGEGFSPLLPVQTIKEEEIQPGEEMPHLARPIKVESPPLEEWPSPAPSFKEESSHSWEDSSQSPTPRPKKSYSGLRSPTRCVSEMLVIQHRERRERSRSRRKQHLLPPCVDEPELLFSEGPSTSRWAAELPFPADSSDPASQLSYSQEVGGPFKTPIKETLPISSTPSKSVLPRTPESWRLTPPAKVGGLDFSPVQTSQGASDPLPDPLGLMDLSTTPLQSAPPLESPQRLLSSEPLDLISVPFGNSSPSDIDVPKPGSPEPQVSGLAANRSLTEGLVLDTMNDSLSKILLDISFPGLDEDPLGPDNINWSQFIPELQ

SEQ ID NO: 818 - DNA, 2460 bp, Homo sapien; identical to SEQ ID NO: 197

SEQ ID NO: 819 - protein, 641 aa, Homo sapien; identical to SEQ ID NO: 198

SEQ ID NO: 820 - DNA, 2271 bp, Homo sapien
gcacgcactggccccggcgcccacccgcacccctccccagagagcactgacacggctcccgggacctcggcaggatggaagagaagctgaagaaaaccaagatcatctttgtggtgggtgggcctggctcagggaagggcacccagtgtgagaagatcgtgcagaagtatggctacacccacctctccaccggggacctcctgcggtccgaggtcagctcaggctcggccaggggcaagaagctgtcggaaatcatggagaaggggcagctggttccactggagacagtgttggacatgctccgggatgccatggtggccaaagtcaatacttccaaaggcttcctgattgatggctacccgcgggaggtgcagcaaggagaagagtttgagcgacggattggacagcccacactgctgctgtatgtggacgcaggccctgagaccatgacccagcggctcttgaaacgtggagagaccagcgggcgtgtggacgacaatgaggagaccatcaaaaagcggctggagacctattacaaggccacagaacccgtcatcgccttctatgagaaacgtggcattgtgcgcaaggtcaacgctgagggctccgtggacagtgtcttctcccaggtctgcacccacctggacgccctaaagtagcaacgctggagccgcttccccagctcagagccccgccccaccccgtcctgattagaggtcctcctggcctgagcgcagcgcctccaccctgccctgctgagcacagacggaggaagccgcttatcctgttttcatggacagctgagcactaaaggaatttctaaggacatttggttttactgctttttctctgcttccagttggagttgattcatgtgcttgtgcctacctggccgcaagtccccagcccctcaaccctccgttcctcctcagcctccctttgccagccacccctcctctagctctggtgggaggcccggggcccttcctcgcacagggcatgcctggcctgaggacccggcgctgagtggcggggcccctgctccgaggggctcatgttcaggcagaaccggtcccagcctgggctcctctgcatcttgctctgtgccttggccctgacccccatcgctctgagcatatgttccatgcctgccttgccggggcctggactgcacaggcagcaaggtcatggtctgagtggggcttcctgggcagttggggcggcccacgccagctggcccagtgggtagtgaattggcttccttgacgcgagaggctctgagggtctgaaaagggcatctcaatggcatgggtgggtggggagtcagtcatgtcactgaaattgaatgggggaggcccaatgaggtggctcatgcctgtaatcccagcactttgggaagctgaggcaggaggatcacctgaggtcaggagttcgagagcagcctggccaacatggcaaaaccccttatttactaaaaatacaaaaacttagccgggcatggtggcatgtgcctgtattcccagctactcatgaggctgaggcaggagaatggcgtgaacccgggagtggagcttgcaatgagccaagattgcgccactgcactccagcctgggtgacagagcaagactccgtctcaaaaaaaaaaaaaaaaaaaaagaaattaattgggggagtcatggtcaggggtgagacctgaaggacctccccctgtgtggccctggacacagcccaccctctgtgagccgtttccaattctaaaacagactcaatgtccccctcacccccacctcaaggtcaggatgcgaacacactgagtgaggagtggacgctgtccattgccacggccatgagggctggagaccagaacagcatggcccgaagcgtgcggggccccggatgacttggggacaccccagaatcccctggggagaacccttcctgcgcgctttcattttttgacctcatcactgagaaaggctcaatttggtgctcacgtgtccttaacacctgatctggcccaagctgcgtgccctttaagccaagagagcctcttgtggaccccgcctgcccgaatgaaatccgaacagttggggctgttatggcaagtggggctggtttttcatttccattggttatttaaagtttcctttaaaataaacgattttaagttataaaaggtgaatctattgaaagaagaacatcaaagaaataaacaggagttcagcggagtagcagaagacaaggcatgtagggggagccattctgtcccag

SEQ ID NO: 821 - protein, 194 aa, Homo sapien
MEEKLKKTKIIFVVGGPGSGKGTQCEKIVQKYGYTHLSTGDLLRSEVSSGSARGKKLSEIMEKGQLVPLETVLDMLRDAMVAKVNTSKGFLIDGYPREVQQGEEFERRIGQPTLLLYVDAGPETMTQRLLKRGETSGRVDDNEETIKKRLETYYKATEPVIAFYEKRGIVRKVNAEGSVDSVFSQVCTHLDALK

SEQ ID NO: 822 - DNA, 1536 bp, Homo sapien
ggggggggggggaccacttggcctgcctccgtcccgccgcgccacttggcctgcctccgtcccgccgcgccacttcgcctgcctccgtcccccgcccgccgcgccatgcctgtggccggctcggagctgccgcgccggcccttgccccccgccgcacaggagcgggacgccgagccgcgtccgccgcacggggagctgcagtacctggggcagatccaacacatcctccgctgcggcgtcaggaaggacgaccgcacgggcaccggcaccctgtcggtattcggcatgcaggcgcgctacagcctgagagatgaattccctctgctgacaaccaaacgtgtgttctggaagggtgttttggaggagttgctgtggtttatcaagggatccacaaatgctaaagagctgtcttccaagggagtgaaaatctgggatgccaatggatcccgagactttttggacagcctgggattctccaccagagaagaaggggacttgggcccagtttatggcttccagtggaggcattttggggcagaatacagagatatggaatcagattattcaggacagggagttgaccaactgcaaagagtgattgacaccatcaaaaccaaccctgacgacagaagaatcatcatgtgcgcttggaatccaagagatcttcctctgatggcgctgcctccatgccatgccctctgccagttctatgtggtgaacagtgagctgtcctgccagctgtaccagagatcgggagacatgggcctcggtgtgcctttcaacatcgccagctacgccctgctcacgtacatgattgcgcacatcacgggcctgaagccaggtgactttatacacactttgggagatgcacatatttacctgaatcacatcgagccactgaaaattcagcttcagcgagaacccagacctttcccaaagctcaggattcttcgaaaagttgagaaaattgatgacttcaaagctgaagactttcagattgaagggtacaatccgcatccaactattaaaatggaaatggctgtttagggtgctttcaaaggagcttgaaggatattgtcagtctttaggggttgggctggatgccgaggtaaaagttctttttgctctaaaagaaaaaggaactaggtcaaaaatctgtccgtgacctatcagttattaatttttaaggatgttgccactggcaaatgtaactgtgccagttctttccataataaaaggctttgagttaactcactgagggtatctgacaatgctgaggttatgaacaaagtgaggagaatgaaatgtatgtgctcttagcaaaaacatgtatgtgcatttcaatcccacgtacttataaagaaggttggtgaatttcacaagctatttttggaatatttttagaatattttaagaatttcacaagctattccctcaaatctgagggagctgagtaacaccatcgatcatgatgtagagtgtggttatgaactttatagttgttttatatgttgctataataaagaagtgttctgc

SEQ ID NO: 823 - protein, 313 aa, Homo sapien
MPVAGSELPRRPLPPAAQERDAEPRPPHGELQYLGQIQHILRCGVRKDDRTGTGTLSVFGMQARYSLRDEFPLLTTKRVFWKGVLEELLWFIKGSTNAKELSSKGVKIWDANGSRDFLDSLGFSTREEGDLGPVYGFQWRHFGAEYRDMESDYSGQGVDQLQRVIDTIKTNPDDRRIIMCAWNPRDLPLMALPPCHALCQFYVVNSELSCQLYQRSGDMGLGVPFNIASYALLTYMIAHITGLKPGDFIHTLGDAHIYLNHIEPLKIQLQREPRPFPKLRILRKVEKIDDFKAEDFQIEGYNPHPTIKMEMAV

SEQ ID NO: 824 - DNA, 2701 bp, Homo sapien
ccgccgtagcgcgtcttgggtctcccggctgccgctgctgccgccgccgcctcgggtcgtggagccaggagcgacgtcaccgccatggcaggcatcaaagctttgattagtttgtcctttggaggagcaatcggactgatgtttttgatgcttggatgtgcccttccaatatacaacaaatactggcccctctttgttctatttttttacatcctttcacctattccatactgcatagcaagaagattagtggatgatacagatgctatgagtaacgcttgtaaggaacttgccatctttcttacaacgggcattgtcgtgtcagcttttggactccctattgtatttgccagagcacatctgattgagtggggagcttgtgcacttgttctcacaggaaacacagtcatctttgcaactatactaggctttttcttggtctttggaagcaaggacgacttcagctggcagcagtggtgaaaagaaattactgaactattgtcaaatggacttcctgtcatttgttggccattcacgcacacaggagatggggcagttaatgctgaatggtatagcaagcctcttgggggtattttaggtgctcccttctcacttttattgtaagcatactattttcacagagacttgctgaaggattaaaaggattttctcttttggaaaagcttgactgatttcacacttatctatagtatgctttttgtggtgtcctgctgaatttaaatatttatgtgtttttcctgttaggttgattttttttggaatcaatatgcaatgttaaacacttttttaatgtaatcatttgcattggttaggaattcagaattccgccggctctattactggtcaagtacatcttttctcttaaaattatttagcctccattattacaaaaaattataaaaataagttttcagtcagtcaggatgacatcactcccaatgttatgcagacatacagacggttggcatacgttatagactgtatactcagtgcaaatatagctgcatttatacctcagaggggccaagtgttaatgcccatgccctccgttaagggttgttggttttactggtagacagatgttttgtggattgaaaattattttatggaattgctacagaggagtgcttttcttctcaattgttagaagaatttatgttaaactttaaggtaagggtgtaaaaacatttttgagataaggtttttatttatgtttattattgttagagtgagttgcaatgtgggaagaaatgacattgaaattccagtttttgaatcctgtttctatttataagtgaaatttgtgatctcctatcaacctttcatgttttaccctgttaaaatggacatacatggaaccactactgatgagggacagttgtatgtttgcatcatatatgccagaaaaccttcctctgcttcctccttttgacttatttggtatgttgtatatattacataaaataacttttcaaatatagtttaataacacttagaagtgtttacttacctggaaaataattgctatgccgtacattcagagtgccccctcccctgcaaggccttgccatgattaacaagtaacttgttagtcttacagataattcatgcattaacagtttaagatttagaccatggtaatagtagttcttattctctaaggttatatcatatgtaatttaaaagtatttttaagccaagtttcctgtatacctctgaactgttttgattttgagttcatcatgatagatctgctgtttccttataaaaggcatttgttgtgtgagttaatgcaaagtagccaagtccagctatatagcagcttcagaaacatacctgaccaaaaaattcccagtaaccaggcatgatcaatttatagtggtcgtttacatctaataattatcaggacttttttcaggagtgggttataaaaacattcaagttggtctgacagtattttgttaaggatatttgtttgtatgtttattcagtatacttacataaaaattatttcgccatcagccaaaactcagtaatcatgacagctgtctgttgttttatgaagtttatttctcaagaaaatgggaataaatttgggatttgttcagcttttttactaaagatgcctaaagccacaggttttattgcctaacttaagccatgacttttagatatgagatgacgggaagcaggacgaaatatcggcgtgtggctggagccttcccactggaggctgaaagtggcttgtggtattataatgttcagatttcaagaggaaggtgcaggtacacatgagttagagagctggtgagacagttgggaactctttgtgcttgtgatctactggactttttttttgcaggaagtgcattctctggtccttccctattttctgttctggatgtcagtgcagtgcactgctactgttttatccacttggccacagactttttctaacagctgcgtattatttctatatactaattgcattggcagcattgtgtctttgaccttgtatactagcttgacatagtgctgtctctgatttctaggctagttacttgagatatgaattttccatagaatatgcactgatacaacattaccattcttctatggaaagaaaacttttgatgatgaaacaataaagattttaaatatcaaaaaaaaaaaaaaaaaa

SEQ ID NO: 825 - protein, 131 aa, Homo sapien
MAGIKALISLSFGGAIGLMFLMLGCALPIYNKYWPLFVLFFYILSPIPYCIARRLVDDTDAMSNACKELAIFLTTGIVVSAFGLPIVFARAHLIEWGACALVLTGNTVIFATILGFFLVFGSKDDFSWQQW

SEQ ID NO: 826 - DNA, 7247 bp, Homo sapien
gggaatatattcactaaggattctatctgcttactgctacagacctatgtgttaaggaattcttctcctcctccttgcgtagaagttgatcagcactgtggtcagactgcatttatcttgtcattgccagaagaaatcttggacagaatgtaacagtacgtctctctctgattgcgatggaaggtgataaactgatactcctttattaaagttacatcgcactcaccacagaaaaccattctttaaagtgaatagaaaccaagcccttgtgaacacttctattgaacatgactcatggagaagagcttggctctgatgtgcaccaggattctattgttttaacttacctagaaggattactaatgcatcaggcagcagggggatcaggtactgccgttgacaaaaagtctgctgggcataatgaagaggatcagaactttaacatttctggcagtgcatttcccacctgtcaaagtaatggtccagttctcaatacacatacatatcagggatctggcatgctgcacctcaaaaaagccagactgttgcagtcttctgaggactggaatgcagcaaagcggaagaggctgtctgattctatcatgaatttaaacgtaaagaaggaagctttgctagctggcatggttgacagtgtccgtaaaggcaaacaggatagcacattactggcctctttgcttcagtcattcagctctaggctgcagactgttgctctgtcacaacaaatcaggcagagcctcaaggagcaaggatatgccctcagtcatgattctttaaaagtggagaaggatttaaggtgctatggtgttgcatcaagtcacttaaaaactttgttgaagaaaagtaaagttaaagatcaaaagcctgatacgaatcttcctgatgtgactaaaaacctcatcagagataggtttgcagagtctcctcatcatgttggacaaagtggaacaaaggtcatgagtgaaccgttgtcatgtgctgcaagattacaggctgttgcaagcatggtggaaaaaagggctagtcctgccacctcacctaaacctagtgttgcttgtagccagttagcattacttctgtcaagcgaagcccatttgcagcagtattctcgagaacacgctttaaaaacgcaaaatgcaaatcaagcagcaagtgaaagacttgctgctatggccagattgcaagaaaatggccagaaggatgttggcagttaccagctcccaaaaggaatgtcaagccatcttaatggtcaggcaagaacatcatcaagcaaactgatggctagcaaaagtagtgctacagtgtttcaaaatccaatgggtatcattccttcttcccctaaaaatgcaggttataagaactcactggaaagaaacaatataaaacaagctgctaacaatagtttgcttttacatcttcttaaaagccagactatacctaagccaatgaatggacacagtcacagtgagagaggaagcatttttgaggaaagtagtacacctacaactattgatgaatattcagataacaatcctagttttacagatgacagcagtggtgatgaaagttcttattccaactgtgttcccatagacttgtcttgcaaacacggaactgaaaaatcagaatctgaccaacctgtttccctggataacttcactcaatccttgctaaacacttgggatccaaaagtcccagatgtagatatcaaagaagatcaagatacctcaaagaattctaagctaaactcacaccagaaagtaacacttcttcaattgctacttggccataagaatgaagaaaatgtagaaaaaaacaccagccctcagggagtacacaatgatgtgagcaagttcaatacacaaaattatgcaaggacttctgtgatagaaagccccagtacaaatcggactactccagtgagcactccacctttacttacatcaagcaaagcagggtctcccatcaatctctctcaacactctctggtcatcaaatggaattccccaccatatgtctgcagtactcagtctgaaaagctaacaaatactgcatctaaccactcaatggaccttacaaaaagcaaagacccaccaggagagaaaccagcccaaaatgaaggtgcacagaactctgcaacgtttagtgccagtaagctgttacaaaatttagcacaatgtggaatgcagtcatccatgtcagtggaagagcagagacccagcaaacagctgttaactggaaacacagataaaccgataggtatgattgatagattaaatagccctttgctctcaaataaaacaaatgcagttgaagaaaataaagcatttagtagtcaaccaacaggtcctgaaccagggctttctggttctgaaatagaaaatctgcttgaaagacgtactgtcctccagttgctcctggggaacccaacaaagggaagagtgaaaaaaaaagagaaaactcccttaagagatgaaagtactcaggaacactcagagagagctttaagtgaacaaatactgatggtgaaaataaaatctgagccttgtgatgacttacaaattcctaacacaaatgtgcacttgagccatgatgctaagagtgccccattcttgggtatggctcctgctgtgcagagaagcgcacctgccttaccagtgtccgaagactttaaatcggagcctgtttcacctcaggatttttctttctccaagaatggtctgctaagtcgattgctaagacaaaatcaagatagttacctggcagatgattcagacaggagtcacagaaataatgaaatggcacttctagaatcaaagaatctttgcatggtccctaagaaaaggaagctttatactgagccattagaaaatccatttaaaaagatgaaaaacaacattgttgatgctgcaaacaatcacagtgccccagaagtactgtatgggtccttgcttaaccaggaagagctgaaatttagcagaaatgatcttgaatttaaatatcctgctggtcatggctcagccagcgaaagtgaacacaggagttgggccagagagagcaaaagctttaatgttctgaaacagctgcttctctcagaaaactgtgtgcgagatttgtccccgcacagaagtaactctgtggctgacagtaaaaagaaaggacacaaaaataatgtgaccaacagcaaacctgaatttagcatttcttctttaaatggactgatgtacagttccactcagcccagcagttgcatggataacaggacattttcatacccaggtgtagtaaaaactcctgtgagtcctactttccctgagcacttgggctgtgcagggtctagaccagaatctgggcttttgaatgggtgttccatgcccagtgagaaaggacccattaagtgggttatcactgatgcggagaagaatgagtatgaaaaagactctccaagattgaccaaaaccaacccaatactatattacatgcttcaaaaaggaggcaattctgttgccagtcgagaaacacaagacaaggacatttggagggaggcttcatctgctgaaagtgtctcacaggtcacagccaaagaagagttacttcctactgcagaaacgaaagcttctttctttaatttaagaagcccttacaatagccatatgggaaataatgcttctcgcccacacagcgcaaatggagaagtttatggacttctgggaagcgtgctaacgataaagaaagaatcagaataaaatgtacctgccatccagttttggatctttttaaaactaatgagtatgaacttgagatctgtataaataagagcatgatttgaaaaaagcatggtataattgaaacttttttcattttgaaaagtattggttactggtgatgttgaaatatgcatactaatttttgcttaacattagatgtcatgaggaaactactgaactagcaattggttgtttaacacttctgtatgcgtcagataacaactgtgagtagcctatgaatgaaattcttttataaatattaggcataaattaaaatgtaaaactccattcatagtggattaatgcattttgctgcctttattagggtactttattttgcttttcagaagtcagcctacataacacatttttaaagtctaaactgttaaacaactctttaaaggataattatccaataaaaaaaaacctagtgctgattcacagcttattatccaattcaaaaataaattagaaaaatatatgcttacatttttcacttttgctaaaaagaaaaaaaaaggtgtttatttttaactcttggaagaggttttgtggttcccaatgtgtctgtcccaccctgagccttttcaatatatatttctttaaaccttgtgctacttagtaaaaattgattacaattgagggaagtttgatagatcctttaaaaaaaaggcagatttccattttttgtattttaactactttactaaattaatactcctccttttacaaattagaaaagttaacatttatctttaggtggtttcctgaaaagttgaatatttaagaaattgtttttaacagaagcaaaatggcttttctttggacagttttcaccatctcttgtaaaagttaattctcaccattcctgtggtacctgcgagtgttatgaccaggattccttaaacctgaactcagaccacttgcattagaaccatctggagcacttgttttaaaatgcagattcataggcagcatctcagatctacagaacaagaatctctgctaagtggacctggaatcttccatctgcatcttaacatgctctctaggtgtttcttgtgtttgagaaccatgacttatgactttcctcagaacatgagactgtaaaacaaaaacaaaaaactatgtgatgcctctattttccccaatacagtcacacatcagctcaaaatttgcaatattgtagttatatattaccgttatatctttggaaatccgggttcagaacactttttatgacaaaaattgggtggaggggataactttcatatctggctcaacatctcaggaaaatctgtgattatttgtgtgttctaatgagtaacatctacttagttagccttagggatggaaaaacagggccacttaccaaactcaggtgattccaggatggtttggaaacttctcctgaatgcatccttaacctttattaaaaccattgtcctaagaacaatgccaacaaagcttacaacatttagtttaaacccaagaaggacactaaactagattgactaataaaagtacaaggcacatatacgtgacagaattggtactcaatcactccattggatcttttactttaaagtagtgatgaaaagtacatgttgatactgtcttagaagaaattaatatattagtgaagccacatggggtttcagttgcgaaacaggtctgtttttatgttcagtttgtacaatccacaattcattcaccagatattttgttcttaattgtgttccaggttagcaaatgacctatcaaaaattattctataatcactactagttaggatattgatttaaaattgttctacttgaagtggtttctaagatttttatatttaaaaataggtgtgatttcctaatatgatctaaaaccctaaatggttatttttcctcagaatgatttgtaaatagctactggaaatattatacagtaataggagtgggtattatgcaacatcatggagagtgaaggcataggcttattctgacataaaattccactggccagttgaatatattctattccatgtccatactctgacaatcttattgtcaacactatataaataagcttttaaacaagtcatttttcttgatcgttgtggaaggtttggagccttagaggtatgtcagaaaaaatatgttggtattctcccttgggtagggggaaatgacctttttacaagagagatgaaatttaggtcagggaaaagaccaagggccagcatgctacttttgtgtgtgtgtgtgtgggttttgttttgttttttttggttggctggttgttttcattattattaacaaaggaatgagaatatgtaatacttaaataaacatgaccacgaagaatgctgttctgatttactagagaatgttcccaatttgaatttagggtgattttaaagaacagtgagaaagggcatacatccacagattcactttgtttatgcatatgtagatacaaggatgcacatatacacattttcaaggactattttagatatctagacaatttcttctaataaagtcatttgtgaaagggtactacagcttattgacatcagtaaggtagcattcattacctgtttattctctgctgcatcttacagaagagtaaactggtgagagtatatattttatatatatatatatatataatatgtatatatatatatattgacttgttacatgaagatgttaaaatcggtttttaaaggtgatgtaaatagtgatttccttaatgaaaaatacatattttgtattgttctaatgcaacagaaaagccttttaatctctttggttcctgtatattccatgtataagtgtaaatataatcagacaggtttaaaagttgtgcatgtatgtatacagttgcaagtctggacaaatgtatagaataaaccttttatttaagttgtgattacctgctgcatgaaaagtggcatgggggaccctgtgcatctgtgcatttggcaaaatgtcttaacaaatcagatcagatgttcatcctaacatgacagtattccatttctggacatgacgtctgtggtttaagctttgtgaaagaatgtgctttgattcgaagggtcttaaagaatttttttaatcgtcaaccacttttaaacataaagaattcacacaactactttcatgaattttttaatcccattgcaaacattattccaagagtatcccagtattagcaatactggaatataggcacattaccattcatagtaagaattctggtgtttacacaaccaaatttgatgcgatctgctcagtaatataatttgccatttttattagaaatttaatttcttcatgtgatgtcatgaaactgtacatactgcagtgtgaatttttttgttttgttttttaatcttttagtgtttacttcctgcagtgaatttgaataaatgagaaaaaatgcaaaaaaaaaaaaaaaaaaaaa

SEQ ID NO: 827 - protein, 1158 aa, Homo sapien
MTHGEELGSDVHQDSIVLTYLEGLLMHQAAGGSGTAVDKKSAGHNEEDQNFNISGSAFPTCQSNGPVLNTHTYQGSGMLHLKKARLLQSSEDWNAAKRKRLSDSIMNLNVKKEALLAGMVDSVRKGKQDSTLLASLLQSFSSRLQTVALSQQIRQSLKEQGYALSHDSLKVEKDLRCYGVASSHLKTLLKKSKVKDQKPDTNLPDVTKNLIRDRFAESPHHVGQSGTKVMSEPLSCAARLQAVASMVEKRASPATSPKPSVACSQLALLLSSEAHLQQYSREHALKTQNANQAASERLAAMARLQENGQKDVGSYQLPKGMSSHLNGQARTSSSKLMASKSSATVFQNPMGIIPSSPKNAGYKNSLERNNIKQAANNSLLLHLLKSQTIPKPMNGHSHSERGSIFEESSTPTTIDEYSDNNPSFTDDSSGDESSYSNCVPIDLSCKHGTEKSESDQPVSLDNFTQSLLNTWDPKVPDVDIKEDQDTSKNSKLNSHQKVTLLQLLLGHKNEENVEKNTSPQGVHNDVSKFNTQNYARTSVIESPSTNRTTPVSTPPLLTSSKAGSPINLSQHSLVIKWNSPPYVCSTQSEKLTNTASNHSMDLTKSKDPPGEKPAQNEGAQNSATFSASKLLQNLAQCGMQSSMSVEEQRPSKQLLTGNTDKPIGMIDRLNSPLLSNKTNAVEENKAFSSQPTGPEPGLSGSEIENLLERRTVLQLLLGNPTKGRVKKKEKTPLRDESTQEHSERALSEQILMVKIKSEPCDDLQIPNTNVHLSHDAKSAPFLGMAPAVQRSAPALPVSEDFKSEPVSPQDFSFSKNGLLSRLLRQNQDSYLADDSDRSHRNNEMALLESKNLCMVPKKRKLYTEPLENPFKKMKNNIVDAANNHSAPEVLYGSLLNQEELKFSRNDLEFKYPAGHGSASESEHRSWARESKSFNVLKQLLLSENCVRDLSPHRSNSVADSKKKGHKNNVTNSKPEFSISSLNGLMYSSTQPSSCMDNRTFSYPGVVKTPVSPTFPEHLGCAGSRPESGLLNGCSMPSEKGPIKWVITDAEKNEYEKDSPRLTKTNPILYYMLQKGGNSVASRETQDKDIWREASSAESVSQVTAKEELLPTAETKASFFNLRSPYNSHMGNNASRPHSANGEVYGLLGSVLTIKKESE

SEQ ID NO: 828 - DNA, 7247 bp, Homo sapien; identical to SEQ ID NO: 826

SEQ ID NO: 829 - protein, 1158 aa, Homo sapien; identical to SEQ ID NO: 827

SEQ ID NO: 830 - DNA, 7984 bp, Homo sapien
cggcccggcggtaggcggtggcgactctgcccgctcccgtttcggcgcggtgaccgagcgcccgggaggctcgaggaccgcatcgtgtgccgttgcgccaagcccggtcctgcgccgccatggccccagtgcagctggagaaccaccagctggtcccgcccggaggcggcggcgggggcagcggcggacccccgtcagccccagcccctcctcccccgggagccgccgtggcggcggccgctgcagctgcggctagcccgggctaccggctgagcaccctcattgaatttctgctgcaccgggcctactcggagcttatggtgttgacggacctactgccaaggaaatctgatgtggaaaggaaaatagaaatagtgcagtttgctagccggacacgccaactcttcgttcgattattagctttagtgaaatgggctaataatgctggcaaagtggaaaaatgtgcgatgatttcaagctttttagatcagcaagccatcctgtttgtggacactgctgatcgcctggcctcgttagctagagatgctctggtccatgcacgcctgcctagttttgccatcccatatgccattgatgtactaactactggatcttacccacggctgccaacctgcattagggataaaattattcctccagacccaattaccaaaattgaaaaacaagccacactccatcagctgaatcagattcttagacatcggcttgtaaccacagatcttcctcctcagttagcaaatcttacagttgcaaatggccgggtgaagtttcgtgttgaaggagaatttgaagccaccttgactgtgatgggagatgaccctgatgttccatggcgtcttctcaagctagaaattctagttgaggataaggaaacaggagatgggcgagctttggttcatagcatgcaaatcagcttcatccatcaactggtgcagtctaggctctttgctgatgagaaacctcttcaggatatgtacaactgcctacattctttctgtttatcacttcagttagaagtgttacattcccaaactctaatgttaatccgagaacggtggggagaccttgtgcaggtggaaaggtatcatgctggaaagtgcctctccctttcagtttggaatcaacaggttcttgggagaaaaactggaacagcatctgttcacaaagttacaattaaaattgatgagaatgatgtctccaagcctttacagatttttcacgatcctcctttgccagcttctgattccaaattagtagaaagagccatgaagatcgaccacttatcaatagaaaaactcctgattgacagtgtccatgcaagagctcatcagaagctccaagaactgaaggccattcttagaggcttcaatgccaatgaaaactcttccatagagactgcactcccagctcttgttgttcccatcttggagccctgtggtaattcagagtgtctgcacatttttgtagatttacattctggaatgtttcaattgatgctttatggacttgaccaggccactctggatgacatggagaagtctgtgaatgatgatatgaaacgaatcataccctggattcagcaacttaagttttggcttggacaacagcgttgcaagcagtctataaaacatctgcctacgataagcagtgaaacattgcagctttccaattactcaactcatcctattggaaacctttctaagaataaactgttcattaaacttacccgccttccacaatactacattgttgtggagatgttggaggttcccaataaacccacacaactgtcgtacaagtactactttatgtctgtgaatgctgcagatcgtgaagacagccctgcaatggcattgctgctgcagcagttcaaggaaaacattcaggacttggtttttcgtacaaaaaccgggaaacagaccagaaccaatgccaagcgcaagttgtctgatgatccatgtccagtagaatccaagaaaacaaaacgagcaggagaaatgtgtgccttcaataaagttttagcccacttcgtcgctatgtgtgatacaaatatgccatttgtaggacttcggttggagttgtccaatctggagattccacatcaaggagtgcaagtggaaggtgatggcttcagccatgcaattcgcttattaaaaattcctccctgtaagggtataactgaggaaacccaaaaggctctggaccgctctcttcttgattgcactttccgattacaaggtagaaataaccgcacttgggtagcagagttagtgtttgcaaattgtccacttaatggcacttctactagggagcaaggaccatcccggcacgtttacctgacatatgaaaatctgttgtctgagcctgttggtggtagaaaggtggttgaaatgtttcttaatgactggaatagcattgcacgattatatgagtgtgtgttggaatttgcacgttctctaccagacatacctgctcatctaaatattttctcagaagttcgtgtttataattaccgaaaacttatcttgtgttatggaaccaccaagggaagctcaattagtatccaatggaattcgatccatcaaaaattccacatttctttgggaactgttggcccaaactcaggttgcagtaactgtcacaataccattctccatcagcttcaagaaatgttcaacaaaacaccaaatgtggttcagttattacaggtactgtttgatactcaggctccattaaatgccatcaacaaactccccactgtgccgatgttgggcttgacccagagaaccaatactgcctaccagtgcttctccattctgccacagtcgtccacccacatcagactggccttcaggaacatgtattgcattgatatatactgccggagtcgaggtgttgtggcaatacgggatggtgcctatagtctttttgataacagcaaactagttgaaggtttctatcctgcaccaggactaaagacgttcctgaatatgtttgttgacagcaatcaggatgctcgaagaaggtctgtaaatgaggacgataatcccccttctcctataggaggagatatgatggattctttaatatcgcagctccagccaccaccccagcaacagccatttccaaagcagccaggaacatcaggtgcttatcctcttacttcaccccctacatcttatcatagcacagtcaatcagtctccctcaatgatgcacacacagtctccaggaaatctgcatgctgccagctcccccagtggggctttgagagccccatcaccagcgtcatttgttccaactcctcccccatcctcgcatggaatctcaataggaccaggggccagttttgctagtccacatggaactcttgaccctagttccccatacactatggtgtcaccaagtggacgagcagggaactggccaggatctcctcaagtgtctggcccctcaccagcagcacgcatgcctggaatgtcaccagccaacccctcactacattctccggttccagatgcttctcattcccctcgagctggaacaagttctcaaacaatgccaacaaacatgcctccacctcgtaaactacctcagcgctcttgggcggcatccatacctaccatcctcactcacagtgccttgaacattttactgctgccctctccaactccaggccttgtgcccggcctggcaggtagttacctttgttctccacttgagagattccttggatcagtcatcatgagacgacatcttcaaagaattattcaacaagaaacgctgcagctgataaattctaatgaacccggagtgatcatgtttaagactgatgcactgaaatgcagagtagctcttagtcccaaaaccaaccaaacgcttcagctaaaattgacacctgaaaatgcaggacagtggaaacctgatgaacttcaagttttggagaaattctttgaaacaagagttgcaggaccaccatttaaagctaatacgttaatagccttcaccaagctattaggagctcctacacacatcctcagggattgtgtgcacattatgaagctggagctgttccctgaccaagcaacacagctaaaatggaatgttcagttttgcctgacgatccctcccagcgcgccgccgattgcacctcctgggacgcctgctgtggtgctgaaatccaaaatgctattttttcttcaactaactcagaaaacatcggtccctccccaagaacctgttagtattatagttccaatcatttatgacatggcttcaggtacaacccagcaggcagacattcccagacagcagaactcttctgttgctgctcccatgatggtcagcaacattctgaagaggtttgcagagatgaatccaccacgacaaggtgaatgcacaatatttgcagctgttcgtgatttaatggctaatcttacactgccccctgttgggcgtccatagacactattgtttttaaaccaggaaggctgacagatgagacaacaaaaaaaatctgaattcagccttcagtttaaaaaaggaaaaggactttttttttaaactttaagagctaaatattctaaactggcaaaaattttcagggtgcacttctttcatcaaaatgatcatccatcttttgtataatgaacttgtatagtgtgtttaaatgggacacatttcaaaggaaataaatcagtgtccgtttgccagtaataaatttaatattctgttttatactataaagttatgaaaatgccaaacttgtttatttaattgttttcttatgttttgggtgtaatagtccttttttggtttttgttttgttttttaaggcaggtctgtcatttttgaatactgtaaaactgtgataaactttatattgaagctgtattttaatatgaccgctttgaatccttacatgaaatgttctgggagttgttataaacacaccccaaggaagcaatatttaataaaactaggtcaaaaacaaaacaaaacagtgacactcacttgtgtgtatataaactctagagacatcttaggccctcccttcatctttaacctggtggatggagccagttattaatttataataatacatgtctgaaatttgaccaaaaacatcttctttatgtcaaggttaatatattttcttcagacattcctaacttgactagtggttaacatttagcaccttggttgtctttcaatatataggatttgggtgaaaaataaggaacttagtctttgagaagggacagtatgtggttcgtattgatcaaggatcccaaataatgcaatcattctcatctgttgaggatgtgggaacttttctgtcaggaaaatttagtttacagaatacttctgcatacaacattaattaggaaacaaagaactttaatgctgtacctctgcatgaagtttctgtgagctttctttatcttgcttaacttatcctcctttccttccccaccaaaattgggattgttctaaacaatttcaatttaattcattgtcaacaaaacgatagaatgttttgcttggaagaaacctggtccattcccctcattgtgaagaatcccgaatcctgggcctgtccagggtcaaatggagtttttggtattaatacatctctgcagggtttctttttggagcactgtgctgtctttcctagtcagtcagggacttttttaagcttcaaagaacatggtctgatgcaaaggtcttctaccgacttcatggtatttaggaaaaatttttaagtgataataccatgccgagttacctggtcactgtaatactggttctccattaaaatgtagatgctttgtctaattccacttcaagatgatttaattgagcttctataactatcaactatcaaattctagtttcaagtatctcactgtacctatatcatatctgttctcaactttgtttgattctccactcattttcaatcagagttgaagccttctttgcctttcttctttgtcttatttctgccttcatctcccacttctcacccaactctgccactgttcaggagcagttgactaaacttttatccttcctttaacttaatctttttatccttctgtttttagttcttacagtggtaatcacatcagtttggcaatctaagatgtctttatcaagggtcagcccttttctatttggagctgaatcttttctttcatgtagaaatctacatgtatatacaagaaatgtatttttatctgcaggataatattgtttcaaataattttattaagagttaactttttaggtattttcccttttaatgtggttttgaaatgttaattgcatttttacacatgatgcattcagtggacactcttttttcctaattataactcatctctgaatgcattgtgccaatcaagagtaagataggattcagtgcgcaaaatttgcttttgatgcttattaagagtaaacccatgaatttgaatttttatattatgcttggtacttggaattgatatataccttattaaagcttgaaaacatttagcatttgaatagtaagtttcatcacaaatcatgtcttttgcctcttttgttacccaggttcgatcaaggggactggatgcccaagtgattttctctaataatcgggttgggacttaactttaaggtgttttcaatgtgattttagtatttacagtaataaataaaatttatacaaagtttcagagaactaccaactctctagttaattttgatgaagatgttttcattaatagtctggtttagtattaatttaaccttgaaataagaaattggtcctgatttgccaccttcatttttccatctgctgaaatgccatttcagaatgtataaaagtactttcagaattagaagaaaagtgagagcttcagcagaacgtgtcaagtcgctaataacaggagtcgaaccttatgtttgaaaattaactgagtgagttaagtgcaagcataaactaaaatttatatgactttgaatttaagaaccactaataactgtgttctaattaacacagtaatctgttcagccaaaggatactaacagccattctttggactgtggttaatttgataacttcaagaagttataactttgctaccctggattctgatgcaatttcaatataaaaagttgttcctttcatagtttttccccccaaaagaagtgcctattacattttaccttaatgtttatttatcatccaagtgttcttgatataaaatcagtatacagaaaattttaagagaacttacattcaagggacatagagggaaaatgttaatgtgtatttcattgtttcttgtggaatttttttttcattcggtttgagaatggacagtgtgtctaaggatgtgatttaaatttacttaggatggatttagcattgaggttattaagacaaagttagcagaggccagccagcactgtgctgcacaactccaggaactccatggtatgctcacaattttctgcaagttgcctccacttccaagtggccagtgatttgttaaaataccttgcccaagaatataactgattgatgaaagggcatatttaggtcaatataaaataatagcaagtatttactgagagcttactgtgtgctaggcattttcttaatatttcaatgtgtatttaatcctcacaacaacccaatgtggtaggttattgatatcctcttcttaaaaatgagtaaatggaggcccagagaaatgtaatttgcctgagatcaaattaaggttgcttaagatcaaactgctaagaaggggcagtttgagtctgagctagtgctcctaaacactggacatttttgctgtgaaccacagtcgggaaggtttaatgtttagactctttcctcagaggcttttaactacacacaattttgacatgttttccaagctcagaaagctcattaaaaacaactaaaactg

SEQ ID NO: 831 - protein, 1454 aa, Homo sapien [sequence omitted]

SEQ ID NO: 832 - DNA, 2758 bp, Homo sapien
ctatccgcgcgcgtcgccggcccagtcctgtcgctgacgggaggatctgaagccggccgcaggtcaaagagtaaaatgaagtacattctggttactggtggtgttatatcaggaattggaaaaggaatcattgccagcagtgtgggcacaatactcaagtcatgtggtttacatgtaacttcaatcaaaattgacccctacattaacattgatgcaggaacattctctccttatgagcatggtgaggtttttgtgctggatgatggtggggaagtagaccttgacctgggtaactatgagcggttccttgacatccgcctcaccaaggacaataatctgaccactggaaagatataccagtatgtcattaacaaggaacggaaaggagattacttggggaaaactgtccaagttgtccctcatatcacagatgcaatccaggagtgggtgatgagacaggcgttaatacctgtagatgaagatggcctggaacctcaagtgtgtgttattgagcttggtggaaccgtgggggacatagaaagcatgccctttattgaggccttccgtcagttccaattcaaggtcaaaagagagaacttttgtaacatccacgtcagtctagttccccagccaagttcaacaggggaacagaagactaaacctacccagaatagtgttcgggaacttagaggacttgggctttccccagatctggttgtatgcaggtgctcaaatccacttgacacatcagtgaaggagaaaatatcaatgttctgccatgttgagcctgaacaagtgatctgtgtccacgatgtctcatccatctaccgagtccccttgttgttagaggagcaaggggttgtagattattttcttcgaagacttgaccttcctattgagaggcagccaagaaaaatgctgatgaaatggaaagagatggctgacagatatgatcgcttgctggagacctgctctattgcccttgtggcgaaatacaccgagttctcagactcctatgcctctgtcattaaggctctggagcattctgcactggccatcaaccacaaattggaaatcaagtacatagattctgcggacttggagcccatcacctcgcaagaagagcccgtgcgctaccacgaagcttggcagaagctctgtagtgctcatggagtgctggttccaggaggatttggtgttcgaggaacagaaggaaaaatccaagcaattgcctgggctcggaatcagaaaaagccttttttgggcgtgtgcttagggatgcagttggcagtggttgaattctcaagaaacgtgctgggatggcaagatgccaattctacagagtttgaccctacgaccagtcatcccgtggtcgtagacatgccagaacacaacccagggcagatgggcggaaccatgaggctgggcaagaggagaaccctgttccagaccaagaactcagtcatgaggaaactctatggagacgcagactacttggaagagaggcaccgccaccgatttgaggtgaatccagtctggaaaaagtgtttggaagaacaaggcttgaagtttgttggccaagatgttgaaggagagagaatggaaattgtggagttagaagatcatcccttttttgttggggttcagtaccaccctgagttcctgtccaggcctatcaagccctccccaccatactttggcctcctcctggcctctgtggggcggctctcacattacctccagaaaggctgcaggctctcacccagggacacctatagtgacaggagtggaagcagctcccctgactctgaaatcaccgaactgaagtttccatcaataaatcatgactgatcttgtagcggatgattcttcaagagacccttcaaacttgggtagagtttacagctctgactttacactcggctttggagactttctttaaattatgtttttattaagattattttattatgcggaaaggtatttgggaaacttgtcacttgcatgtcccatcacgtgtactggctcctctgtggtgtctgcctgttgcgtgacactctccttgcagttcttgagttgcggcagaacatcgcgatgggaaccgatggtgggtggggctgcagatgtccccatcggtcaccttgtttctcaactacctcgcatcattgcagatcgtagcgcgttgcctgtcgctttcccttggatacctagaccgttataaagtgtgccacatggacttaccgagcatggagagaggattttagctaggatttgaacacttggtgctgggaacctcagggtattgcttgccactaagccatgaaaccagagacaaaatctctatactgccctgagttggggggaattctcagtgccaactgtggctggtcctcattcaaagggacggtcagtttggtgtcaacatgaaacaccaagatgtctgtctctgaagcgtgattttaaaatccccatgcctgtgcgtgcgcttcctatttctagggctgggaaacactccttgcatcaaggggtcacttacagaacaaagaatcttttgggggaaacttcctctaaaaccctctcatatatagacagctttgactggagggtccatttttcttccaggatggtgttactgcagttgaagggcaatatgaagttactttcttaatgtgacctagcaataggcatagctacgtggcactatattctggccagactcgatgtgtactctaacttaagaaataaatcagtaaggcag

SEQ ID NO: 833 - protein, 591 aa, Homo sapien
MKYILVTGGVISGIGKGIIASSVGTILKSCGLHVTSIKIDPYINIDAGTFSPYEHGEVFVLDDGGEVDLDLGNYERFLDIRLTKDNNLTTGKIYQYVINKERKGDYLGKTVQVVPHITDAIQEWVMRQALIPVDEDGLEPQVCVIELGGTVGDIESMPFIEAFRQFQFKVKRENFCNIHVSLVPQPSSTGEQKTKPTQNSVRELRGLGLSPDLVVCRCSNPLDTSVKEKISMFCHVEPEQVICVHDVSSIYRVPLLLEEQGVVDYFLRRLDLPIERQPRKMLMKWKEMADRYDRLLETCSIALVAKYTEFSDSYASVIKALEHSALAINHKLEIKYIDSADLEPITSQEEPVRYHEAWQKLCSAHGVLVPGGFGVRGTEGKIQAIAWARNQKKPFLGVCLGMQLAVVEFSRNVLGWQDANSTEFDPTTSHPVVVDMPEHNPGQMGGTMRLGKRRTLFQTKNSVMRKLYGDADYLEERHRHRFEVNPVWKKCLEEQGLKFVGQDVEGERMEIVELEDHPFFVGVQYHPEFLSRPIKPSPPYFGLLLASVGRLSHYLQKGCRLSPRDTYSDRSGSSSPDSEITELKFPSINHD

SEQ ID NO: 834 - DNA, 6888 bp, Homo sapien
  Unsure 4245-4279: Unknown base
cggaggagcgcgcggttgccgggcgggacgggaaccgggtctgcgcgcgagccgggcggtgggcgcggacagggccgagggcgcccgggagccgtgtcaggcggcggcgaggagcgggcgcgccgggcgcggggagccgtcggcggccgctcgctgcggggacaccccggtgaatgagctctcgccgccaggcgcacggcgtaggggagcctcgcagtgcggcggcgtgcggcggcggctcggggggcgaggcgggccgcctgttcccggggaaggaggcgcgggcgtctgagcgaggccgggcgcggcggccttctctcacgcgccccccgagccagcgcccgcctcccgcgcccgcctctcttctcccgtcggcccagactatccgctcccaccgcgccccccggcccacctggtggccccggccctggccgccgcccccgcggcggttcccggagctcgtcccggacgcgcgcccgggcggcgggggctcggcggccaccgctgcctcgggggagcgagggcgggagggtgtgtgtgcgcgctgtgagcagggggtgccggcggggctgcagcggaggcactttggaagaatgactctggagtccatcatggcgtgctgcctgagcgaggaggccaaggaagcccggcggatcaacgacgagatcgagcggcagctccgcagggacaagcgggacgcccgccgggagctcaagctgctgctgctcgggacaggagagagtggcaagagtacgtttatcaagcagatgagaatcatccatgggtcaggatactctgatgaagataaaaggggcttcaccaagctggtgtatcagaacatcttcacggccatgcaggccatgatcagagccatggacacactcaagatcccatacaagtatgagcacaataaggctcatgcacaattagttcgagaagttgatgtggagaaggtgtctgcttttgagaatccatatgtagatgcaataaagagtttatggaatgatcctggaatccaggaatgctatgatagacgacgagaatatcaattatctgactctaccaaatactatcttaatgacttggaccgcgtagctgaccctgcctacctgcctacgcaacaagatgtgcttagagttcgagtccccaccacagggatcatcgaatacccctttgacttacaaagtgtcattttcagaatggtcgatgtagggggccaaaggtcagagagaagaaaatggatacactgctttgaaaatgtcacctctatcatgtttctagtagcgcttagtgaatatgatcaagttctcgtggagtcagacaatgagaaccgaatggaggaaagcaaggctctctttagaacaattatcacatacccctggttccagaactcctcggttattctgttcttaaacaagaaagatcttctagaggagaaaatcatgtattcccatctagtcgactacttcccagaatatgatggaccccagagagatgcccaggcagcccgagaattcattctgaagatgttcgtggacctgaacccagacagtgacaaaattatctactcccacttcacgtgcgccacagacaccgagaatatccgctttgtctttgctgccgtcaaggacaccatcctccagttgaacctgaaggagtacaatctggtctaattgtgcctcctagacacccgccctgcccttccctggtgggctattgaagatacacaagagggactgtatttctgtggaaaacaatttgcataatactaatttattgccgtcctggactctgtgtgagcgtgtccacagagtttgtagtaaatattatgattttatttaaactattcagaggaaaaacagaggatgctgaagtacagtcccagcacatttcctctctatcttttttttaggcaaaaccttgtgactcagtgtattttaaattctcagtcatgcactcacaaagataagacttgtttctttctgtctctctctctttttcttttctatggagcaaaacaaagctgatttcccttttttcttcccccgctaattcatacctccctcctgatgtttttcccaggttacaatggcctttatcctagttccattcttggtcaagtttttctctcaaatgatacagtcaggacacaccgttcgatttaagccatcatcagcttaatttaagtttgtagtttttgctgaaggattatatgtattaatacttacggttttaaatgtgttgctttggatacacacatagtttcttttttaatagaatatactgtcttgtctcactttggactgggacagtggatgcccatctaaaagttaagtgtcatttcttttagatgtttaccttcagccatagcttgattgctcagagaaatatgcagaaggcaggatcaaagacacacaggagtcctttcttttgaaatgccacgtgccattgtctttcctcccttctttgcttctttttcttaccctctctttcaattgcagatgccaaaaaagatgccaacagacactacattaccctaatggctgctacccagaacctttttataggttgttcttaatttttttgttgttgttgttcaagcttttcctttcttttttttcttagtgtttgggccacgattttaaaatgacttttattatgggtatgtgttgccaaagctggctttttgtcaaataaaatgaatacgaacttaaaaaataaaagctggtatcttaaaatgtaagagagtaagactgtgaagcctaaaatgactggctgagaatgaaccagaaatgccatttgccaaacagttgtaactagaaatttgattctcacagtccattcttttctttgtccttaagatgacattgttagtgttcacgtcccatgttcagtgtccaaaccggcaatgtaaaaagtatcctgtgtggcttaacaggaaatctgtttatgtctctttatttgaaaccagttttactctcagtggttctttaagttcaatgaagtctgccaggaacattggttggtagtattattccgacacctttaatttccaaaatctgaagttcctgctagtttaccaccttcatgatcttcttgaactggtaactgattaggttgaacttatggaagatttgtggacttaactcaaaagtaacctctcagtgttctatagaacatgtatttgtgtaactgaacctaccaggagaaatgtttggaattctatatgtgcaatttttcaacaaatgcaaaaaaaatacagcacatgtattgacaagcttctgtcaagcagcttgagttgaaatttgatttaagaaaataaatcatgattgttcaaagctgctgggacgttagaattaggccatgatactggtctcattttaactacagtggtatttggcactagtgtaaacttccatataaatcactcttttggaacaacaaagggggagggagaaaaatcacggcctgttaaatgagtaccaaagccgcccaacagtaatgagatgttctcatccttgattctcccagcctcaaacaacacagcttactttttttttcccttgctcagaaagtacctgtaatttaacaaacagactgcctgtaggtatagtgcaattacaaatgctctaatcattgtacatacatctctcttgatattgcagcatccatactggctttgtaatcattaattttttggcagattgaatgtgctgtattgatatgtatctatgtaattgtattgtatgtctatagctaattcacgttttgaataatgttattttatttacttttttaagagaggagaatgtaaatttgtcagtttatttctgactagggatattttctttccatttagaaaagaaggaaaaaaaaaaaaccttactgtcatacagagcggtactagcgtcgtgctgtataaaatcatttgcacattcctgagtagaggtatactgattataagacccaaaggtaatttcatagcaaaatacataaaatcagtcggagcttttatacaaacatggaaaccaactttgtagaacttttgccatttgatctaggattggaatatgagcttttatacaattcatattcttatttggcaaatgcacagtttagtattacctctctgatggcctttactagaaaggcagttttagaagctattgtgatccactaaggaaatgttttaacagctagagaccactgcttgcctgaaagggcgttcttaaatttggtgcagcnnnnnnnnnnnnnnnnnnnnnnnnnnnnnnnnnnncaacatttgaaggcctacagtgtgtatagagaaaacctcatcacaagatcataagtgttacagttttagggaatcaagatattctatttaatagagctatagtaaatgtagtcaattaaacctgatctcaaagcttgaagaagctgagcaaaacagggaaagattgttatatttgtctttatgaaattgggatggaatttgctatgcagaattgaggtttgtggctttgctgttcctgtagggtgcatgacaagatcccttctcttgagaaaggaaaaaattgatcaccctagcagcagtgatgcatagaaacctaattttagccacaccagtcaatcgaagctaaaggattttcttttttgtttcttcggggttttattgaaggggctaggggcgggacgggattcttttcagttttgtataaaaacaaagtttactcatgctttatattatattgtgattgcaagcgttataagcgtgtgccactggcctcctattgttgatgcttaggtaatggaggcctgtggtgagttttatggtgacttgggcatgtcttattcaaaaacaaaaacataaaacacagaaacctttcttcagcataccaaggcaagcagccatttcatgactcacttaacacattgcagtgtaccagtttacagatgatttttccctttttgcgtgacatggcagttctaacccccagagaattccttatttgtaaattggaagtttctactatgccttacagagcttaaattcagaagtttgtgcctcatatctgaaacaaagggaaataacacacccattcaaaagtaaataaatctcctagaagtttttgtttttaacatttccatataaagagctctgttgaatgtcatgaatagactggaaaaaaaaattttaagaacctgcatatgttgtttactagcagatgacaactacaaaaggaatctgaagaacacgtaaaacttgtatttttttttttttggtagattaactagcaggcctattttaaaaaggtaattcagctaaagggcaatttacttttttgtacttcagactatcttgattgtcaaagtgtacgaactgtaattttaaaatttatactgccacatgattgtaaattttagttgtcttaagttaggaattggtgaaaagctatttatgctggatttgggtcaaaatgacttatttgcaaaaaaataaataatgggaagaaagggctgtataatgaaatactgcaagactcacatattggttggaaatttccctcaaatcacctaccgattacccttgatttccctttgttttcagtttctcaaaacgaatgaaatgaaatatagcagaatgttaacccatataaaaataaagtgtacccaaatattgtaatgtatattgctgctcttcttcaaattaaataagggtttaaaaccacttaattggtaatcaacatctcaattgatacaaataaggtgtgcttggtatacattaatattttcttccaaagatatatctttggttagaaacacaaaaaaataaaactagtaatattgtatgtttatctatctctacatatttccagcatatgtagcgttaatagatctgtcctggtaactgtgtctttgggatttcattttggttccatcaaattaggaaaagaaatggcttagttgtatatgattagctagagatttttggagccagacacctgctgtttagtagataacttagtacagaccctaaacttgtcatttgtttttctcacagaatagccatttcctgctgtcttcccaatgatcactgccctttcaataacactcttgcctctagaatcatatgttcaaagtatgaatacacacctagcacatagtaggtgctcaaatattaatttcctccttgccttccttatctaccctgtgtcctccatttccccgtatgattccaacccaatatagcaaatgacatttacatgttatgaaaacatctattgggtaaaatcagatcttggataaagaaattctgacttttatataagcttttggtagacagaaaaaacagaaaggtattcgttggtagaacatttttaagttcaggaaagaaagctggaataatactacgtaactttgtccaggttactttgactgaaacacgtttttggtggatttcttttcctcaaagaactctctaaatgcaactccttgctggattcctcacccatcatcctgttggaaacccttactagacctatgtatttagggagttttgtcagaaaacatttttaacttgcagtatttaaaagaatatttactgttcctaaaatgtcattcaaatgcatgtactgtctattgtttggggatgggaactagttttgcaaaaaacacctaatgttgtataataatgccccaatgatcttgctggttaaaaatacagtatttttggccataattttgtactatagtattcttcattgttgagttttgcttccattaaagttgcccgagcccctctcagaatgttttgtattagtaggagtactgaaatacatctttccttccttaacacaccttgtgcatattgcattttccaaaataaacaagtttaatggtttc

SEQ ID NO: 835 - protein, 499 aa, Homo sapien
MSSRRQAHGVGEPRSAAACGGGSGGEAGRLFPGKEARASERGRARRPSLTRPPSQRPPPAPASLLPSAQTIRSHRAPRPTWWPRPWPPPPRRFPELVPDARPGGGGSAATAASGERGREGVCARCEQGVPAGLQRRHFGRMTLESIMACCLSEEAKEARRINDEIERQLRRDKRDARRELKLLLLGTGESGKSTFIKQMRIIHGSGYSDEDKRGFTKLVYQNIFTAMQAMIRAMDTLKIPYKYEHNKAHAQLVREVDVEKVSAFENPYVDAIKSLWNDPGIQECYDRRREYQLSDSTKYYLNDLDRVADPAYLPTQQDVLRVRVPTTGIIEYPFDLQSVIFRMVDVGGQRSERRKWIHCFENVTSIMFLVALSEYDQVLVESDNENRMEESKALFRTIITYPWFQNSSVILFLNKKDLLEEKIMYSHLVDYFPEYDGPQRDAQAAREFILKMFVDLNPDSDKIIYSHFTCATDTENIRFVFAAVKDTILQLNLKEYNLV

SEQ ID NO: 836 - DNA, 540 bp, Homo sapien
cctggactagccgggttgtatttggaaacgcggagtgagtttttccgtgctgtgtaggggctaacaatggacacccagaaggacgttcaacctccaaagcagcaaccaatgatatatatctgtggagagtgtcacacagaaaatgaaataaaatctagggatccaatcagatgcagagaatgtggatacagaataatgtacaagaaaaggactaaaagattggtcgtttttgatgctcgatgaatgctgggaattcagaggaatgtcttcacttatacttggatttgctctcttcccatttctgattgttgtatagctttcgattttgcttacagtagttcccccttatcttcgggagatacattccaaggcccccagtgaactcctgaaacctcaaacagtaccaaacctttatacactgttttttccatatatatatacctatgataaagtataatgtataaattaagcatagcaagagattaataataatgtaatagaacaatgataacatactataataaaagttatgtgaatgtg

SEQ ID NO: 837 - protein, 58 aa, Homo sapien
MDTQKDVQPPKQQPMIYICGECHTENEIKSRDPIRCRECGYRIMYKKRTKRLVVFDAR

SEQ ID NO: 838 - DNA, 2986 bp, Homo sapien
gcgccccagtcgacgctgagctcctctgctactcagagttgcaacctcagcctcgctatggctcccagcagcccccggcccgcgctgcccgcactcctggtcctgctcggggctctgttcccaggacctggcaatgcccagacatctgtgtccccctcaaaagtcatcctgccccggggaggctccgtgctggtgacatgcagcacctcctgtgaccagcccaagttgttgggcatagagaccccgttgcctaaaaaggagttgctcctgcctgggaacaaccggaaggtgtatgaactgagcaatgtgcaagaagatagccaaccaatgtgctattcaaactgccctgatgggcagtcaacagctaaaaccttcctcaccgtgtactggactccagaacgggtggaactggcacccctcccctcttggcagccagtgggcaagaaccttaccctacgctgccaggtggagggtggggcaccccgggccaacctcaccgtggtgctgctccgtggggagaaggagctgaaacgggagccagctgtgggggagcccgctgaggtcacgaccacggtgctggtgaggagagatcaccatggagccaatttctcgtgccgcactgaactggacctgcggccccaagggctggagctgtttgagaacacctcggccccctaccagctccagacctttgtcctgccagcgactcccccacaacttgtcagcccccgggtcctagaggtggacacgcaggggaccgtggtctgttccctggacgggctgttcccagtctcggaggcccaggtccacctggcactgggggaccagaggttgaaccccacagtcacctatggcaacgactccttctcggccaaggcctcagtcagtgtgaccgcagaggacgagggcacccagcggctgacgtgtgcagtaatactggggaaccagagccaggagacactgcagacagtgaccatctacagctttccggcgcccaacgtgattctgacgaagccagaggtctcagaagggaccgaggtgacagtgaagtgtgaggcccaccctagagccaaggtgacgctgaatggggttccagcccagccactgggcccgagggcccagctcctgctgaaggccaccccagaggacaacgggcgcagcttctcctgctctgcaaccctggaggtggccggccagcttatacacaagaaccagacccgggagcttcgtgtcctgtatggcccccgactggacgagagggattgtccgggaaactggacgtggccagaaaattcccagcagactccaatgtgccaggcttgggggaacccattgcccgagctcaagtgtctaaaggatggcactttcccactgcccatcggggaatcagtgactgtcactcgagatcttgagggcacctacctctgtcgggccaggagcactcaaggggaggtcacccgcgaggtgaccgtgaatgtgctctccccccggtatgagattgtcatcatcactgtggtagcagccgcagtcataatgggcactgcaggcctcagcacgtacctctataaccgccagcggaagatcaagaaatacagactacaacaggcccaaaaagggacccccatgaaaccgaacacacaagccacgcctccctgaacctatcccgggacagggcctcttcctcggccttcccatattggtggcagtggtgccacactgaacagagtggaagacatatgccatgcagctacacctaccggccctgggacgccggaggacagggcattgtcctcagtcagatacaacagcatttggggccatggtacctgcacacctaaaacactaggccacgcatctgatctgtagtcacatgactaagccaagaggaaggagcaagactcaagacatgattgatggatgttaaagtctagcctgatgagaggggaagtggtgggggagacatagccccaccatgaggacatacaactgggaaatactgaaacttgctgcctattgggtatgctgaggcccacagacttacagaagaagtggccctccatagacatgtgtagcatcaaaacacaaaggcccacacttcctgacggatgccagcttgggcactgctgtctactgaccccaacccttgatgatatgtatttattcatttgttattttaccagctatttattgagtgtcttttatgtaggctaaatgaacataggtctctggcctcacggagctcccagtccatgtcacattcaaggtcaccaggtacagttgtacaggttgtacactgcaggagagtgcctggcaaaaagatcaaatggggctgggacttctcattggccaacctgcctttccccagaaggagtgatttttctatcggcacaaaagcactatatggactggtaatggttcacaggttcagagattacccagtgaggccttattcctcccttccccccaaaactgacacctttgttagccacctccccacccacatacatttctgccagtgttcacaatgacactcagcggtcatgtctggacatgagtgcccagggaatatgcccaagctatgccttgtcctcttgtcctgtttgcatttcactgggagcttgcactattgcagctccagtttcctgcagtgatcagggtcctgcaagcagtggggaagggggccaaggtattggaggactccctcccagctttggaagggtcatccgcgtgtgtgtgtgtgtgtatgtgtagacaagctctcgctctgtcacccaggctggagtgcagtggtgcaatcatggttcactgcagtcttgaccttttgggctcaagtgatcctcccacctcagcctcctgagtagctgggaccataggctcacaacaccacacctggcaaatttgattttttttttttttttcagagacggggtctcgcaacattgcccagacttcctttgtgttagttaataaagctttctcaactgcc

SEQ ID NO: 839 - protein, 532 aa, Homo sapien
MAPSSPRPALPALLVLLGALFPGPGNAQTSVSPSKVILPRGGSVLVTCSTSCDQPKLLGIETPLPKKELLLPGNNRKVYELSNVQEDSQPMCYSNCPDGQSTAKTFLTVYWTPERVELAPLPSWQPVGKNLTLRCQVEGGAPRANLTVVLLRGEKELKREPAVGEPAEVTTTVLVRRDHHGANFSCRTELDLRPQGLELFENTSAPYQLQTFVLPATPPQLVSPRVLEVDTQGTVVCSLDGLFPVSEAQVHLALGDQRLNPTVTYGNDSFSAKASVSVTAEDEGTQRLTCAVILGNQSQETLQTVTIYSFPAPNVILTKPEVSEGTEVTVKCEAHPRAKVTLNGVPAQPLGPRAQLLLKATPEDNGRSFSCSATLEVAGQLIHKNQTRELRVLYGPRLDERDCPGNWTWPENSQQTPMCQAWGNPLPELKCLKDGTFPLPIGESVTVTRDLEGTYLCRARSTQGEVTREVTVNVLSPRYEIVIITVVAAAVIMGTAGLSTYLYNRQRKIKKYRLQQAQKGTPMKPNTQATPP

SEQ ID NO: 840 - DNA, 2986 bp, Homo sapien; identical to SEQ ID NO: 838

SEQ ID NO: 841 - protein, 532 aa, Homo sapien; identical to SEQ ID NO: 839

SEQ ID NO: 842 - DNA, 900 bp, Homo sapien
gggactcggcggaggatgggcttgctctcaattttgcgcaagttgaaaagtgcaccagaccaggaggtgagaatacttctcctgggcttggataatgctggcaagaccactcttctgaagcagcttgcatctgaagacatcagccacatcacacctacacagggtttcaacatcaaaagtgtacaatcacaaggttttaaactgaatgtatgggacattggtggacagaggaaaatcagaccatactggaagaattattttgaaaataccgatattcttatatatgtaatcgacagtgcagacagaaaaagatttgaagagacgggtcaggaactagcggaattactggaggaagaaaaactaagttgtgtgccagtgctcatctttgctaataagcaggatttgctcacagcagcccctgcctctgaaattgcagaaggactgaacctgcataccatccgcgaccgagtctggcagatccagtcttgctcagctctcacaggagagggcgttcaggatggcatgaactgggtctgcaaaaatgtcaatgcaaagaagaaataaaatctagacgaatggagatgcaggagctgcgggagccgaattcgggccttaaaaacactaatttgctgctttctgaccaaatgtttttcatctgtgtacactccagctgtttgaagagagggaacaacacggtttagaaagaatccccattccagcagtagatttaactgatctctgaggttcagtatcatttttcaaataaaggaattatattatttcctctgcataattgaaatagtattaaatgtctaaagcacatgattagaaaatgagatcttttaaatgagcaagagattgcattgcagtttagacaattccagtgggctttttttttcg

SEQ ID NO: 843 - protein, 182 aa, Homo sapien
MGLLSILRKLKSAPDQEVRILLLGLDNAGKTTLLKQLASEDISHITPTQGFNIKSVQSQGFKLNVWDIGGQRKIRPYWKNYFENTDILIYVIDSADRKRFEETGQELAELLEEEKLSCVPVLIFANKQDLLTAAPASEIAEGLNLHTIRDRVWQIQSCSALTGEGVQDGMNWVCKNVNAKKK

SEQ ID NO: 844 - DNA, 4426 bp, Homo sapien
tgccttgaccaggacttgggactttgcgaaaggatcgcggggcccggagaggtgttggagagcacaatggctgaacaagtccttcctcaggctttgtatttgagcaatatgcggaaagctgtgaagatacgggagagaactccagaagacatttttaaacctactaatgggatcattcatcattttaaaaccatgcaccgatacacactggaaatgttcagaacttgccagttttgtcctcagtttcgggagatcatccacaaagccctcatcgacagaaacatccaggccaccctggaaagccagaagaaactcaactggtgtcgagaagtccggaagcttgtggcgctgaaaacgaacggtgacggcaattgcctcatgcatgccacttctcagtacatgtggggcgttcaggacacagacttggtactgaggaaggcgctgttcagcacgctcaaggaaacagacacacgcaactttaaattccgctggcaactggagtctctcaaatctcaggaatttgttgaaacggggctttgctatgatactcggaactggaatgatgaatgggacaatcttatcaaaatggcttccacagacacacccatggcccgaagtggacttcagtacaactcactggaagaaatacacatatttgtcctttgcaacatcctcagaaggccaatcattgtcatttcagacaaaatgctaagaagtttggaatcaggttccaatttcgcccctttgaaagtgggtggaatttacttgcctctccactggcctgcccaggaatgctacagataccccattgttctcggctatgacagccatcattttgtacccttggtgaccctgaaggacagtgggcctgaaatccgagctgttccacttgttaacagagaccggggaagatttgaagacttaaaagttcactttttgacagatcctgaaaatgagatgaaggagaagctcttaaaagagtacttaatggtgatagaaatccccgtccaaggctgggaccatggcacaactcatctcatcaatgccgcaaagttggatgaagctaacttaccaaaagaaatcaatctggtagatgattactttgaacttgttcagcatgagtacaagaaatggcaggaaaacagcgagcaggggaggagagaggggcacgcccagaatcccatggaaccttccgtgccccagctttctctcatggatgtaaaatgtgaaacgcccaactgccccttcttcatgtctgtgaacacccagcctttatgccatgagtgctcagagaggcggcaaaagaatcaaaacaaactcccaaagctgaactccaagccgggccctgaggggctccctggcatggcgctcggggcctctcggggagaagcctatgagcccttggcgtggaaccctgaggagtccactggggggcctcattcggccccaccgacagcacccagcccttttctgttcagtgagaccactgccatgaagtgcaggagccccggctgccccttcacactgaatgtgcagcacaacggattttgtgaacgttgccacaacgcccggcaacttcacgccagccacgccccagaccacacaaggcacttggatcccgggaagtgccaagcctgcctccaggatgttaccaggacatttaatgggatctgcagtacttgcttcaaaaggactacagcagaggcctcctccagcctcagcaccagcctccctccttcctgtcaccagcgttccaagtcagatccctcgcggctcgtccggagcccctccccgcattcttgccacagagctggaaacgacgcccctgctggctgcctgtctcaagctgcacggactcctggggacaggacggggacgagcaagtgcagaaaagccggctgcgtgtattttgggactccagaaaacaagggcttttgcacactgtgtttcatcgagtacagagaaaacaaacattttgctgctgcctcagggaaagtcagtcccacagcgtccaggttccagaacaccattccgtgcctggggagggaatgcggcacccttggaagcaccatgtttgaaggatactgccagaagtgtttcattgaagctcagaatcagagatttcatgaggccaaaaggacagaagagcaactgagatcgagccagcgcagagatgtgcctcgaaccacacaaagcacctcaaggcccaagtgcgcccgggcctcctgcaagaacatcctggcctgccgcagcgaggagctctgcatggagtgtcagcatcccaaccagaggatgggccctggggcccaccggggtgagcctgcccccgaagacccccccaagcagcgttgccgggcccccgcctgtgatcattttggcaatgccaagtgcaacggctactgcaacgaatgctttcagttcaagcagatgtatggctaaccggaaacaggtgggtcacctcctgcaagaagtggggcctcgagctgtcagtcatcatggtgctatcctctgaacccctcagctgccactgcaacagtgggcttaagggtgtctgagcaggagaggaaagataagctcttcgtggtgcccacgatgctcaggtttggtaacccgggagtgttcccaggtggccttagaaagcaaagcttgtaactggcaagggatgatgtcagattcagcccaaggttcctcctctcctaccaagcaggaggccaggaacttctttggacttggaaggtgtgcggggactggccgaggcccctgcaccctgcgcatcaggactgcttcatcgtcttggctgagaaagggaaaagacacacaagtcgcgtgggttggagaagccagagccattccacctcccctcccccagcatctctcagagatgtgaagccagatcctcatggcagcgaggccctctgcaagaagctcaaggaagctcagggaaaatggacgtattcagagagtgtttgtagttcatggtttttccctacctgcccggttcctttcctgaggacccggcagaaatgcagaaccatccatggactgtgattctgaggctgctgagactgaacatgttcacattgacagaaaaacaagctgctctttataatatgcaccttttaaaaaattagaatattttactgggaagacgtgtaactctttgggttattactgtctttacttctaaagaagttagcttgaactgaggagtaaaagtgtgtacatatataatatacccttacattatgtatgagggatttttttaaattatattgaaatgctgccctagaagtacaataggaaggctaaataataataacctgttttctggttgttgttggggcatgagcttgtgtatacactgcttgcataaactcaaccagctgcctttttaaagggagctctagtcctttttgtgtaattcactttatttattttattacaaacttcaagattatttaagtgaagatatttcttcagctctggggaaaatgccacagtgttctcctgagagaacatccttgctttgagtcaggctgtgggcaagttcctgaccacagggagtaaattggcctctttgatacacttttgcttgcctccccaggaaagaaggaattgcatccaaggtatacatacatattcatcgatgtttcgtgcttctccttatgaaactccagctatgtaataaaaaactatactctgtgttctgttaatgcctctgagtgtcctacctccttggagatgagatagggaaggagcagggatgagactggcaatggtcacagggaaagatgtggccttttgtgatggttttattttctgttaacactgtgtcctgggggggctgggaagtcccctgcatcccatggtaccctggtattgggacagcaaaagccagtaaccatgagtatgaggaaatctctttctgttgctggcttacagtttctctgtgtgctttgtggttgctgtcatatttgctctagaagaaaaaaaaaaaaggaggggaaatgcattttccccagagataaaggctgccattttgggggtctgtacttatggcctgaaaatatttgtgatccataactctacacagcctttactcatactattaggcacactttccccttagagccccctaagtttttcccagacgaatctttataatttcctttccaaagataccaaataaacttcagtgttttcatctaattctcttaaagttgatatcttaatattttgtgttgatcattatttccattcttaatgtgaaaaaaagtaattatttatacttattataaaaagtatttgaaatttgcacatttaattgtccctaatagaaagccacctattctttgttggatttcttcaagtttttctaaataaatgtaacttttcacaagagtcaacattaaaaaataaattattt

SEQ ID NO: 845 - protein, 790 aa, Homo sapien
MAEQVLPQALYLSNMRKAVKIRERTPEDIFKPTNGIIHHFKTMHRYTLEMFRTCQFCPQFREIIHKALIDRNIQATLESQKKLNWCREVRKLVALKTNGDGNCLMHATSQYMWGVQDTDLVLRKALFSTLKETDTRNFKFRWQLESLKSQEFVETGLCYDTRNWNDEWDNLIKMASTDTPMARSGLQYNSLEEIHIFVLCNILRRPIIVISDKMLRSLESGSNFAPLKVGGIYLPLHWPAQECYRYPIVLGYDSHHFVPLVTLKDSGPEIRAVPLVNRDRGRFEDLKVHFLTDPENEMKEKLLKEYLMVIEIPVQGWDHGTTHLINAAKLDEANLPKEINLVDDYFELVQHEYKKWQENSEQGRREGHAQNPMEPSVPQLSLMDVKCETPNCPFFMSVNTQPLCHECSERRQKNQNKLPKLNSKPGPEGLPGMALGASRGEAYEPLAWNPEESTGGPHSAPPTAPSPFLFSETTAMKCRSPGCPFTLNVQHNGFCERCHNARQLHASHAPDHTRHLDPGKCQACLQDVTRTFNGICSTCFKRTTAEASSSLSTSLPPSCHQRSKSDPSRLVRSPSPHSCHRAGNDAPAGCLSQAARTPGDRTGTSKCRKAGCVYFGTPENKGFCTLCFIEYRENKHFAAASGKVSPTASRFQNTIPCLGRECGTLGSTMFEGYCQKCFIEAQNQRFHEAKRTEEQLRSSQRRDVPRTTQSTSRPKCARASCKNILACRSEELCMECQHPNQRMGPGAHRGEPAPEDPPKQRCRAPACDHFGNAKCNGYCNECFQFKQMYG

SEQ ID NO: 846 - DNA, 4426 bp, Homo sapien; identical to SEQ ID NO: 844

SEQ ID NO: 847 - protein, 790 aa, Homo sapien; identical to SEQ ID NO: 845

SEQ ID NO: 848 - DNA, 2653 bp, Homo sapien
atgttgtgatggagaagccgcggcggagcccgaaccccgcagcctgagccacctccgtcatctgggcccggggcctcaccgcgcaggagctgccaaggccatgtctgttccatcatcactgagccagtcggccattaatgccaacagccacggaggccccgcactgagcctacccctgcctctgcacgctgcccacaaccagctgctcaacgccaagctgcaggccacagctgtgggacccaaggacctgcgcagcgccatgggggagggtggtgggcctgagccaggccctgccaatgccaagtggctaaaagagggccagaaccagctccggcgggccgccacggcccaccgtgaccagaatcgcaatgtgaccttgaccttggcggaggaggccagccaggagcctgagatggcacccttgggccccaaaggcctgatacacctgtactctgagctggagctctcagctcacaacgcagccaaccgaggcctacgaggacctggcctgatcatcagcactcaagagcaggggccagatgagggagaggagaaggcggccggggaggccgaggaggaggaggaggatgatgatgatgaagaggaggaggaggacttatcttctcccccagggctgcctgagcccctggagagtgtggaggcccctcccaggccccaagcccttacagatggcccccgggaacacagcaagagtgccagcctcctgtttggcatgcggaacagtgcagccagtgatgaggactcaagctgggctaccttatcccagggcagcccctcctatggctccccagaggacacagattccttctggaaccccaacgccttcgagacggattccgacctgccggctggatggatgagggtccaggacacctcagggacctattactggcacatcccaacagggaccacccagtgggaaccccccggccgggcctccccctcacaggggagcagcccccaagaggagtcccagctcacctggacaggttttgctcatggagaaggctttgaggatggagaattttggaaggatgaacccagtgatgaggccccaatggagctgggactgaaggaacctgaggaggggacgttgaccttcccagctcagagcctcagcccagagccgttgccccaagaggaggagaagcttcccccacggaataccaacccagggatcaagtgtttcgccgtgcgctccctaggctgggtagagatgaccgaggaggagctggcccctggacgcagcagtgtggcagtcaacaattgcatccgtcagctctcttaccacaaaaacaacctgcatgaccccatgtctgggggctggggggaaggaaaggatctgctactgcagctggaggatgagacactaaagctagtggagccacagagccaggcactgctgcacgcccaacccatcatcagcatccgcgtgtggggcgtcgggcgggacagtggaagagagagggactttgcctacgtagctcgtgataagctgacccagatgctcaagtgccacgtgtttcgctgtgaggcacctgccaagaacatcgccaccagcctgcatgagatctgctctaagatcatggccgaacggcgtaatgcccgctgcttggtaaatggactctccctggaccactctaaacttgtggatgtccctttccaagtggaattcccagcgcctaagaatgagttggtccagaagttccaagtctattacctggggaatgtacctgttgctaaacctgttggggtagatgtgattaatggggccctcgagtcagtcctgtcctccagcagccgtgaacaatggaccccaagtcatgtcagtgtggcccctgctaccctcaccatcttgcaccagcagacagaggcagtgctgggagagtgtcgggtgcgtttcctctccttcctggccgtgggcagagatgtccacacgtttgcattcatcatggctgccggcccagcctccttctgctgccacatgttctggtgcgagcccaatgctgccagcctctcagaggctgtgcaggctgcgtgcatgcttcgctaccagaagtgtctggatgcccgttcccaggcctccacctcctgcctcccagcaccccctgctgagtctgtggcacggcgtgtagggtggactgtccgcaggggtgttcagtcgctgtggggctccctgaagcccaaacggctgggggcccataccccatgaagaagcccccaccttccctccacctgcttgtgttgggccccagggaactaaagggtgtgggtcagggaggggtctagaggctattcctaggcctcaggcctcccaaatatgcccctccccagtagctacggttccctgcctaggagctggggagggagagatctaatcccttcaaggaagtgataacactggagtggtaacaagaggagcaggaagcaaggccagccctggttctccatccccatgtgtttcaggtggaacaggaggaactggtccaggccaggcctcatcctcctggacccagcaggggcagaaggaggaagggactggtccaggcatgggtcccttccccctgctccatgggcacctctgctgtattgatatcactaataaagtctgtctgcactgcaaaaaaaaaaa

SEQ ID NO: 849 - protein, 710 aa, Homo sapien
MSVPSSLSQSAINANSHGGPALSLPLPLHAAHNQLLNAKLQATAVGPKDLRSAMGEGGGPEPGPANAKWLKEGQNQLRRAATAHRDQNRNVTLTLAEEASQEPEMAPLGPKGLIHLYSELELSAHNAANRGLRGPGLIISTQEQGPDEGEEKAAGEAEEEEEDDDDEEEEEDLSSPPGLPEPLESVEAPPRPQALTDGPREHSKSASLLFGMRNSAASDEDSSWATLSQGSPSYGSPEDTDSFWNPNAFETDSDLPAGWMRVQDTSGTYYWHIPTGTTQWEPPGRASPSQGSSPQEESQLTWTGFAHGEGFEDGEFWKDEPSDEAPMELGLKEPEEGTLTFPAQSLSPEPLPQEEEKLPPRNTNPGIKCFAVRSLGWVEMTEEELAPGRSSVAVNNCIRQLSYHKNNLHDPMSGGWGEGKDLLLQLEDETLKLVEPQSQALLHAQPIISIRVWGVGRDSGRERDFAYVARDKLTQMLKCHVFRCEAPAKNIATSLHEICSKIMAERRNARCLVNGLSLDHSKLVDVPFQVEFPAPKNELVQKFQVYYLGNVPVAKPVGVDVINGALESVLSSSSREQWTPSHVSVAPATLTILHQQTEAVLGECRVRFLSFLAVGRDVHTFAFIMAAGPASFCCHMFWCEPNAASLSEAVQAACMLRYQKCLDARSQASTSCLPAPPAESVARRVGWTVRRGVQSLWGSLKPKRLGAHTP

SEQ ID NO: 850 - DNA, 1103 bp, Homo sapien
cttcggtcctgctgtagtgccttctgcgccaggcccggttcaatcagcggccacaactgtctagggctcagacaccaccagccaatgagggagggcacgtggagccgcgtctgggctcgcggctcctgaccaatggggaagtggcatgtgggagggcgccggggttccccccgccaatggggagctacggcgcgcggccgggacttggaggcggtgcggcgcggcgggtgcggttcagtcggtcggcggcggcagcggaggaggaggaggaggaggaggatgaggaggatgaggaggatgtgggccacgcaggggctggcggtgcgcgtggctctgagcgtgctgccgggcagccgggcgctgcggccgggcgactgcgaagtttgtatttcttatctgggaagattttaccaggacctcaaagacagagatgtcacattctcaccagccactattgaaaacgaacttataaagttctgccgggaagcaagaggcaaagagaatcggttgtgctactatatcggggccacagatgatgcagccaccaaaatcatcaatgaggtatcaaagcctctggcccaccacatccctgtggagaagatctgtgagaagcttaagaagaaggacagccagatatgtgagcttaagtatgacaagcagatcgacctgagcacagtggacctgaagaagctccgagttaaagagctgaagaagattctggatgactggggggagacatgcaaaggctgtgcagaaaagtctgactacatccggaagataaatgaactgatgcctaaatatgcccccaaggcagccagtgcaccgaccgatttgtagtctgctcaatctctgttgcacctgagggggaaaaaacagttcaactgcttactcccaaaacagcctttttgtaatttattttttaagtgggctcctgacaatactgtatcagatgtgaagcctggagctttcctgatgatgctggccctacagtacccccatgaggggattcccttccttctgttgctggtgtactctaggacttcaaagtgtgtctgggatttttttattaaagaaaaaaaatttctagctgtcaaaaaaaaaaa

SEQ ID NO: 851 - protein, 234 aa, Homo sapien
MGKWHVGGRRGSPRQWGATARGRDLEAVRRGGCGSVGRRRQRRRRRRRRMRRMRRMWATQGLAVRVALSVLPGSRALRPGDCEVCISYLGRFYQDLKDRDVTFSPATIENELIKFCREARGKENRLCYYIGATDDAATKIINEVSKPLAHHIPVEKICEKLKKKDSQICELKYDKQIDLSTVDLKKLRVKELKKILDDWGETCKGCAEKSDYIRKINELMPKYAPKAASAPTDL

SEQ ID NO: 852 - DNA, 1009 bp, Homo sapien
agacgtgaagcctagcagaggactttttagctgctcactggccccgcttgtctggccgactcatccgcccgcgacccctaatcccctctgcctgccccaagatgctgaagccagccctggagccccgagggggcttctccttcgagaactgccaaagaaatgcatcattggaacgcgtcctcccggggctcaaggtccctcacgcacgcaagaccgggaccaccatcgcgggcctggtgttccaagacggggtcattctgggcgccgatacgcgagccactaacgattcggtcgtggcggacaagagctgcgagaagatccacttcatcgcccccaaaatctactgctgtggggctggagtagccgcggacgccgagatgaccacacggatggtggcgtccaagatggagctacacgcgttatctacgggccgcgagccccgcgtggccacggtcactcgcatcctgcgccagacgctcttcaggtaccagggccacgtgggtgcatcgctgatcgtgggcggcgtagacctgactggaccgcagctctacggcgtgcatccccatggctcctacagccgtctgcccttcacagccctgggctctggtcaggacgcggccctggcggtgctagaagaccggttccagccgaacatgacgctggaggctgctcaggggctgctggtggaagccgtcaccgccgggatcttgggtgacctgggctccgggggcaatgtggacgcatgtgtgatcacaaagactggcgccaagctgctgcggacactgagctcacccacagagcccgtgaagaggtctggccgctaccactttgtgcctggaaccacagctgtcctgacccagacagtgaagccactaaccctggagctagtggaggaaactgtgcaggctatggaggtggagtaagctgaggcttagagcttggaacaagggggaataaacccagaaaatacagttaaacaaaaaaaaaaaaaaaaaaaaaaaaaaaaaaa

SEQ ID NO: 853 - protein, 273 aa, Homo sapien
MLKPALEPRGGFSFENCQRNASLERVLPGLKVPHARKTGTTIAGLVFQDGVILGADTRATNDSVVADKSCEKIHFIAPKIYCCGAGVAADAEMTTRMVASKMELHALSTGREPRVATVTRILRQTLFRYQGHVGASLIVGGVDLTGPQLYGVHPHGSYSRLPFTALGSGQDAALAVLEDRFQPNMTLEAAQGLLVEAVTAGILGDLGSGGNVDACVITKTGAKLLRTLSSPTEPVKRSGRYHFVPGTTAVLTQTVKPLTLELVEETVQAMEVE

SEQ ID NO: 854 - DNA, 1842 bp, Homo sapien
ccgctttgttgcctgaggtgggtggcggtggaagttaagggagtcaggggctatcgctcctcgagactcgcagtcgcggccactgcagtcacttcgccagttagcccttagggtaggagtcgcgccggcagcagccatgagcggcggcgtgtacgggggagatgaagttggagcccttgtttttgacattggatcctatactgtgagagctggttatgctggtgaggactgccccaaggtggattttcctacagctattggtatggtggtagaaagagatgacggaagcacattaatggaaatagatggcgataaaggcaaacaaggcggtcccacctactacatagatactaatgctctgcgtgttccgagggagaatatggaggccatttcacctctaaaaaatgggatggttgaagactgggatagtttccaagctattttggatcatacctacaaaatgcatgtcaaatcagaagccagtctccatcctgttctcatgtcagaggcaccgtggaatactagagcaaagagagagaaactgacagagttaatgtttgaacactacaacatccctgccttcttcctttgcaaaactgcagttttgacagcatttgctaatggtcgttctactgggctgattttggacagtggagccactcataccactgcaattccagtccacgatggctatgtccttcaacaaggcattgtgaaatcccctcttgctggagactttattactatgcagtgcagagaactcttccaagaaatgaatattgaattggttcctccatatatgattgcatcaaaagaagctgttcgtgaaggatctccagcaaactggaaaagaaaagagaagttgcctcaggttacgaggtcttggcacaattatatgtgtaattgtgttatccaggattttcaagcttcggtacttcaagtgtcagattcaacttatgatgaacaagtggctgcacagatgccaactgttcattatgaattccccaatggctacaattgtgattttggtgcagagcggctaaagattccagaaggattatttgacccttccaatgtaaaggggttatcaggaaacacaatgttaggagtcagtcatgttgtcaccacaagtgttgggatgtgtgatattgatatcagaccaggtctctatggcagtgtaatagtggcaggaggaaacacactaatacagagttttactgacaggttgaatagagagctgtctcagaaaactcctccaagtatgcggttgaaattgattgcaaataatacaacagtggaacggaggtttagctcatggattggcggctccattctagcctctttgggtacctttcaacagatgtggatttccaagcaagaatatgaagaaggagggaagcagtgtgtagaaagaaaatgcccttgagaaagagttcccaagcttctaccttccttttgtcaccttacgtttcatagctttagtatactcaggaaaagaatgaccatcttttgtagaatgtttatacatttatgcatatttcaatttccacttaaatttatttaaagctttaactggctctataaattaagtttgtgctttccttgaaatgcacttattcttattacaagcattttataattttgtataaatgtctattttctctaaatattttgctttcagtaaaatgctttccaactctgtttagtgtattaattaccagtggattggtagaactgcttttattgactagtaaaagttactgcctagtctttttaccttaggcttacagaattaaataaaaattagccattccagaaatataaaaaaaaaaaaaaaaaaaa

SEQ ID NO: 855 - protein, 429 aa, Homo sapien
MSGGVYGGDEVGALVFDIGSYTVRAGYAGEDCPKVDFPTAIGMVVERDDGSTLMEIDGDKGKQGGPTYYIDTNALRVPRENMEAISPLKNGMVEDWDSFQAILDHTYKMHVKSEASLHPVLMSEAPWNTRAKREKLTELMFEHYNIPAFFLCKTAVLTAFANGRSTGLILDSGATHTTAIPVHDGYVLQQGIVKSPLAGDFITMQCRELFQEMNIELVPPYMIASKEAVREGSPANWKRKEKLPQVTRSWHNYMCNCVIQDFQASVLQVSDSTYDEQVAAQMPTVHYEFPNGYNCDFGAERLKIPEGLFDPSNVKGLSGNTMLGVSHVVTTSVGMCDIDIRPGLYGSVIVAGGNTLIQSFTDRLNRELSQKTPPSMRLKLIANNTTVERRFSSWIGGSILASLGTFQQMWISKQEYEEGGKQCVERKCP

SEQ ID NO: 856 - DNA, 1331 bp, Homo sapien
cggagccgcccgctgaggtcagaaggaggcgtctgcgctgatcgggtccgccgcgcgccagagccagagtcgcagccgaggggagccggggccggagcccgagcccgagccgagccggagcccgagcgagcggcggagaccgtgcccccgcctcggccccgcgccgccgcggccaggcccggcatggaggaggagtgccgggtgctctccatacagagccacgtcatccgcggctacgtgggcaaccgggcggccacgttcccgctgcaggttttgggatttgagattgacgcggtgaactctgtccagttttcaaaccacacaggctatgcccactggaagggccaagtgctgaattcagatgagctccaggagttgtacgaaggcctgaggctgaacaacatgaataaatatgactacgtgctcacaggttatacgagggacaagtcgttcctggccatggtggtggacattgtgcaggagctgaagcagcagaaccccaggctggtgtacgtgtgtgatccagtcttgggtgacaagtgggacggcgaaggctcgatgtacgtcccggaggacctccttcccgtctacaaagaaaaagtggtgccgcttgcagacattatcacgcccaaccagtttgaggccgagttactgagtggccggaagatccacagccaggaggaagccttgcgggtgatggacatgctgcactctatgggccccgacaccgtggtcatcaccagctccgacctgccctccccgcagggcagcaactacctgattgtgctggggagtcagaggaggaggaatcccgctggctccgtggtgatggaacgcatccggatggacattcgcaaagtggacgccgtctttgtgggcactggggacctgtttgctgccatgctcctggcgtggacacacaagcaccccaataacctcaaggtggcctgtgagaagaccgtgtctaccttgcaccacgttctgcagaggaccatccagtgtgcaaaagcccaggccggggaaggagtgaggcccagccccatgcagctggagctgcggatggtgcagagcaaaagggacatcgaggacccagagatcgtcgtccaggccacggtgctgtgagggccccgccgcttgcccgtgacacgcagcgcgttggtgtctccgtgtttgtccctgtgaaaacatgtaacgtctgccttagagccatgaccgaaacttgatatttttttctttcatgagtgtccggcatctgctggtcttcattgtgaaacgtgccagtcgtgctttgtgaaaaataacaaagtggtcacaaaaaaaaaaaaaaaaaa

SEQ ID NO: 857 - protein, 312 aa, Homo sapien
MEEECRVLSIQSHVIRGYVGNRAATFPLQVLGFEIDAVNSVQFSNHTGYAHWKGQVLNSDELQELYEGLRLNNMNKYDYVLTGYTRDKSFLAMVVDIVQELKQQNPRLVYVCDPVLGDKWDGEGSMYVPEDLLPVYKEKVVPLADIITPNQFEAELLSGRKIHSQEEALRVMDMLHSMGPDTVVITSSDLPSPQGSNYLIVLGSQRRRNPAGSVVMERIRMDIRKVDAVFVGTGDLFAAMLLAWTHKHPNNLKVACEKTVSTLHHVLQRTIQCAKAQAGEGVRPSPMQLELRMVQSKRDIEDPEIVVQATVL

SEQ ID NO: 858 - DNA, 2056 bp, Homo sapien
gcagccaggcgcgcactgcacagctctcttctctcgccgccgcccgagcgcacccttcagcccgcgcgccggccgtgagtcctcggtgctcgcccgccggccagacaaacagcccgcccgaccccgtcccgaccctggccgccccgagcggagcctggagcaaaatgatgcttcaacacccaggccaggtctctgcctcggaagtgagtgcttctgccatcgtcccctgcctgtcccctcctgggtcactggtgtttgaggattttgctaacctgacgccctttgtcaaggaagagctgaggtttgccatccagaacaagcacctctgccaccggatgtcctctgcgctggaatcagtcactgtcagcgacagacccctcggggtgtccatcacaaaagccgaggtagcccctgaagaagatgaaaggaaaaagaggcgacgagaaagaaataagattgcagctgcaaagtgccgaaacaagaagaaggagaagacggagtgcctgcagcttcagtattagcagagccacaggccgcctctgtggcatcaccagggtttctctgaagaagagggtctgcattttcctaaacccagtgctgctctcccatctcccatcttcctctcgcagcttgatgagccccggtgtgtcccaggagtcggagaagctggaaagtgtgaatgctgaactgaaggctcagattgaggagctcaagaacgagaagcagcatttgatatacatgctcaaccttcatcggcccacgtgtattgtccgggctcagaatgggaggactccagaagatgagagaaacctctttatccaacagataaaagaaggaacattgcagagctaagcagtcgtggtatgggggcgactggggagtcctcattgaatcctcattttatacccaaaaccctgaagccattggagagctgtcttcctgtgtacctctagaatcccagcagcagagaaccatcaaggcgggagggcctgcagtgattcagcaggcccttcccattctgccccagagtgggtcttggaccagggcaagtgcatctttgcctcaactccaggatttaggccttaacacactggccattcttatgttccagatggcccccagctggtgtcctgcccgcctttcatctggattctacaaaaaaccaggatgcccaccgttagattcaggcagcagtgtctgtacctcgggtgggagggatggggccatctccttcaccgtggctaccattgtcactcgtaggggatgtggagtgagaacagcatttagtgaagttgtgcaacggccagggttgtgctttctagcaaatatgctgttatgtccagaaattgtgtgtgcaagaaaactaggcaatgtactcttccgatgtttgtgtcacacaacactgatgtgacttttatatgctttttctcagatctggtttctaagagttttggggggcggggctgtcaccacgtgcagtatctcaagatattcaggtggccagaagagcttgtcagcaagaggaggaacagaattctcccagcgttaacacaaaatccatgggcagcatgatggcaggtcctctgttgcaaactcagttccaaagtcacaggaagaaagcagaaagttcaacttccaaagggttaggactctccactcaatgtcttaggtcaggagttgtgtctaggctggaagagccaaagaaatattccattttcctttccttgtggttgaaaccacagtcagtggagagatgtttggaacacagtcagtggagctggtggtaccaggtttagcattattggatgtcaaaagcattttttttgtcatgtagctgttttaagaaatctggcccagggtgtttgcagctgtgagaagtcactcacactggccacaaggacgctggctactgtctattaaaattctgatgtttctgtgaaattctcagagtgtttaattgtactcaatggtatcattacaattttctgtaagagaaaatattacttatttatcctagtattcctaacctgtcagaataataaatattgtggtaaaa

SEQ ID NO: 859 - protein, 118 aa, Homo sapien
MMLQHPGQVSASEVSASAIVPCLSPPGSLVFEDFANLTPFVKEELRFAIQNKHLCHRMSSALESVTVSDRPLGVSITKAEVAPEEDERKKRRRERNKIAAAKCRNKKKEKTECLQLQY

SEQ ID NO: 860 - DNA, 1769 bp, Homo sapien
cctcactgactataaaagaatagagaaggaagggcttcagtgaccggctgcctggctgacttacagcagtcagactctgacaggatcatggctatgatggaggtccaggggggacccagcctgggacagacctgcgtgctgatcgtgatcttcacagtgctcctgcagtctctctgtgtggctgtaacttacgtgtactttaccaacgagctgaagcagatgcaggacaagtactccaaaagtggcattgcttgtttcttaaaagaagatgacagttattgggaccccaatgacgaagagagtatgaacagcccctgctggcaagtcaagtggcaactccgtcagctcgttagaaagatgattttgagaacctctgaggaaaccatttctacagttcaagaaaagcaacaaaatatttctcccctagtgagagaaagaggtcctcagagagtagcagctcacataactgggaccagaggaagaagcaacacattgtcttctccaaactccaagaatgaaaaggctctgggccgcaaaataaactcctgggaatcatcaaggagtgggcattcattcctgagcaacttgcacttgaggaatggtgaactggtcatccatgaaaaagggttttactacatctattcccaaacatactttcgatttcaggaggaaataaaagaaaacacaaagaacgacaaacaaatggtccaatatatttacaaatacacaagttatcctgaccctatattgttgatgaaaagtgctagaaatagttgttggtctaaagatgcagaatatggactctattccatctatcaagggggaatatttgagcttaaggaaaatgacagaatttttgtttctgtaacaaatgagcacttgatagacatggaccatgaagccagttttttcggggcctttttagttggctaactgacctggaaagaaaaagcaataacctcaaagtgactattcagttttcaggatgatacactatgaagatgtttcaaaaaatctgaccaaaacaaacaaacagaaaacagaaaacaaaaaaacctctatgcaatctgagtagagcagccacaaccaaaaaattctacaacacacactgttctgaaagtgactcacttatcccaagaaaatgaaattgctgaaagatctttcaggactctacctcatatcagtttgctagcagaaatctagaagactgtcagcttccaaacattaatgcaatggttaacatcttctgtctttataatctactccttgtaaagactgtagaagaaagcgcaacaatccatctctcaagtagtgtatcacagtagtagcctccaggtttccttaagggacaacatccttaagtcaaaagagagaagaggcaccactaaaagatcgcagtttgcctggtgcagtggctcacacctgtaatcccaacattttgggaacccaaggtgggtagatcacgagatcaagagatcaagaccatagtgaccaacatagtgaaaccccatctctactgaaagtgcaaaaattagctgggtgtgttggcacatgcctgtagtcccagctacttgagaggctgaggcaggagaatcgtttgaacccgggaggcagaggttgcagtgtggtgagatcatgccactacactccagcctggcgacagagcgagacttggtttcaaaaaaaaaaaaaaaaaaaaacttcagtaagtacgtgttatttttttcaataaaattctattacagtatgtcaaaaaaaaaaaaaaaaaa

SEQ ID NO: 861 - protein, 281 aa, Homo sapien [sequence omitted]

SEQ ID NO: 862 - DNA, 1769 bp, Homo sapien; identical to SEQ ID NO: 860

SEQ ID NO: 863 - protein, 281 aa, Homo sapien [sequence omitted]

SEQ ID NO: 864 - DNA, 764 bp, Homo sapien
atgtctgtggtaccgcccaatcgctcgcagaccggctggccccggggggtcactcagttcggcaacaagtacatccagcagacgaagcccctcaccctggagcgcaccatcaacctgtaccctcttaccaattatacttttggtacaaaagagcccctctacgagaaggacagctctgttgcagccagatttcagcgcatgagggaagaatttgataaaattggaatgaggaggactgtagaaggggttctgattgtacatgagcaccggctaccccatgtgttactgctgcagctgggaacaactttcttcaaactacctggtggtgaacttaacccaggagaagatgaagttgaaggactaaaacgcttaatgacagagatactgggtcgtcaggatggagttttgcaagactgggtcattgacgattgcattggtaactggtggagaccaaattttgaacctcctcagtatccatatattcctgcacatattacaaagcctaaggaacataagaagttgtttctggttcagcttcaagaaaaagccttgtttgcagtccctaaaaattacaagctggtagctgcaccattgtttgaattgtatgacaatgcaccaggatatggacccatcatttctagtctccctcagctgttgagcaggttcaattttatttacaactgaattcctgcgcagtggagaagtaaaagaagccgcttgtctctgtgagcacagctatatacagtgtagaataaatgtggtag

SEQ ID NO: 865 - protein, 227 aa, Homo sapien
MSVVPPNRSQTGWPRGVTQFGNKYIQQTKPLTLERTINLYPLTNYTFGTKEPLYEKDSSVAARFQRMREEFDKIGMRRTVEGVLIVHEHRLPHVLLLQLGTTFFKLPGGELNPGEDEVEGLKRLMTEILGRQDGVLQDWVIDDCIGNWWRPNFEPPQYPYIPAHITKPKEHKKLFLVQLQEKALFAVPKNYKLVAAPLFELYDNAPGYGPIISSLPQLLSRFNFIYN

SEQ ID NO: 866 - DNA, 4074 bp, Homo sapien
cacgccccgcgctgctgggtcccgccagacacgccgccgccgcaggaaagtctacagtttggtaccccaggactcgctggtcaggaaagccctgcaggacatgagtgttaggcccgacgcctggcccttggcagcttgggaggtggctggggctgcttttgcctttgccagagacagctccaactgaggacctctccaacgggcccatccacagtccttccttcccctagtgtctgggaagacaggcgcgatgatggactccccgttcctggagctgtggcagtccaaggcagtgtccatcagggagcagctgggactcggggaccggcccaacgactcctattgctacaactcggccaaaaacagcaccgtgctccagggggtcacctttggtggcatccccactgtcctgctcatagacgtcagctgcttcctgttcttaatcttggtgttttctattataagaagaagattctgggactatggccgcattgccctggtgtcagaagcagacagcgagtccagatttcagagattgtcatcgacttcctcctcaggtcaacaagactttgaaaatgagctgggatgctgtccctggctgactgccatcttccgtctgcatgatgaccagatcctggaatggtgtggggaggacgccatccactacctgtccttccagaggcacatcatcttcctgttggtggtggtcagctttttgtccctgtgtgtcatcctgcctgtcaacctctcaggggatttgctggacaaagacccgtatagttttgggaggacaacaatagcaaacctacagactgacaatgacctcctttggctgcacaccatctttgctgtcatttacctcttcttcactgtgggtttcatgcggcaccacactcagtccattaagtacaaagaggagaacctggtgaggcggaccctgttcatcacaggactccccagagatgccaggaaggagactgtggagagccacttccgggacgcgtatcccacgtgtgaggtggttgatgtgcagctgtgctacaacgtggccaaactgatctacctgtgcaaggagaaaaagaagactgagaagagcctgacctattacacaaacctgcaggtgaagacaggccagcggaccctcatcaaccccaagccctgtggccagttttgctgctgtgaagtgctgggctgtgagtgggaagacgccatctcttactacacacggatgaaggacaggctgctggagaggatcacagaggaagaacgccacgtccaggaccagcccctgggaatggccttcgtcaccttccaggagaagtccatggccacctacatcctgaaagatttcaatgcctgcaagtgtcagagccttcagtgcaaaggtgagccccagccgtcctcccatagcagggagctctatacctccaagtggacagtcacctttgctgctgaccctgaggacatctgctggaagaacctctctatccagggcctccgctggtggctacagtggctgggcatcaacttcaccctcttcctggggctatttttcctgaccacaccctccatcatcctgtccaccatggacaagtttaatgtcaccaaacccatccatgcgctgaataacccgatcatcagccagttcttccccaccctcctgctctggtccttctcggccctgctcccctccattgtctactactctacactgctggagtctcactggaccaagtcgggggaaaaccagatcatgatgaccaaagtctacatattcttgatcttcatggtgctgatcctgccctccctgggtctcaccagtctagattttttcttccggtggctctttgacaaaacttcctcggaggcctccatcaggttggagtgcgtcttcctgcctgaccagggtgccttctttgtgaactatgtcatcgcctcggccttcatcggcaatggcatggagctgctgcggctgccaggtctcatcctctataccttccgcatgatcatggccaagacggctgctgaccgcaggaatgtcaagcagaaccaggccttccagtacgagtttggagccatgtatgcatggatgctgtgtgtcttcactgtcatcgtggcctacagcatcacttgtcccatcatcgcgccatttggcctcatctacatcctgctcaagcacatggtggaccggcacaacctctacttcgtctacctcccagccaagctggagaaggggatccactttgccgctgtgaaccaggccttggcagcccccatcctgtgcctcttctggctctacttcttttccttcctgcgcctgggtatgaaggcccccgccactctgttcaccttcctggtgctgctgctcaccatcctggtctgcctggctcacacctgctttggatgcttcaagcacctcagccctctgaactacaaaacagaagagcctgcaagtgacaaaggaagtgaggcagaggcccacatgcccccaccgttcacaccctacgtgcctcggattctgaacggcttggcctcggagaggacagcactgtctccgcagcagcagcagcagcagacctatggtgccatccacaacatcagcgggactatccctggacagtgcttggcgcagagcgccacgggcagtgtggctgctgccccccaggaggcctgaggctgggtctcactgctctgaaaagacacaaccagaatggcctggggctcaggcccttggctgagtgggaatgcgttgggactgcccagctgagctatcaggtgcccatcttttctggtcccagcagtggtgaggagagcacaggcaggcctcgcccctcccttgctcacccagtttcccctccggcacaagcttccagctctgcagctggggtgacatccccagtggtttgtcgccaagaccatgtggtggacttttcgccccccaaactgatgagtccgggagaatatatggagagagagatgtaacaaggggaaggcctcctcccttctgagcacacacacaaccgataaccaaagagatgctgcagtccaggtctgaggtcccgctggcatccagctccctgctccatggccagtccctccccagcccagcagtccctccaggctacatccaggagtaagctatggggaacaggttgggaggtggccagtgctcctgccagctgtgcacacatctctgtatcccgctagagttctgtgtttttgtatcatgttgtcagggacgctagctgggtcagggttaccccatagcaggcagggacaaggaccactcataatatgcccattggaccacagttaagatccagcctctctcacctcttcagggctgagtgcatgagtctgcacctccaggcaggctctgtgcagtactcaccccctccgtctgctccctccaaggtgtgggggtgggcagtgctcagggcctcctcggagccaaaggacagcatggtcggcacagaggaaggggtacctgggctgggtgcagggccatcccactgcccttgagctgtggctctggcaggaaggaggggcagcccatccctcttctccctcctggggattctggggaatgggatgcaacttaagacttctgcctgagaagcctcctccctgctgcctccagggggcaccaaggcacaagcctgtgcagtaggggcgggatgggggtgtggaagagcaggtccaggctcctagcacaactggcctggggccttggcacctctgtaggccctgcctgtgcctgtccgctggcctggggggcctgggcttatctgggccttctcactcagggactctcttgacgctgacttgcccccgcagcggtggccagtgctgcctctgctccaagctgcccctgcgctgggaggggtgggggcggtgccattggtctggtgcagcatagccctggccagtggcctcatccccagcaggcctcccgtgcctctgccagcaaggaggggccggccagctctgcttgcacagggggccccatgtggggtcagcgcacgctcatgtcactgagttccagccgcttttagagtaaagtcgtttatcatc

SEQ ID NO: 867 - protein, 807 aa, Homo sapien
MMDSPFLELWQSKAVSIREQLGLGDRPNDSYCYNSAKNSTVLQGVTFGGIPTVLLIDVSCFLFLILVFSIIRRRFWDYGRIALVSEADSESRFQRLSSTSSSGQQDFENELGCCPWLTAIFRLHDDQILEWCGEDAIHYLSFQRHIIFLLVVVSFLSLCVILPVNLSGDLLDKDPYSFGRTTIANLQTDNDLLWLHTIFAVIYLFFTVGFMRHHTQSIKYKEENLVRRTLFITGLPRDARKETVESHFRDAYPTCEVVDVQLCYNVAKLIYLCKEKKKTEKSLTYYTNLQVKTGQRTLINPKPCGQFCCCEVLGCEWEDAISYYTRMKDRLLERITEEERHVQDQPLGMAFVTFQEKSMATYILKDFNACKCQSLQCKGEPQPSSHSRELYTSKWTVTFAADPEDICWKNLSIQGLRWWLQWLGINFTLFLGLFFLTTPSIILSTMDKFNVTKPIHALNNPIISQFFPTLLLWSFSALLPSIVYYSTLLESHWTKSGENQIMMTKVYIFLIFMVLILPSLGLTSLDFFFRWLFDKTSSEASIRLECVFLPDQGAFFVNYVIASAFIGNGMELLRLPGLILYTFRMIMAKTAADRRNVKQNQAFQYEFGAMYAWMLCVFTVIVAYSITCPIIAPFGLIYILLKHMVDRHNLYFVYLPAKLEKGIHFAAVNQALAAPILCLFWLYFFSFLRLGMKAPATLFTFLVLLLTILVCLAHTCFGCFKHLSPLNYKTEEPASDKGSEAEAHMPPPFTPYVPRILNGLASERTALSPQQQQQQTYGAIHNISGTIPGQCLAQSATGSVAAAPQEA

SEQ ID NO: 868 - DNA, 4074 bp, Homo sapien; identical to SEQ ID NO: 866

SEQ ID NO: 869 - protein, 807 aa, Homo sapien; identical to SEQ ID NO: 867

SEQ ID NO: 870 - DNA, 1530 bp, Homo sapien
aatcctggaacaaggctacagcgtcgaagatccccagcgctgcgggctcggagagcagtcctaacggcgcctcgtacgctagtgtcctcccttttcagtccgcgtccctccctgggccgggctggcactcttgccttccccgtccctcatggcgctgctccgacgcccgacggtgtccagtgatttggagaatattgacacaggagttaattctaaagttaagagtcatgtgactattaggcgaactgttttagaagaaattggaaatagagttacaaccagagcagcacaagtagctaagaaagctcagaacaccaaagttccagttcaacccaccaaaacaacaaatgtcaacaaacaactgaaacctactgcttctgtcaaaccagtacagatggaaaagttggctccaaagggtccttctcccacacctgaggatgtctccatgaaggaagagaatctctgccaagctttttctgatgccttgctctgcaaaatcgaggacattgataacgaagattgggagaaccctcagctctgcagtgactacgttaaggatatctatcagtatctcaggcagctggaggttttgcagtccataaacccacatttcttagatggaagagatataaatggacgcatgcgtgccatcctagtggattggctggtacaagtccactccaagtttaggcttctgcaggagactctgtacatgtgcgttggcattatggatcgatttttacaggttcagccagtttcccggaagaagcttcaattagttgggattactgctctgctcttggcttccaagtatgaggagatgttttctccaaatattgaagactttgtttacatcacagacaatgcttataccagttcccaaatccgagaaatggaaactctaattttgaaagaattgaaatttgagttgggtcgacccttgccactacacttcttaaggcgagcatcaaaagccggggaggttgatgttgaacagcacactttagccaagtatttgatggagctgactctcatcgactatgatatggtgcattatcatccttctaaggtagcagcagctgcttcctgcttgtctcagaaggttctaggacaaggaaaatggaacttaaagcagcagtattacacaggatacacagagaatgaagtattggaagtcatgcagcacatggccaagaatgtggtgaaagtaaatgaaaacttaactaaattcatcgccatcaagaataagtatgcaagcagcaaactcctgaagatcagcatgatccctcagctgaactcaaaagccgtcaaagaccttgcctccccactgataggaaggtcctaggctgccgtgggccctggggatgtgtgcttcattgtgccctttttcttattggtttagaactcttgattttgtacatagtcctctggtctatctcatgaaacctcttctcagaccagttttctaaacatatattgaggaaaaataaagcgattggtttttcttaaggtaaaaaaaaaaaaaaaaaa

SEQ ID NO: 871 - protein, 398 aa, Homo sapien
MALLRRPTVSSDLENIDTGVNSKVKSHVTIRRTVLEEIGNRVTTRAAQVAKKAQNTKVPVQPTKTTNVNKQLKPTASVKPVQMEKLAPKGPSPTPEDVSMKEENLCQAFSDALLCKIEDIDNEDWENPQLCSDYVKDIYQYLRQLEVLQSINPHFLDGRDINGRMRAILVDWLVQVHSKFRLLQETLYMCVGIMDRFLQVQPVSRKKLQLVGITALLLASKYEEMFSPNIEDFVYITDNAYTSSQIREMETLILKELKFELGRPLPLHFLRRASKAGEVDVEQHTLAKYLMELTLIDYDMVHYHPSKVAAAASCLSQKVLGQGKWNLKQQYYTGYTENEVLEVMQHMAKNVVKVNENLTKFIAIKNKYASSKLLKISMIPQLNSKAVKDLASPLIGRS

SEQ ID NO: 872 - DNA, 2244 bp, Homo sapien
ctgcagacgaggcagggagaggcgggacttcgcgggcgagacgtcatcggggcgccggacgccggggcgcctgggagtttgaagcaaacaggcagcgcgcgacaatggcggtcgctcgtgcagctttggggccattggtgacgggtctgtacgacgtgcaggctttcaagtttggggacttcgtgctgaagagcgggctttcctcccccatctacatcgatctgcggggcatcgtgtctcgaccgcgtcttctgagtcaggttgcagatattttattccaaactgcccaaaatgcaggcatcagttttgacaccgtgtgtggagtgccttatacagctttgccattggctacagttatctgttcaaccaatcaaattccaatgcttattagaaggaaagaaacaaaggattatggaactaagcgtcttgtagaaggaactattaatccaggagaaacctgtttaatcattgaagatgttgtcaccagtggatctagtgttttggaaactgttgaggttcttcagaaggagggcttgaaggtcactgatgccatagtgctgttggacagagagcagggaggcaaggacaagttgcaggcgcacgggatccgcctccactcagtgtgtacattgtccaaaatgctggagattctcgagcagcagaaaaaagttgatgctgagacagttgggagagtgaagaggtttattcaggagaatgtctttgtggcagcgaatcataatggttctcccctttctataaaggaagcacccaaagaactcagcttcggtgcacgtgcagagctgcccaggatccacccagttgcatcgaagcttctcaggcttatgcaaaagaaggagaccaatctgtgtctatctgctgatgtttcactggccagagagctgttgcagctagcagatgctttaggacctagtatctgcatgctgaagactcatgtagatattttgaatgattttactctggatgtgatgaaggagttgataactctggcaaaatgccatgagttcttgatatttgaagaccggaagtttgcagatataggaaacacagtgaaaaagcagtatgaaggaggtatctttaaaatagcttcctgggcagatctagtaaatgctcacgtggtgccaggctcaggagttgtgaaaggcctgcaagaagtgggcctgcctttgcatcgggggtgcctccttattgcggaaatgagctccaccggctccctggccactggggactacactagagcagcggttagaatggctgaggagcactctgaatttgttgttggttttatttctggctcccgagtaagcatgaaaccagaatttcttcacttgactccaggagttcagttggaagcaggaggagataatcttggccaacagtacaatagcccacaagaagttattggcaaacgaggttccgatatcatcattgtaggtcgtggcataatctcagcagctgatcgtctggaagcagcagagatgtacagaaaagctgcttgggaagcgtatttgagtagacttggtgtttgagtgcttcagatacatttttcagatacaatgtgaagacattgaagatatgtggtcctcctgaaagtcactggctggaaataatccaattattcctgcttggattcttccacagggcctgtgtaagaatgggttctggagttctcatggtctttaggaaatattgagtaatttgtaatcaccgcattgatactataataagttcattcttaagcttgctttttttgagactggtgtttgttagacagccacagtcctgtctgggttagggtcttccacatttgaggatccttcctatctctccatgggactagactgctttgttattctatttattttttaatttttttcgagacaggatctcactctgttgcccaggatggagtgcagtggtgagatcacggctcattgcagcctcgacctcccaggtgatcctcccacctcagcttccagattagctggtgctataggcatgcaccaccacgtccatctaaatttctttattatttgtagagatgaggtcttgccatgttacccaggctggtctcaactcctgggctcaagcgatcctcctgcctcagtctctcaaagtgctgggattacaggtgtgagccactgtgcccagcctaattgcagtaagacaaaaattctagggcaccaagaggctaaagtcagcacagcttttcttgtgtcctgtatt

SEQ ID NO: 873 - protein, 480 aa, Homo sapien
MAVARAALGPLVTGLYDVQAFKFGDFVLKSGLSSPIYIDLRGIVSRPRLLSQVADILFQTAQNAGISFDTVCGVPYTALPLATVICSTNQIPMLIRRKETKDYGTKRLVEGTINPGETCLIIEDVVTSGSSVLETVEVLQKEGLKVTDAIVLLDREQGGKDKLQAHGIRLHSVCTLSKMLEILEQQKKVDAETVGRVKRFIQENVFVAANHNGSPLSIKEAPKELSFGARAELPRIHPVASKLLRLMQKKETNLCLSADVSLARELLQLADALGPSICMLKTHVDILNDFTLDVMKELITLAKCHEFLIFEDRKFADIGNTVKKQYEGGIFKIASWADLVNAHVVPGSGVVKGLQEVGLPLHRGCLLIAEMSSTGSLATGDYTRAAVRMAEEHSEFVVGFISGSRVSMKPEFLHLTPGVQLEAGGDNLGQQYNSPQEVIGKRGSDIIIVGRGIISAADRLEAAEMYRKAAWEAYLSRLGV

SEQ ID NO: 874 - DNA, 1118 bp, Homo sapien
gggggactccactgatgtcgtggcgctttaggggaagaagttggtgtttcgctgggccctggtactgaagacgcggtccgggtcgcccctagctgtttcctactcacccaaagccccgcacccgccttttctctctctcctctggcaggatgaggcgtgcaggcctgggtgaaggagtacctcctggcaactatgggaactatggctatgctaatagtgggtatagtgcctgtgaagaagaaaatgagaggctcactgaaagtctgagaagcaaagtaactgctataaaatctctttccattgaaataggccatgaagttaaaacccagaataaattattagctgaaatggattcacaatttgattccacaactggatttctaggtttatgtcccatgtaaggaaacttagtgggagagtaacagaatgcctggagagcctgactctgagctcttgaagtagtcagccagtttgtggtaaaatggtaattgaattttcctaactgcatcaactgtaatgatatactcccttctcctcctttatttagttaaaattgtaggctgatttctttttacctacaatcttcctaataatttttgatgataatgacccctcatttctttctgcccaaagacctcattctttaaataaaacttgttattttggcatatttctggtagggcccattgcacatgtgtatcagtatagttattatttcatattaactttatgaattctcttgacttggcttataatagttttatgatttttactacataggtagcacatttatcatttgtgacagaataatgtgaagttaagtaattactgaactttaaatggaaatagtatgcaagaaactcaggcattgaacttgaagataagagtattattgctttaatccagtgtatttgtttatggaaagaaaaacacaaaggcagactgttgagtaaaaaatattaaatattgttaaatattctgtattttggaatttatccatttataggcttcaaaagtaaatttttaaataaaataaaaaaaaaaaaaaaaaaaaaaaaaaaaaaaaaaaaaaaaaaaaaaaaaaaaaataaaaaaaaaaaaaaaaaaaaaaaacaaaa

SEQ ID NO: 875 - protein, 83 aa, Homo sapien
MRRAGLGEGVPPGNYGNYGYANSGYSACEEENERLTESLRSKVTAIKSLSIEIGHEVKTQNKLLAEMDSQFDSTTGFLGLCPM

SEQ ID NO: 876 - DNA, 1433 bp, Homo sapien
attcggggcgagggaggaggaagaagcggaggaggcggctcccgctcgcagggccgtgcacctgcccgcccgcccgctcgctcgctcgcccgccgcgccgcgctgccgaccgccagcatgctgccgagagtgggctgccccgcgctgccgctgccgccgccgccgctgctgccgctgctgccgctgctgctgctgctactgggcgcgagtggcggcggcggcggggcgcgcgcggaggtgctgttccgctgcccgccctgcacacccgagcgcctggccgcctgcgggcccccgccggttgcgccgcccgccgcggtggccgcagtggccggaggcgcccgcatgccatgcgcggagctcgtccgggagccgggctgcggctgctgctcggtgtgcgcccggctggagggcgaggcgtgcggcgtctacaccccgcgctgcggccaggggctgcgctgctatccccacccgggctccgagctgcccctgcaggcgctggtcatgggcgagggcacttgtgagaagcgccgggacgccgagtatggcgccagcccggagcaggttgcagacaatggcgatgaccactcagaaggaggcctggtggagaaccacgtggacagcaccatgaacatgttgggcgggggaggcagtgctggccggaagcccctcaagtcgggtatgaaggagctggccgtgttccgggagaaggtcactgagcagcaccggcagatgggcaagggtggcaagcatcaccttggcctggaggagcccaagaagctgcgaccaccccctgccaggactccctgccaacaggaactggaccaggtcctggagcggatctccaccatgcgccttccggatgagcggggccctctggagcacctctactccctgcacatccccaactgtgacaagcatggcctgtacaacctcaaacagtgcaagatgtctctgaacgggcagcgtggggagtgctggtgtgtgaaccccaacaccgggaagctgatccagggagcccccaccatccggggggaccccgagtgtcatctcttctacaatgagcagcaggaggcttgcggggtgcacacccagcggatgcagtagaccgcagccagccggtgcctggcgcccctgccccccgcccctctccaaacaccggcagaaaacggagagtgcttgggtggtgggtgctggaggattttccagttctgacacacgtatttatatttggaaagagaccagcaccgagctcggcacctccccggcctctctcttcccagctgcagatgccacacctgctccttcttgctttccccgggggaggaagggggttgtggtcggggagctggggtacaggtttggggagggggaagagaaatttttatttttgaacccctgtgtcccttttgcataagattaaaggaaggaaaagt

SEQ ID NO: 877 - protein, 328 aa, Homo sapien
MLPRVGCPALPLPPPPLLPLLPLLLLLLGASGGGGGARAEVLFRCPPCTPERLAACGPPPVAPPAAVAAVAGGARMPCAELVREPGCGCCSVCARLEGEACGVYTPRCGQGLRCYPHPGSELPLQALVMGEGTCEKRRDAEYGASPEQVADNGDDHSEGGLVENHVDSTMNMLGGGGSAGRKPLKSGMKELAVFREKVTEQHRQMGKGGKHHLGLEEPKKLRPPPARTPCQQELDQVLERISTMRLPDERGPLEHLYSLHIPNCDKHGLYNLKQCKMSLNGQRGECWCVNPNTGKLIQGAPTIRGDPECHLFYNEQQEACGVHTQRMQ

SEQ ID NO: 878 - DNA, 5723 bp, Homo sapien
gcagccgccacattcaacaggcagcagcgcagcgggcgcgccgctggggagagcaagcggcccgcggcgtccgtccgtccttccgtccgcggccctgtcagctggagcgcggcgcaggctctgccccggcccggcggctctggccggccgtccagtccgtgcggcggaccccgaggagcctcgatgtggatggccccgcgaagttaagttctgggctcgcgcttccactccgccgcgccttcctcccagtttccgtccgctcgccgcaccggcttcgttcccccaaatctcggaccgtcccttcgcgccccctccccgtccgcccccagtgctgcgttctccccctcttggctctcctgcggctgggggaggggcgggggtcaccatggccgaggcgcctcaggtggtggagatcgacccggacttcgagccgctgccccggccgcgctcgtgcacctggccgctgcccaggccggagtttagccagtccaactcggccacctccagcccggcgccgtcgggcagcgcggctgccaaccccgacgccgcggcgggcctgccctcggcctcggctgccgctgtcagcgccgacttcatgagcaacctgagcttgctggaggagagcgaggacttcccgcaggcgcccggctccgtggcggcggcggtggcggcggcggccgccgcggccgccaccggggggctgtgcggggacttccagggcccggaggcgggctgcctgcacccagcgccaccgcagcccccgccgcccgggccgctgtcgcagcacccgccggtgccccccgccgccgctgggccgctcgcggggcagccgcgcaagagcagctcgtcccgccgcaacgcgtggggcaacctgtcctacgccgacctcatcaccaaggccatcgagagctcggcggagaagcggctcacgctgtcgcagatctacgagtggatggtcaagagcgtgccctacttcaaggataagggtgacagcaacagctcggcgggctggaagaattcaattcgtcataatctgtccctacacagcaagttcattcgtgtgcagaatgaaggaactggaaaaagttcttggtggatgctcaatccagagggtggcaagagcgggaaatctcctaggagaagagctgcatccatggacaacaacagtaaatttgctaagagccgaagccgagctgccaagaagaaagcatctctccagtctggccaggagggtgctggggacagccctggatcacagttttccaaatggcctgcaagccctggctctcacagcaatgatgactttgataactggagtacatttcgccctcgaactagctcaaatgctagtactattagtgggagactctcacccattatgaccgaacaggatgatcttggagaaggggatgtgcattctatggtgtacccgccatctgccgcaaagatggcctctactttacccagtctgtctgagataagcaatcccgaaaacatggaaaatcttttggataatctcaaccttctctcatcaccaacatcattaactgtttcgacccagtcctcacctggcaccatgatgcagcagacgccgtgctactcgtttgcgccaccaaacaccagtttgaattcacccagcccaaactaccaaaaatatacatatggccaatccagcatgagccctttgccccagatgcctatacaaacacttcaggacaataagtcgagttatggaggtatgagtcagtataactgtgcgcctggactcttgaaggagttgctgacttctgactctcctccccataatgacattatgacaccagttgatcctggggtagcccagcccaacagccgggttctgggccagaacgtcatgatgggccctaattcggtcatgtcaacctatggcagccaggcatctcataacaaaatgatgaatcccagctcccatacccaccctggacatgctcagcagacatctgcagttaacgggcgtcccctgccccacacggtaagcaccatgccccacacctcgggtatgaaccgcctgacccaagtgaagacacctgtacaagtgcctctgccccaccccatgcagatgagtgccctggggggctactcctccgtgagcagctgcaatggctatggcagaatgggccttctccaccaggagaagctcccaagtgacttggatggcatgttcattgagcgcttagactgtgacatggaatccatcattcggaatgacctcatggatggagatacattggattttaactttgacaatgtgttgcccaaccaaagcttcccacacagtgtcaagacaacgacacatagctgggtgtcaggctgagggttagtgagcaggttacacttaaaagtacttcagattgtctgacagcaggaactgagagaagcagtccaaagatgtctttcaccaactcccttttagttttcttggttaaaaaaaaaaacaaaaaaaaaaaccctcctttttttcctttcgtcagacttggcagcaaagacatttttcctgtacaggatgtttgcccaatgtgtgcaggttatgtgctgctgtagataaggactgtgccattggaaatttcattacaatgaagtgccaaactcactacaccatataattgcagaaaagattttcagatcctggtgtgctttcaagttttgtatataagcagtagatacagattgtatttgtgtgtgtttttggtttttctaaatatccaattggtccaaggaaagtttatactctttttgtaatactgtgatgggcctcatgtcttgataagttaaacttttgtttgtactacctgttttctgcggaactgacggatcacaaagaactgaatctccattctgcatctccattgaacagccttggacctgttcacgttgccacagaattcacatgagaaccaagtagcctgttatcaatctgctaaattaatggacttgttaaacttttggaaaaaaaaagattaaatgccagctttgtacaggtcttttctatttttttttgtttattttgttatttgcaaatttgtacaaacatttaaatggttctaatttccagataaatgatttttgatgttattgttgggacttaagaacatttttggaatagatattgaactgtaataatgttttcttaaaactagagtctactttgttacatagtcagcttgtaaattttgtggaaccacaggtatttggggcagcattcataattttcattttgtattctaactggattagtactaattttatacatgcttaactggtttgtacactttgggatgctacttagtgatgtttctgactaatcttaaatcattgtaattagtacttgcatattcaacgtttcaggccctggttgggcaggaaagtgatgtatagttatggacactttgcgtttcttatttaggataacttaatatgtttttatgtatgtattttaaagaaatttcatctgcttctactgaactatgcgtactgcatagcatcaagtcttctctagagacctctgtagtcctgggaggcctcataatgtttgtagatcagaaaagggagatctgcatctaaagcaatggtcctttgtcaaacgagggattttgatccacttcaccattttgagttgagctttagcaaaagtttcccctcataattctttgctcttgtttcagtccaggtggaggttggttttgtagttctgccttgaggaattatgtcaacactcatacttcatctcattctcccttctgccctgcagattagattacttagcacactgtggaagtttaagtggaaggagggaatttaaaaatgggacttgagtggtttgtagaatttgtgttcataagttcagatgggtagcaaatggaatagaacttacttaaaaattggggagatttatttgaaaaccagctgtaagttgtgcattgagattatgttaaaagccttggcttaagaatttgaaaatttctttagcctgtagcaacctaaactgtaattcctatcattatgttttattactttccaattacctgtaactgacagaccaaattaattggctttgtgtcctatttagtccatcagtattttcaagtcatgtggaaagcccaaagtcatcacaatgaagagaacaggtgcacagcactgttcctcttgtgttcttgagaaggatctaatttttctgtatatagcccacatcacacttgctttgtcttgtatgttaattgcatcttcattggcttggtatttcctaaatgtttaacaagaacacaagtgttcctgataagatttcctacagtaagccagctgtattgtaagcttcccaccgtgatgatcatttttttgaagattcattgaacagccaccactctatcatcctcattttggggcagtccaagacatagctggttttagaaacccaagttcctctaagcacagcctcccgggtatgtaactgaacttggtgccaaagtacttgtgtactaatttctattactacgtactgtcactttcctcccgtgccattactgcatcataatacaaggaacctcagagcccccatttgttcattaaagaggcaactacagccaaaatcactgttaaaatcttactacttcatggagtagctcttaggaaaatatatcttcctcctgagtctgggtaattatacctctcccaagcccccattgtgtgttgaaatcctgtcatgaatccttggtagctctctgagaacagtgaagtccagggaaaggcatctggtctgtctggaaagcaaacattatgtggcctctggtagtttttttcctgtaagaatactgactttctggagtaatgagtatatatcagttattgtacatgattgctttgtgaaatgtgcaaatgatatcacctatgcagccttgtttgatttattttctctggtttgtactgttattaaaagcatattgtattatagagctattcagatattttaaatataaagatgtattgtttccgtaatatagacgtatggaatatatttaggtaatagatgtattacttggaaagttctgctttgacaaactgacaaagtctaaatgagcacatgtatcccagtgagcagtaaatcaatggaacatcccaagaagaggataaggatgcttaaaatggaaatcattctccaacgatatacaaattggacttgttcaactgctggatatatgctaccaataaccccagccccaacttaaaattcttacattcaagctcctaagagttcttaatttataactaattttaaaagagaagtttcttttctggttttagtttgggaataatcattcattaaaaaaaatgtattgtggtttatgcgaacagaccaacctggcattacagttggcctctccttgaggtgggcacagcctggcagtgtggccaggggtggccatgtaagtcccatcaggacgtagtcatgcctcctgcatttcgctacccgagtttagtaacagtgcagattccacgttcttgttccgatactctgagaagtgcctgatgttgatgtacttacagacacaagaacaatctttgctataattgtataaagccataaatgtacataaattatgtttaaatggcttggtgtctttcttttctaattatgcagaataagctctttattaggaattttttgtgaagctattaaatacttgagttaa

SEQ ID NO: 879 - protein, 655 aa, Homo sapien
MAEAPQVVEIDPDFEPLPRPRSCTWPLPRPEFSQSNSATSSPAPSGSAAANPDAAAGLPSASAAAVSADFMSNLSLLEESEDFPQAPGSVAAAVAAAAAAAATGGLCGDFQGPEAGCLHPAPPQPPPPGPLSQHPPVPPAAAGPLAGQPRKSSSSRRNAWGNLSYADLITKAIESSAEKRLTLSQIYEWMVKSVPYFKDKGDSNSSAGWKNSIRHNLSLHSKFIRVQNEGTGKSSWWMLNPEGGKSGKSPRRRAASMDNNSKFAKSRSRAAKKKASLQSGQEGAGDSPGSQFSKWPASPGSHSNDDFDNWSTFRPRTSSNASTISGRLSPIMTEQDDLGEGDVHSMVYPPSAAKMASTLPSLSEISNPENMENLLDNLNLLSSPTSLTVSTQSSPGTMMQQTPCYSFAPPNTSLNSPSPNYQKYTYGQSSMSPLPQMPIQTLQDNKSSYGGMSQYNCAPGLLKELLTSDSPPHNDIMTPVDPGVAQPNSRVLGQNVMMGPNSVMSTYGSQASHNKMMNPSSHTHPGHAQQTSAVNGRPLPHTVSTMPHTSGMNRLTQVKTPVQVPLPHPMQMSALGGYSSVSSCNGYGRMGLLHQEKLPSDLDGMFIERLDCDMESIIRNDLMDGDTLDFNFDNVLPNQSFPHSVKTTTHSWVSG

SEQ ID NO: 880 - DNA, 1073 bp, Homo sapien
cggagccagcgtgggaggccgctgccgtcgcgcgccttggtttttctgttccttttttttttttttttttaacttcctgcctatcacacgcagccatcagcccacaaagacatgactaccaacgcgggccccttgcacccatactggcctcagcacctaagactggacaactttgtacctaatgaccgccccacctggcatatactggctggcctcttctctgtcacaggggtcttagtcgtgaccacatggctgttgtcaggtcgtgctgcggttgtcccattggggacttggcggcgactgtccctgtgctggtttgcagtgtgtgggttcattcacctggtgatcgagggctggttcgttctctactacgaagacctgcttggagaccaagccttcttatctcaactctggaaagagtatgccaagggagacagccgatacatcctgggtgacaacttcacagtgtgcatggaaaccatcacagcttgcctgtggggaccactcagcctgtgggtggtgatcgcctttctccgccagcatcccctccgcttcattctacagcttgtggtctctgtgggccagatctatggggatgtgctctacttcctgacagagcaccgcgacggattccagcacggagagctgggccaccctctctacttctggttttactttgtcttcatgaatgccctgtggctggtgctgcctggagtccttgtgcttgatgctgtgaagcacctcactcatgcccagagcacgctggatgccaaggccacaaaagccaagagcaagaagaactgaggagtggtggaccaggctcgaacactggccgaggaggagctctctgcctgccagaagagtctagtcctgctcccacagtttggagggacaaagctaattgatctgtcacactcaggctcatgggcaggcacaagaaggggaataaaggggctgtgtgaaggcactgctgggagccattagaacacagatacaagagaagccaggaggtctatgatggtgacgatttttaaaatcaggaaataaaagatcttgactctaaaaaaaaaaaa

SEQ ID NO: 881 - protein, 230 aa, Homo sapien [sequence omitted]

SEQ ID NO: 882 - DNA, 1594 bp, Homo sapien
aacaggatctcctcttgcagtctgcagcccaggacgctgattccagcagcgccttaccgcgcagcccgaagattcactatggtgaaaatcgccttcaatacccctaccgccgtgcaaaaggaggaggcgcggcaagacgtggaggccctcctgagccgcacggtcagaactcagatactgaccggcaaggagctccgagttgccacccaggaaaaagagggctcctctgggagatgtatgcttactctcttaggcctttcattcatcttggcaggacttattgttggtggagcctgcatttacaagtacttcatgcccaagagcaccatttaccgtggagagatgtgcttttttgattctgaggatcctgcaaattcccttcgtggaggagagcctaacttcctgcctgtgactgaggaggctgacattcgtgaggatgacaacattgcaatcattgatgtgcctgtccccagtttctctgatagtgaccctgcagcaattattcatgactttgaaaagggaatgactgcttacctggacttgttgctggggaactgctatctgatgcccctcaatacttctattgttatgcctccaaaaaatctggtagagctctttggcaaactggcgagtggcagatatctgcctcaaacttatgtggttcgagaagacctagttgctgtggaggaaattcgtgatgttagtaaccttggcatctttatttaccaactttgcaataacagaaagtccttccgccttcgtcgcagagacctcttgctgggtttcaacaaacgtgccattgataaatgctggaagattagacacttccccaacgaatttattgttgagaccaagatctgtcaagagtaagaggcaacagatagagtgtccttggtaataagaagtcagagatttacaatatgactttaacattaaggtttatgggatactcaagatatttactcatgcatttactctattgcttatgctttaaaaaaaggaaaaaaaaaaaaactactaaccactgcaagctcttgtcaaattttagtttaattggcattgcttgttttttgaaactgaaattacatgagtttcattttttctttgcatttatagggtttagatttctgaaagcagcatgaatatatcacctaacatcctgacaataaattccatccgttgttttttttgtttgtttgttttttcttttcctttaagtaagctctttattcatcttatggtggagcaattttaaaatttgaaatattttaaattgtttttgaactttttgtgtaaaatatatcagatctcaacattgttggtttcttttgtttttcattttgtacaactttcttgaatttagaaattacatctttgcagttctgttaggtgctctgtaattaacctgacttatatgtgaacaattttcatgagacagtcatttttaactaatgcagtgattctttctcactactatctgtattgtggaatgcacaaaattgtgtaggtgctgaatgctgtaaggagtttaggttgtatgaattctacaaccctataataaattttactctatacaaaaaaaaaaaaaaaaaaa

SEQ ID NO: 883 - protein, 263 aa, Homo sapien
MVKIAFNTPTAVQKEEARQDVEALLSRTVRTQILTGKELRVATQEKEGSSGRCMLTLLGLSFILAGLIVGGACIYKYFMPKSTIYRGEMCFFDSEDPANSLRGGEPNFLPVTEEADIREDDNIAIIDVPVPSFSDSDPAAIIHDFEKGMTAYLDLLLGNCYLMPLNTSIVMPPKNLVELFGKLASGRYLPQTYVVREDLVAVEEIRDVSNLGIFIYQLCNNRKSFRLRRRDLLLGFNKRAIDKCWKIRHFPNEFIVETKICQE

SEQ ID NO: 884 - DNA, 1082 bp, Homo sapien
gatcccagacctcggcttgcagtagtgttagactgaagataaagtaagtgctgtttgggctaacaggatctcctcttgcagtctgcagcccaggacgctgattccagcagcgccttaccgcgcagcccgaagattcactatggtgaaaatcgccttcaatacccctaccgccgtgcaaaaggaggaggcgcggcaagacgtggaggccctcctgagccgcacggtcagaactcagatactgaccggcaaggagctccgagttgccacccaggaaaaagagggctcctctgggagatgtatgcttactctcttaggcctttcattcatcttggcaggacttattgttggtggagcctgcatttacaagtacttcatgcccaagagcaccatttaccgtggagagatgtgcttttttgattctgaggatcctgcaaattcccttcgtggaggagagcctaacttcctgcctgtgactgaggaggctgacattcgtgaggatgacaacattgcaatcattgatgtgcctgtccccagtttctctgatagtgaccctgcagcaattattcatgactttgaaaagggaatgactgcttacctggacttgttgctggggaactgctatctgatgcccctcaatacttctattgttatgcctccaaaaaatctggtagagctctttggcaaactggcgagtggcagatatctgcctcaaacttatgtggttcgagaagacctagttgctgtggaggaaattcgtgatgttagtaaccttggcatctttatttaccaactttgcaataacagaaagtccttccgccttcgtcgcagagacctcttgctgggtttcaacaaacgtgccattgataaatgctggaagattagacacttccccaacgaatttattgttgagaccaagatctgtcaagagtaagaggcaacagatagagtgtccttggtaataagaagtcagagatttacaatatgactttaacattaaggtttatgggatactcaagatatttactcatgcatttactctattgcttatgccgtaaaaaaaaaaaaaaaaaaaaaaaaaaaaa

SEQ ID NO: 885 - protein, 263 aa, Homo sapien; identical to SEQ ID NO: 883

SEQ ID NO: 886 - DNA, 2107 bp, Homo sapien
agtaaaagtccacagttaccgtgagagaaaaaaagaggagaaagcagtgcagccaaactcggaagaaaagagaggaggaaaaggactcgactttcacattggaacaaccttctttccagtgctaaggctctctgatctggggaacaacacctggacatggctccagagatcaacttgccgggcccaatgagcctcattgataacactaaagggcagctggtggtgaatccagaagctctgaagatcctatctgcaattacgcagcctgtggtggtggtggcgattgtgggcctctatcgcacaggcaaatcctacctgatgaacaagctggctgggaagaaaaacggcttctctctaggctccacagtgaagtctcacaccaagggaatctggatgtggtgtgtgcctcatcccaagaagccagaacacaccctagttctgctcgacactgagggcctgggagatatagagaagggtgacaatgagaatgactcctggatctttgccttggccatcctcctgagcagcaccttcgtgtacaatagcatgggaaccatcaaccagcaggccatggaccaacttcactatgtgacagagctgacagatcgaatcaaggcaaactcctcacctggtaacaattctgtagacgactcagctgactttgtgagcttttttccagcatttgtgtggactctcagagatttcaccctggaactggaagtagatggagaacccatcactgctgatgactacttggagctttcgctaaagctaagaaaaggtactgataagaaaagtaaaagctttaatgatcctcggttgtgcatccgaaagttcttccccaagaggaagtgcttcgtcttcgattggcccgctcctaagaagtaccttgctcacctagagcagctaaaggaggaagagctgaaccctgatttcatagaacaagttgcagaattttgttcctacatcctcagccattccaatgtcaagactctttcaggtggcattgcagtcaatgggcctcgtctagagagcctggtgctgacctacgtcaatgccatcagcagtggggatctaccctgcatggagaacgcagtcctggccttggcccagatagagaactcagccgcagtggaaaaggctattgcccactatgaacagcagatgggccagaaggtgcagctgcccacggaaaccctccaggagctgctggacctgcacagggacagtgagagagaggccattgaagtcttcatgaagaactctttcaaggatgtggaccaaatgttccagaggaaattaggggcccagttggaagcaaggcgagatgacttttgtaagcagaattccaaagcatcatcagattgttgcatggctttacttcaggatatatttggccctttagaagaagatgtcaagcagggaacattttctaaaccaggaggttaccgtctctttactcagaagctgcaggagctgaagaataagtactaccaggtgccaaggaaggggatacaggccaaagaggtgctgaaaaaatatttggagtccaaggaggatgtggctgatgcacttctacagactgatcagtcactctcagaaaaggaaaaagcgattgaagtggaacgtataaaggctgaatctgcagaagctgcaaagaaaatgttggaggaaatacaaaagaagaatgaggagatgatggaacagaaagagaagagttatcaggaacatgtgaaacaattgactgagaagatggagagggacagggcccagttaatggcagagcaagagaagaccctcgctcttaaacttcaggaacaggaacgccttctcaaggagggattcgagaatgagagcaagagacttcaaaaagacatatgggatatccagatgagaagcaaatcattggagccaatatgtaacatactctaaaagtccaaggagcaaaatttgcctgtccagctccctctccccaagaaacaacatgaatgagcaacttcagagtgtcaaacaactgccattaaacttaactcaaaatcatgatgcatgcatttttgttgaaccataaagtttgcaaagtaaaggttaagtatgaggtcaatgtttt

SEQ ID NO: 887 - protein, 591 aa, Homo sapien
MAPEINLPGPMSLIDNTKGQLVVNPEALKILSAITQPVVVVAIVGLYRTGKSYLMNKLAGKKNGFSLGSTVKSHTKGIWMWCVPHPKKPEHTLVLLDTEGLGDIEKGDNENDSWIFALAILLSSTFVYNSMGTINQQAMDQLHYVTELTDRIKANSSPGNNSVDDSADFVSFFPAFVWTLRDFTLELEVDGEPITADDYLELSLKLRKGTDKKSKSFNDPRLCIRKFFPKRKCFVFDWPAPKKYLAHLEQLKEEELNPDFIEQVAEFCSYILSHSNVKTLSGGIAVNGPRLESLVLTYVNAISSGDLPCMENAVLALAQIENSAAVEKAIAHYEQQMGQKVQLPTETLQELLDLHRDSEREAIEVFMKNSFKDVDQMFQRKLGAQLEARRDDFCKQNSKASSDCCMALLQDIFGPLEEDVKQGTFSKPGGYRLFTQKLQELKNKYYQVPRKGIQAKEVLKKYLESKEDVADALLQTDQSLSEKEKAIEVERIKAESAEAAKKMLEEIQKKNEEMMEQKEKSYQEHVKQLTEKMERDRAQLMAEQEKTLALKLQEQERLLKEGFENESKRLQKDIWDIQMRSKSLEPICNIL

SEQ ID NO: 888 - DNA, 1360 bp, Homo sapien
gagctgccgtagcggacccagcacagccaggagcgtccgggatgagctcagccgcggccgaccactgggcgtggttgctggtgctcagcttcgtgtttggatgcaatgttcttaggatcctcctcccgtccttctcatccttcatgtccagggtgctgcagaaggacgcggagcaggagtcacagatgagagcggagatccaggacatgaagcaggagctctccacagtcaacatgatggacgagtttgccagatatgccaggctggaaagaaagatcaacaagatgacggataagctcaaaacccatgtgaaagctcggacagctcaattagccaagataaaatgggtgataagtgtcgctttctacgtattgcaggctgccctgatgatctcactcatttggaagtattattctgtccctgtggctgtcgtgccgagtaaatggataacccctctagaccgcctggtagcctttcctactagagtagcaggtggtgttggaattacctgttggattttagtctgtaacaaagttgtcgctattgtgcttcatccgttcagctgaacaggaggatggatacagccgcgaggctaaaaaacggatttcctcttcctagcttaaaatctgatttacactgttttgttttttaagaaacaaaagtgcatagtttagattttttttttgttgaatatgtttgttcttggactttatgagatagtcttataagaatcacgattttctacacctgtcattgagccaagaaagtccagtttatgacacgtatgtactagtgaacaccgtcctcgatctgtacgaaatgtgaaatgtttagggacatctccatgctgtcacttgtgatttgccctcttatgtattttggtcatattgccaactggaaagtcaaaattttctaacaactttaagtaagttctttgaagacttagtgctgtttttaatccagtttagaaagtaacttaattttaataccgctactaaaaattcgaaaatttcttctttaatcacattcaatatggttaaaagaacaacactaattgacattgcgtgggctttttctccctttgtttaaaatgtcatttgttgagcaagagttgtatagtattatctacttacttgaggctgttaatttttcattacagtgttttgtaaatgtatccacgagaccatgatgcattgttttgtgctcaacttgtgttttgtatttaaagcattttgaatgaagtgtattttataagcatttaatatttatgctctttagaatggaacacagaaaacaaaccttataagtcctgattaaattaatctgaaccaaaaaaaaaaaaaaaaaaaaaaaaaaaaaa

SEQ ID NO: 889 - protein, 174 aa, Homo sapien
MSSAAADHWAWLLVLSFVFGCNVLRILLPSFSSFMSRVLQKDAEQESQMRAEIQDMKQELSTVNMMDEFARYARLERKINKMTDKLKTHVKARTAQLAKIKWVISVAFYVLQAALMISLIWKYYSVPVAVVPSKWITPLDRLVAFPTRVAGGVGITCWILVCNKVVAIVLHPFS

SEQ ID NO: 890 - DNA, 7522 bp, Homo sapien
cccgggcgagcccgccgtgcgcacagctctgcccgccgcccctggagcggatccccagccgtccctgggcgttctcccgggttctagcaaagccccccggggtgcccatcagtttccttgggtgactacagcgtgtgttttttctttcctctttcccctgcctgtgtgcccttctccaggatggcagaggcggaattgcacaaggaaaggctgcaagccatagcagaaaaaagaaagaggcagactgaaatagaaggcaagcgacaacagcttgacgagcagatacttctgctgcagcattccaagtccaaagtgcttcgggagaaatggctgctgcagggcatacccgctggaactgccgaagaggaggaagccaggaggcggcagtctgaagaggatgagttcagagtcaagcaacttgaagataacattcagaggctggagcaagaaatacaaacgctagaaagtgaagagtcccagatatctgccaaagagcaaatcatcctagagaaactgaaggaaacagaaaaatccttcaaggactttcagaagggtttctccagtacggatggagatgcagtaaattacatttcctcccagcttcccgacctgccaatcctctgttcacgaacagcagaaccatcacctgggcaggacgggaccagcagagcggctggagtcgggtgggagaatgtgctgctaaaggaaggtgagtcagcctcgaacgccacagaaacatccggcccagacatgactatcaagaagcctccccagctttctgaggatgatatctggctaaaaagcgagggagacaactatagtgccaccctcctggagcctgctgccagctctctttccccagatcacaaaaacatggaaattgaggtgtctgttgcagaatgtaaaagtgttcctggaatcacctctaccccacatcccatggaccatccctccgctttctattcacccccgcataatggcctccttactgatcaccacgaatccctggataatgatgttgccagagagatccgctatctagatgaggtgctagaggccaactgctgtgattctgctgtggatggaacgtacaatggaacatcctccccagagcctggtgcagtggttctggtgggcggcctaagcccccctgtccacgaggcgacccagccagaacccactgaaagaacagctagccggcaggcacctcctcacatcgagctcagtaatagcagccctgaccccatggcagaggcagaaagaacaaatggccattcccccagccagcctagagatgcgctgggggacagcctgcaggtgcctgtcagccccagctccacaaccagctcacggtgttcttcccgagatggagagttcactctcaccacactgaaaaaggaggccaagtttgagctgcgtgccttccatgaggacaagaagccctccaagctctttgaggatgacgagcatgagaaagaacaatactgcattagaaaagtgaggccttcagaggagatgctggagctggaaaaggagaggagagagctcatccgcagccaggccgtcaagaagaatcctggcattgcagcaaaatggtggaatcccccgcaggaaaaaaccatcgaggagcagctggacgaggaacatctggagtcgcacaaaaagtacaaggagcgcaaagagagaagggcacagcaggaacagttgctgctgcagaagcagttacagcagcagcagcagcagcccccatcgcagctctgcacagcccctgcctcttctcatgaacgcgcaagcatgattgacaaagcaaaggaggacattgtcacagagcagatagatttctctgctgctcgcaaacaatttcagctgatggagaattccaggcaagcggtggccaagggccagagtacacccaggctgttctccatcaagcctttctacaggcctctggggtcagtcaactcagacaagccactgactaatccgagaccaccttctgtcgggggacctccagaagacagtggtgcctcagccgccaagggacagaaatcccccggtgccctggagaccccatcggcagcaggaagccagggcaacacagcctctcaggggaaggaagggccctacagcgagccttctaaacgtgggcccttatctaaactgtgggctgaggatggagaatttacgagcgcccgggctgtcctcactgtggtcaaggatgatgaccatgggattttggatcagttctcaagatctgtcaatgtctccttgacccaagaggagcttgactctggtctggacgaattgtcggtgaggtctcaggataccacagtcctggagaccctatccaatgatttcagcatggacaacatcagtgacagcggggcatccaatgagacaaccaatgccctccaggaaaattcactggctgatttttctctgccccagacaccacaaactgacaacccctcagagggccgaggagaaggcgtctccaagtcatttagtgatcatggtttctattccccttcctccacgctgggggactctccgttggttgatgaccccttggagtatcaggctggcctcctggtgcagaatgccattcaacaagccatagccgagcaggtggataaagctgtgtccaaaaccagcagggatggagcagagcaacagggacctgaagcgactgtagaggaagctgaagctgcggctttcggctcagaaaagcctcagagcatgtttgagccacctcaggtgtcttctcctgttcaagagaaaagggatgtattaccaaagattctgcctgctgaagacagggcgctcagggaaagggggcccccccagccactgccagctgtgcagcccagtggcccgattaacatggaggagaccaggcccgaaggaagctatttcagcaagtactcggaggcagctgagctgagaagcacagcctccctcctggccactcaagaatctgacgtgatggttgggcctttcaagctgaggtccaggaaacagcggactttgtccatgattgaggaagagatccgagcagctcaggaaagggaagaggagctgaagaggcagagacaagtcttgcagagtacgcagagccccaggacaaagaatgccccatcactgccctccagaacatgctacaaaactgctccagggaaaatagagaaagtcaaacctcctccatcccccaccactgaaggccccagcttgcagcctgacttagcccctgaagaggctgccggaacccagcggcccaagaatctgatgcagaccctcatggaagactatgagacacacaaatctaaaaggcgcgagagaatggatgatagtagttacacttctaagttactgtcttgcaaggtgacttccgaggtcctcgaggccacacgggttaatcgaagaaagagcgcactggctttgcgctgggaagcagggatctatgccaaccaggaggaagaagacaacgaataaacttccttcaacccaggaagcgtctttggtgcttgggagaccaagaaaccaagaaattaacaactgaaagcattttaatggactatttattaaagtgcaaacaaactcagcaatccttatgtagaccagaagctgcaatatacaatgatgaaaatgaaacgaaaaggaagtccccccatcagactctggacacccaggaatcaaaagagaaaggacttttttggtgactcaatcccagtgtctggtttggggccaatctacaatggatccaaaaggacaaaacatgttacaagcaaatcaacatagttgctgcaggcggaactgagaccagcctctctgggcgatgaaggacaatggtggtagggccacttagagagcagtagggcccaggctggtgcagcctacatggcacaggatatttccctgcaccagtttcccacctgtcacttgcagcatcagagggtgttgcattaactccattttctccagcagccataaaatgaatggcgtttctctccatatttgcccagaagaggcagttatgattccacttctcctacatttaattatttttaattgagaacaactcatgatcacaattcataaaatccatattttaagacaatagttcttcatgtcacaaacacaatctattctacatgaggaggctgagaaaggggaagagaaaaacaaaccaaatggatgatgttagctttaggatcgtgtctgcttataatattcactgatctgcagtttatgagaacacattttcacagttatgtttcttcataggaaaactatatttagtgggcaacaactatttttatgatgggatgggggagtatatacacgtatagaatctgtacgcgttgaacaacttggttcaagatggtgggggcatttttagagcggcaataattgaaaaaaaaggcgaactctgccttggagaggtagatgataagaaataaaaaggtgtttataactattttgtattataaagtgggccttagagataggaagaagaatgatggattccttttggatcaatcagaaaggaaacacgaaagaaaagtcaggaaggtagagagagaaaaagggagggaaggagaaagaatgggaataaaataaggaggtaagagatactatttttgctgagcaaccagtgtgtttcaggatgatacaaagaaaaatatagaatagaaataagtgcaggcttggaatcagctacaaatcctaaagatggggtgtgtgtggatgtgtgtgtgtgtgtgtgtacaccattgtgtgtttgtaaaatgtgtatgttcatgagtaagggtgtgtgtgtgtgtgtattaaaattccagagtgaccgtggcacttgggtgtacaggtaattcctccagagctgtttgctggcttcaggagtggagtgagaatttcttttttatgaaaagggatataaaggcaccgagctgatgcagtatttgtaatattaagttgacctaacaaggtatttgcatgagtcacaattacaaagttttgagcggttttgtaatttgacatttaggagagtctcctatttattctcatactttacattcatgcttagtatactatagaggatgccagctttaatctttctgtcatttaaagcaatatgataagggtattcaataattgggtgccctaaatttctggatgagaaaattttcaattctggccatgagaaagaaaaaaaaataaacagccttctttttttttcctttgttttaaaactgtggttttttaaaaaagcaataattaactcagacctcactaaaaatcatttttgtttttatattgttatgtcataagctctattatgttattctaacaagtagcaatttcacaaaatttgtatgtagatgttaacgcacatttcctttgcttcttttattagactagtgttgactttggggggggacatttattcacaaatgagaagtaggcacaaagtaaaaaatggaaccatctactaacaaggatcctttaaaactgccaagggagctctaacttgaagccacatcctacagatggcagcccaaatagcacatgggcaattggcaccatctttatatggttgagtctcctgaatattttgaatgaattctcaacaaaatgtgctagccactggggacgcaaaacaagtaagatccctgttgcaagaaattcattttatagtgagggaggttggcatggagactaaaattctcaggaaaatgagatccgtgttagattagaagtcctgatgtgaaatgggaggactcaggaaggaggatcgtctttacctgaggatttctagccagaggtcccagatgcctgggctgagaacccagcgataagggggcgttcccaaagcagacacagggataagaacagaggaggcagcagcattgcacagccccaggcacagtggcagttaggatggctggagagtaggatagttctatgggttgcccaaaaaatgtgatgcgcttcatgttttctctgactcatggatctggtagagaccatagacatgatatagactaacttccccatttttcacaagaggaaaccatccttatgacttaccttaaagttttttgttctgttttgaaggaaaccatgtgcttcatgaaacctacagttgacaagagaatgtacagctaagagaaaagcttaagaggccacactattcgcggaatggctttagaggcagatgaagtggtctttgaccacagttgattgaaccagagcacttattgcttaaagaataacagagttctagagctgggggttcttgggccatgctccgtgtgtggataaggaaagaaatactgtttctgggactctcccacagtcacaaagctgttttcactgtggcccctacatctcttaacttttgctattactcctatgctgccttccggattactgctgtctatcttcttgctccactcactgaagatcctattataatcccatgaaaatgtaaattacagtttacttgggagagccagattttctctgtgctcttgagttttttattcattcaagaaaccttgggccaccgctttgtacatagcaccgtgctaggctctgggatcccaaatggacccttttaactttctgaagatgggaccgtcccctggaggaaagtcattcctgcctaatccatcgagagaaagaggcttacgaaaaactttgcctctgatgctcagccccacccccaaatagcacacaagcttgttaaccccacctcttacaaaatgtttagattctgtaggtgttaaaagcctttctggaagtattgcattctgccgtgtttataggtgttcactttcctccagagctgattaactactgacatgacttggctttctcatccagaaattatggaaacagggtctgtcagtggcaggaggccgtgctgtgttttacttggatgacacaatgcagtttacttgcctcttcatacccatgcatgctgctcaccctagacaatgacatataagccgtatatagatcaatgtccacatatatatacacacacacatatatatatataaagtgtaacaaggaacactaaaacagtgttgattcttgtctctgaagacaaataattaaaccttttttttcccaactaaagaatggatttaattaaactatgtattgaaaaaaaagtagcctaagtgttagagatggtgaatatattccattttagttaaagaacaaatttcctgaattttaagcattcagtgagctgccaattttgattttgtgttgctctttacccaaattattttttctttgtttttctttttttgggggaggaggggaaaaaagcagcaatactgtgtttggaaattatactctgtatctggttttcctgtgtatgttaaccacttaaatgttattatcctgctttggttttagagtgattgtgaggcattcaatgcaagtatacagttattttctcattaaaatccaatgtgtgttgagtttttataaaaaaaaaaaaaaaaaa

SEQ ID NO: 891 - protein, 1103 aa, Homo sapien
MAEAELHKERLQAIAEKRKRQTEIEGKRQQLDEQILLLQHSKSKVLREKWLLQGIPAGTAEEEEARRRQSEEDEFRVKQLEDNIQRLEQEIQTLESEESQISAKEQIILEKLKETEKSFKDFQKGFSSTDGDAVNYISSQLPDLPILCSRTAEPSPGQDGTSRAAGVGWENVLLKEGESASNATETSGPDMTIKKPPQLSEDDIWLKSEGDNYSATLLEPAASSLSPDHKNMEIEVSVAECKSVPGITSTPHPMDHPSAFYSPPHNGLLTDHHESLDNDVAREIRYLDEVLEANCCDSAVDGTYNGTSSPEPGAVVLVGGLSPPVHEATQPEPTERTASRQAPPHIELSNSSPDPMAEAERTNGHSPSQPRDALGDSLQVPVSPSSTTSSRCSSRDGEFTLTTLKKEAKFELRAFHEDKKPSKLFEDDEHEKEQYCIRKVRPSEEMLELEKERRELIRSQAVKKNPGIAAKWWNPPQEKTIEEQLDEEHLESHKKYKERKERRAQQEQLLLQKQLQQQQQQPPSQLCTAPASSHERASMIDKAKEDIVTEQIDFSAARKQFQLMENSRQAVAKGQSTPRLFSIKPFYRPLGSVNSDKPLTNPRPPSVGGPPEDSGASAAKGQKSPGALETPSAAGSQGNTASQGKEGPYSEPSKRGPLSKLWAEDGEFTSARAVLTVVKDDDHGILDQFSRSVNVSLTQEELDSGLDELSVRSQDTTVLETLSNDFSMDNISDSGASNETTNALQENSLADFSLPQTPQTDNPSEGRGEGVSKSFSDHGFYSPSSTLGDSPLVDDPLEYQAGLLVQNAIQQAIAEQVDKAVSKTSRDGAEQQGPEATVEEAEAAAFGSEKPQSMFEPPQVSSPVQEKRDVLPKILPAEDRALRERGPPQPLPAVQPSGPINMEETRPEGSYFSKYSEAAELRSTASLLATQESDVMVGPFKLRSRKQRTLSMIEEEIRAAQEREEELKRQRQVLQSTQSPRTKNAPSLPSRTCYKTAPGKIEKVKPPPSPTTEGPSLQPDLAPEEAAGTQRPKNLMQTLMEDYETHKSKRRERMDDSSYTSKLLSCKVTSEVLEATRVNRRKSALALRWEAGIYANQEEEDNE

SEQ ID NO: 892 - DNA, 2646 bp, Homo sapien
agtgcagacgcggctcctagcggatgggtgctattgtgaggcggttgtagaagagtttcgtgagtgctcgcagctcatacctgtggctgtgtatccgtggccacagctggttggcgtcgccttgaaatcccaggccgtgaggagttagcgagccctgctcacactcggcgctctggttttcggtgggtgtgccctgcacctgcctcttcccccattctcattaataaaggtatccatggagaacactgaaaactcagtggattcaaaatccattaaaaatttggaaccaaagatcatacatggaagcgaatcaatggactctggaatatccctggacaacagttataaaatggattatcctgagatgggtttatgtataataattaataataagaattttcataaaagcactggaatgacatctcggtctggtacagatgtcgatgcagcaaacctcagggaaacattcagaaacttgaaatatgaagtcaggaataaaaatgatcttacacgtgaagaaattgtggaattgatgcgtgatgtttctaaagaagatcacagcaaaaggagcagttttgtttgtgtgcttctgagccatggtgaagaaggaataatttttggaacaaatggacctgttgacctgaaaaaaataacaaactttttcagaggggatcgttgtagaagtctaactggaaaacccaaacttttcattattcaggcctgccgtggtacagaactggactgtggcattgagacagacagtggtgttgatgatgacatggcgtgtcataaaataccagtggaggccgacttcttgtatgcatactccacagcacctggttattattcttggcgaaattcaaaggatggctcctggttcatccagtcgctttgtgccatgctgaaacagtatgccgacaagcttgaatttatgcacattcttacccgggttaaccgaaaggtggcaacagaatttgagtccttttcctttgacgctacttttcatgcaaagaaacagattccatgtattgtttccatgctcacaaaagaactctatttttatcactaaagaaatggttggttggtggttttttttagtttgtatgccaagtgagaagatggtatatttggtactgtatttccctctcattttgacctactctcatgctgcagagggtactttaagacatactccttccatcaaatagaaccactatgaagctacctcaaacttccagtcaggtagttgcaattgaattaaattaggaataaataaaaatggatactggtgcagtcattatgagaggcaatgattgttaatttacagctttcatgattagcaagttacagtgatgctgtgctatgaattttcaagtaattgtgaaaaagttaaacattgaagtaatgaatttttatgatattccccccacttaagactgtgtattctagttttgtcaaactgtagaaatgatgatgtggaagaacttaggcatctgtgggcatggtcaaaggctcaaacctttattttagaattgatatacacggatgacttaactgcattttagaccatttatctgggattatggttttgtgatgtttgtcctgaacacttttgttgtaaaaaaataataataataatgtttaatattgagaaagaaactaatattttatgtgagagaaagtgtgagcaaactaacttgacttttaaggctaaaacttaacattcatagaggggtggagttttaactgtaaggtgctacaatgcccctggatctaccagcataaatatcttctgatttgtccctatgcatatcagttgagcttcatataccagcaatatatctgaagagctattatataaaaaccccaaactgttgattattagccaggtaatgtgaataaattctataggaacatatgaaaatacaacttaaataataaacagtggaatataaggaaagcaataaatgaatgggctgagctgcctgtaacttgagagtagatggtttgagcctgagcagagacatgactcagcctgttccatgaaggcagagccatggaccacgcaggaagggcctacagcccatttctccatacgcactggtatgtgtggatgatgctgccagggcgccatcgccaagtaagaaagtgaagcaaatcagaaacttgtgaagtggaaatgttctaaaggtggtgaggcaataaaaatcatagtactctttgtagcaaaattcttaagtatgttattttctgttgaagtttacaatcaaaggaaaatagtaatgttttatactgtttactgaaagaaaaagacctatgagcacataggactctagacggcatccagccggaggccagagctgagcactcagcccgggaggcaggctccaggcctcagcaggtgcggagccgtcactgcaccaagtctcactggctgtcagtatgacatttcacgggagatttcttgttgctcaaaaaatgagctcgcatttgtcaatgacagtttcttttttcttactagacctgtaacttttgtaaatacacacagcatgtaatggtatcttaaagtgtgtttctatgtgacaattttgtacaaatttgttattttccatttttatttcaaaatatacattcaaacttaaaatt

SEQ ID NO: 893 - protein, 277 aa, Homo sapien
MENTENSVDSKSIKNLEPKIIHGSESMDSGISLDNSYKMDYPEMGLCIIINNKNFHKSTGMTSRSGTDVDAANLRETFRNLKYEVRNKNDLTREEIVELMRDVSKEDHSKRSSFVCVLLSHGEEGIIFGTNGPVDLKKITNFFRGDRCRSLTGKPKLFIIQACRGTELDCGIETDSGVDDDMACHKIPVEADFLYAYSTAPGYYSWRNSKDGSWFIQSLCAMLKQYADKLEFMHILTRVNRKVATEFESFSFDATFHAKKQIPCIVSMLTKELYFYH

SEQ ID NO: 894 - DNA, 5398 bp, Homo sapien
cgtgcggcggtgggctggtcttccgcggccggcgttgcgccgcggcggagggtgggcgcgcggggagcgggatggagctggggcgacccttgctggaggtactggcctcagccctttctcccgcttccccacccctcttacccccagattacattctctgtgtggtgtctttactgcagatgaaggatttgggggcagagcacttggcaggtcatgaaggggtccaacttctcgggttgttgaacgtctacctggaacaagaagagagattccaacctcgagaaaaagggctgagtttgattgaggctaccccggagaatgataacactttgtgtccaggattgagaaatgccaaagttgaagatttaaggagtttagccaacttttttggatcttgcactgaaacttttgtcctggctgtcaatattttggacaggttcttggctcttatgaaggtgaaacctaaacatttgtcttgcattggagtctgttcttttttgctggctgctagaatagttgaagaagactgcaatattccatccactcatgatgtgatccggattagtcagtgtaaatgtactgcttctgacataaaacggatggaaaaaataatttcagaaaaattgcactatgaattggaagctactactgccttaaactttttgcacttataccatactattatactttgtcatacttcagaaaggaaagaaatactgagccttgataaactagaagctcagctgaaagcttgcaactgccgactcatcttttcaaaagcaaaaccatctgtattagccttgtgccttctcaatttggaagtggaaactttgaaatctgttgaattactggaaattctcttgctagttaaaaaacattccaagattaatgacactgagttcttctactggagagagttggtttctaaatgcctagccgagtattcttctcctgaatgttgcaaaccagatcttaagaagttggtttggatcgtttcaaggcgcacagcccagaacctccacaacagctactatagtgttcctgagctgccaacgatacctgaggggggttgttttgatgaaagtgaaagtgaggactcttgtgaagatatgagttgtggagaggagagtctcagcagctctcctcccagtgatcaagagtgcaccttctttttcaacttcaaagtggcacaaacactgtgctttccatcttagaaatctgattgttctgtcagaatttatatttacaggtttcaaagcaataaatgggggaataggtagtttcctggtttagcccccatctagtcaggaattaatatactggaatacctaccttctatttgttattcagatcagatctggcctattttcatatttatcctaagccatcaaatggggtagtgcctcttaaaccattaacagtactttagacattggcactttatttttctcgtagatctttagctactttggggaggagggaaggtgctgataccttcaatttgttacttttcaagatttttaaaaataactagtgtagcttatcttaaacattttataaaaccttcagatgtctttaagcagattggaagtatgcaagtgcttccttagcagggacagtggataatccttaatggtttatcatagatttcaccctccccccttctcagaagagtgagtatgctcttaaatgtcaaacacatttttgttgttttgttttttaaatgatcagtgtctatttgatgtgatgcagatcttataaatttgggaattataatattgacatttctgtgatttttatatatgtaatgtcttaattgagatttctgttaaggcagaaataattaggctagggctcttagttttcattcctattgcccaagtattgtcaaactatggtattattttaatgttactttaaaaatccataatctgctagttttgcatgtacttatatgaaaacagtgcagtaagttgaaaactcagtatctatggaattgataaatgttgatctggtgtagtatattttatcgcattttcttatattaaaaaatgtctgcatgattacattttatttcctttgtaatttacatttcagaatagtgtattgctatatgggtgccaagattgaatatgaagaacccgagtgtttgtagtattatagttttaagcaaatctgtgtggtgatacagccataagaatggggcttatataaactctgtacatgtaagattttgtacagagaatttttaactttataaattgtatatgaacatgtaaatcttttaaaatgtacataaaatactgtatttttttaccttgtgtgtgatagtctagtcattgcatgtaaatataatttattatgtattctgtagtataaatcatacattgatgacttacatttttactggtaagtcaacatccgttggatgttttctgaagtggctctttttgaagtgataatagattgtaattcaaaataaaattattaatgaattctccttgtttgggatcacatcttaatttttaatctgttaaaagttcttgatgtattttaatgagaagactttaggtgaggctacagtgattccagagtgagccttctaactggctagcagaagttctctaggtttggcatctgtgccttggagatactgaaagagaatctgtcatttgacaattgacctctttgtgggatggactcattaagtatgctctcagagactggtatattaccagaatgcctattaattttcagtgagaggcaacaggtattaagtagaacagaatgctcaggttggcagattagaacgatctttcaggagacaaagcaagttttaatcagttgtttggttaataagtatggggtgttcgctgtgatagggccccgccagcttctggctcttgtggacctcaaaagtatcaggtggttttgcaagtggtggtcctttcccctgccccaccccaataggttccccatctgtctagtttgatttttgtagacctttgttttctctagttagaaaatcaggtacactgaatatggttttcatgtaacacctcttctctggagataggggtatgttttcctacccttctagtggagaatcctacttgaggatgacctttcctctcttactaaataatattagtaaatagtgggcaatatattctgctttcagattttgatttgttgagatgtaaaagttgtttggggcttaccaaatctcaagactctctttagctcctgcaggattgtattgcttttcttactggatatttttcctgggtaagcatctttgtggcttcatctcttccccctgtggttttcagtgtatttagtcgagacctctctgctgagcttgcaacctgtttattcacatggcctgccatgccacttggaggtttctgattactcccaaacctgctggttctttatgtctttctcagcgaataattccatctgttcatgttggaaacttaggtgatatgctcatctccttttgcctgtttatggaggtcaccagcctctatcatttgtatgatttcgtttacactgtttatatctctctgtcccccctttttctgccattggcatggtttagacctgtactctttatcagcagaggtactgtaatatatttgtgatccctcagcttccaggcttactcctggtctctgccttcctatctacatatccttttaaaataaaattttaactatctcctgaaaaattgttgagtaggtcacgcacaatcaggagaaaaatctattcatgacatacaagtctctgtctaatctgaacactgcacctgtctctggcctttttttcttgtcatttcctagaccttaaaaaatgtgtattgagaaagaactctgttagctatacagaagatgaactgggcaatatagagtagcagcatggagaccagtctgactgaactaaggcagtggaagtgtggatgaggaagagaggtgaaaattgagaagcgctatcctttctctttgggcattattaggaggctcacagacaagtccaggagtctggttataccctcctgtgccattcaaccaggtggctttcccatgactgtgatgaataaaattgagaagcccctgcccttttcagagcagagggtgaggagaaagctaccattttgtcctcatccttacccccgttgacttggcgagagatttgacctttcaggttttgatcctgtcattttctaggatgtggtgcacgcactttgctgttgcgcatggtgaagtattgtgcctaggtcctgggtcttcatctgtttggctctgctactgtttcctcctcccaggaagtgtggttagacaaataatgtgttttaattacctgtcacactcaggattaatacatactcaggttaactgtagagaggcattggcttcagaacactcctcgtgacaattttaaccattttctttgtctagagtctgcctttttcttttttacaatttcttttatttcaacactaggtttcaatatggtgttcctgctacctcccacctccctcctccctcatcacacatgcaaattgtcagcttattgagacaacccacttagattcatatatggacaaggacaaggtattttgcatttgttactggaattcagttttcctaactatttactaccagaaatggtcaataacttactttgtggttagcaaatcaaattgtgtgatagatagtttcccagtatgatggccagtcagtctttccatccctgtgcctacatgctgctcttcccgtccacaagtggagtctgtttctcttgagttttggctggccttatgaatggctttgcttactgaagtgcagcagaagaaatttagtatatgtccaagcctaggctttaagagactggcagctttccttttatcctttttggaagctagccaccatgctgcaaagaagctcagctggattactgaaagatgagaggccatgtggagagagactcttgaggatgagagattatcttggatgttccagccttaagctcccagctgaatgtgggtgtatcctcagctacaccacagaaaacagaggaactactcagtcgatcccaatcaacccacagactcactagaaataacaaattattgttttaagccacgaggttttgggggagggttgttaaacagtaatagataagtgagacagattgcttgttatttatggtcaaatggtgattatctctggtgagattacaggtgatgttttttttaagttatgcctatctgtagtttcctttttttcctaaaattgatttgaattattagtgtattaacagaataaagaatgaactttaaaacacacacgctggttatatgcttcctctaattaaaattcatggctctcaccac

SEQ ID NO: 895 - protein, 403 aa, Homo sapien
CGGGLVFRGRRCAAAEGGRAGSGMELGRPLLEVLASALSPASPPLLPPDYILCVVSLLQMKDLGAEHLAGHEGVQLLGLLNVYLEQEERFQPREKGLSLIEATPENDNTLCPGLRNAKVEDLRSLANFFGSCTETFVLAVNILDRFLALMKVKPKHLSCIGVCSFLLAARIVEEDCNIPSTHDVIRISQCKCTASDIKRMEKIISEKLHYELEATTALNFLHLYHTIILCHTSERKEILSLDKLEAQLKACNCRLIFSKAKPSVLALCLLNLEVETLKSVELLEILLLVKKHSKINDTEFFYWRELVSKCLAEYSSPECCKPDLKKLVWIVSRRTAQNLHNSYYSVPELPTIPEGGCFDESESEDSCEDMSCGEESLSSSPPSDQECTFFFNFKVAQTLCFPS

SEQ ID NO: 896 - DNA, 2044 bp, Homo sapien
ccggtcggatgccggaccgggggcaccgctgaggcggtgggtccccgacctgcgagacaggtttggaagcccccgctgcgcccagtccgtgcggaccgcgaggccgcgggcgggtggaggcgcgtctccggcacgatgaaggatttgggggcagagcacttggcaggtcatgaaggggtccaacttctcgggttgttgaacgtctacctggaacaagaagagagattccaacctcgagaaaaagggctgagtttgattgaggctaccccggagaatgataacactttgtgtccaggattgagaaatgccaaagttgaagatttaaggagtttagccaacttttttggatcttgcactgaaacttttgtcctggctgtcaatattttggacaggttcttggctcttatgaaggtgaaacctaaacatttgtcttgcattggagtctgttcttttttgctggctgctagaatagttgaagaagactgcaatattccatccactcatgatgtgatccggattagtcagtgtaaatgtactgcttctgacataaaacggatggaaaaaataatttcagaaaaattgcactatgaattggaagctactactgccttaaactttttgcacttataccatactattatactttgtcatacttcagaaaggaaagaaatactgagccttgataaactagaagctcagctgaaagcttgcaactgccgactcatcttttcaaaagcaaaaccatctgtattagccttgtgccttctcaatttggaagtggaaactttgaaatctgttgaattactggaaattctcttgctagttaaaaaacattccaagattaatgacactgagttcttctactggagagagttggtttctaaatgcctagccgagtattcttctcctgaatgttgcaaaccagatcttaagaagttggtttggatcgtttcaaggcgcacagcccagaacctccacaacagctactatagtgttcctgagctgccaacgatacctgaggggggttgttttgatgaaagtgaaagtgaggactcttgtgaagatatgagttgtggagaggagagtctcagcagctctcctcccagtgatcaagagtgcaccttctttttcaacttcaaagtggcacaaacactgtgctttccatcttagaaatctgattgttctgtcagaatttatatttacagggtttcaaagcaataaatgggggaataggtagtttcctggtttagcccccatctagtcaggaattaatatactggaatacctaccttctatttgttattcagatcagatctggcctattttcatatttatcctaagccatcaaatggggtagtgcctcttaaaccattaacagtactttagacattggcactttatttttctcgtagatctttagctactttggggaggagggaaggtgctgataccttcaatttgttacttttcaagatttttaaaaataactagtgtagcttatcttaaacattttataaaaccttcagatgtctttaagcagattggaagtatgcaagtgcttccttagcagggacagtggataatccttaatggtttatcatagatttcaccctccccccttctcagaagagtgagtatgctcttaaatgtcaaacacatttttgttgttttgttttttaaatgatcagtgtctatttgatgtgatgcagatcttataaatttgggaattataatattgacatttctgtgatttttatatatgtaatgtcttaattgagatttgtgttaaggcagaaataattaggctagggctcttagttttcattcctattgccccaagtattgtcaaactatggtattattttaatgttactttaaaaatccataatctgctagttttgcatgtacttatatgaaaacagtgcagtaagttgaaaactcagtatctatggaattgataaatgttgatctggtgtagtatattttatccgcattttcttatattaaaaaatgttctgcatgattacattttatttgcctttgt

SEQ ID NO: 897 - protein, 344 aa, Homo sapien
MKDLGAEHLAGHEGVQLLGLLNVYLEQEERFQPREKGLSLIEATPENDNTLCPGLRNAKVEDLRSLANFFGSCTETFVLAVNILDRFLALMKVKPKHLSCIGVCSFLLAARIVEEDCNIPSTHDVIRISQCKCTASDIKRMEKIISEKLHYELEATTALNFLHLYHTIILCHTSERKEILSLDKLEAQLKACNCRLIFSKAKPSVLALCLLNLEVETLKSVELLEILLLVKKHSKINDTEFFYWRELVSKCLAEYSSPECCKPDLKKLVWIVSRRTAQNLHNSYYSVPELPTIPEGGCFDESESEDSCEDMSCGEESLSSSPPSDQECTFFFNFKVAQTLCFPS

SEQ ID NO: 898 - DNA, 890 bp, Homo sapien
ggcggaccgaagaacgcaggaagggggccggggggacccgcccccggccggccgcagccatgaactccaacgtggagaacctacccccgcacatcatccgcctggtgtacaaggaggtgacgacactgaccgcagacccacccgatggcatcaaggtctttcccaacgaggaggacctcaccgacctccaggtcaccatcgagggccctgaggggaccccatatgctggaggtctgttccgcatgaaactcctgctggggaaggacttccctgcctccccacccaagggctacttcctgaccaagatcttccacccgaacgtgggcgccaatggcgagatctgcgtcaacgtgctcaagagggactggacggctgagctgggcatccgacacgtactgctgaccatcaagtgcctgctgatccaccctaaccccgagtctgcactcaacgaggaggcgggccgcctgctcttggagaactacgaggagtatgcggctcgggcccgtctgctcacagagatccacgggggcgccggcgggcccagcggcagggccgaagccggtcgggccctggccagtggcactgaagcttcctccaccgaccctggggccccagggggcccgggaggggctgagggtcccatggccaagaagcatgctggcgagcgcgataagaagctggcggccaagaaaaagacggacaagaagcgggcgctgcgggcgctgcggcggctgtagtgggctctcttcctccttccaccgtgaccccaacctctcctgtcccctccctccaactctgtctctaagttatttaaattatggctggggtcggggagggtacagggggcactgggacctggatttgtttttctaaataaagttggaaaagca

SEQ ID NO: 899 - protein, 225 aa, Homo sapien
MNSNVENLPPHIIRLVYKEVTTLTADPPDGIKVFPNEEDLTDLQVTIEGPEGTPYAGGLFRMKLLLGKDFPASPPKGYFLTKIFHPNVGANGEICVNVLKRDWTAELGIRHVLLTIKCLLIHPNPESALNEEAGRLLLENYEEYAARARLLTEIHGGAGGPSGRAEAGRALASGTEASSTDPGAPGGPGGAEGPMAKKHAGERDKKLAAKKKTDKKRALRALRRL

SEQ ID NO: 900 - DNA, 1682 bp, Homo sapien
cctgctgaggccaagctcggatccggtgccgagccaagcggggccgtgcgtcgccggccttcgctcgcgtgacctccgccgtcctccccaaccctcgtcctctgcgcctgcggccgcagccccagcgcccctcgcctaacctcccgccgggccgcgcctcctcctcctcctgctccccgccgcttccgtttctcgagggaaaggctgctgcctcctgctctgtcctcatccccggcttagctgacggcccagaggtgggtgccaattccaccagcagctgcaactgaaaagcaaggttcagaaatgtcagatatcctccgggagctgctctgtgtctctgagaaggctgctaacattgcccgggcgtgcagacagcaggaagccctcttccagctgctgatcgaagaaaagaaagagggagaaaagaacaagaagtttgcagttgacttcaagactctggctgatgtactggtacaggaagttataaaacagaatatggagaacaagtttccaggcttggaaaaaaatatttttggagaagaatccaatgagtttactaatgactggggggaaaagattaccttgaggttgtgttcaacagaggaagaaacagcagagcttcttagcaaagtcctcaatggtaacaaggtagcatctgaagcattagccagggttgttcatcaggatgttgcctttactgacccaactctggattccacagagatcaatgttccacaggacattttgggaatttgggtggaccccatagattcaacttatcagtatataaaaggttctgctgacattaaatccaaccagggaatcttcccctgtggacttcagtgtgtcaccattttaattggtgtctatgacatacagacaggggttcccctgatgggagtcatcaatcaaccttttgtgtcacgagatccaaacaccctcaggtggaaaggacagtgctattggggcctttcttacatggggaccaacatgcattcactacagctcaccatctctagaagaaacggcagtgaaacacacactggaaacaccggctctgaggcagcattctcccccagtttttcagccgtaattagtacaagtgaaaaggagactatcaaagctgcattgtcacgtgtgtgtggagatcgcatatttggggcagctggggctggttataagagcctatgtgttgtccaaggcctcgttgacatttacatcttttcagaagataccacattcaaatgggactcttgtgctgctcatgccatactgcgggccatgggtgggggaatagtagacttgaaagaatgcttagaaagaaatccagaaacagggcttgatttgccacagttggtgtaccacgtggaaaatgagggtgctgctggggtggatcggtgggccaacaagggaggactcattgcatacagatccaggaagcggctggagacattcctgagcctcctggtccaaaacctggcacctgcagagacgcatacctagaggaactctaaccccggtgtacctgtataaactgaactgtgaaactgtttcggttatctctgtcttttgaggatggctttgtcctgttgctggttaacattcaccttcctcttttgaggagtatttttccattatgtattcataataatgttaatttcaataaatgacattcatgcagc

SEQ ID NO: 901 - protein, 399 aa, Homo sapien
MSDILRELLCVSEKAANIARACRQQEALFQLLIEEKKEGEKNKKFAVDFKTLADVLVQEVIKQNMENKFPGLEKNIFGEESNEFTNDWGEKITLRLCSTEEETAELLSKVLNGNKVASEALARVVHQDVAFTDPTLDSTEINVPQDILGIWVDPIDSTYQYIKGSADIKSNQGIFPCGLQCVTILIGVYDIQTGVPLMGVINQPFVSRDPNTLRWKGQCYWGLSYMGTNMHSLQLTISRRNGSETHTGNTGSEAAFSPSFSAVISTSEKETIKAALSRVCGDRIFGAAGAGYKSLCVVQGLVDIYIFSEDTTFKWDSCAAHAILRAMGGGIVDLKECLERNPETGLDLPQLVYHVENEGAAGVDRWANKGGLIAYRSRKRLETFLSLLVQNLAPAETHT

SEQ ID NO: 902 - DNA, 2776 bp, Homo sapien
cagggcagactggtagcaaagcccccacgcccagccaggagcaccgccgcggactccagcacaccgagggacatgctgggcctgcgccccccactgctcgccctggtggggctgctctccctcgggtgcgtcctctctcaggagtgcacgaagttcaaggtcagcagctgccgggaatgcatcgagtcggggcccggctgcacctggtgccagaagctgaacttcacagggccgggggatcctgactccattcgctgcgacacccggccacagctgctcatgaggggctgtgcggctgacgacatcatggaccccacaagcctcgctgaaacccaggaagaccacaatgggggccagaagcagctgtccccacaaaaagtgacgctttacctgcgaccaggccaggcagcagcgttcaacgtgaccttccggcgggccaagggctaccccatcgacctgtactatctgatggacctctcctactccatgcttgatgacctcaggaatgtcaagaagctaggtggcgacctgctccgggccctcaacgagatcaccgagtccggccgcattggcttcgggtccttcgtggacaagaccgtgctgccgttcgtgaacacgcaccctgataagctgcgaaacccatgccccaacaaggagaaagagtgccagcccccgtttgccttcaggcacgtgctgaagctgaccaacaactccaaccagtttcagaccgaggtcgggaagcagctgatttccggaaacctggatgcacccgagggtgggctggacgccatgatgcaggtcgccgcctgcccggaggaaatcggctggcgcaacgtcacgcggctgctggtgtttgccactgatgacggcttccatttcgcgggcgacggaaagctgggcgccatcctgacccccaacgacggccgctgtcacctggaggacaacttgtacaagaggagcaacgaattcgactacccatcggtgggccagctggcgcacaagctggctgaaaacaacatccagcccatcttcgcggtgaccagtaggatggtgaagacctacgagaaactcaccgagatcatccccaagtcagccgtgggggagctgtctgaggactccagcaatgtggtccatctcattaagaatgcttacaataaactctcctccagggtcttcctggatcacaacgccctccccgacaccctgaaagtcacctacgactccttctgcagcaatggagtgacgcacaggaaccagcccagaggtgactgtgatggcgtgcagatcaatgtcccgatcaccttccaggtgaaggtcacggccacagagtgcatccaggagcagtcgtttgtcatccgggcgctgggcttcacggacatagtgaccgtgcaggttcttccccagtgtgagtgccggtgccgggaccagagcagagaccgcagcctctgccatggcaagggcttcttggagtgcggcatctgcaggtgtgacactggctacattgggaaaaactgtgagtgccagacacagggccggagcagccaggagctggaaggaagctgccggaaggacaacaactccatcatctgctcagggctgggggactgtgtctgcgggcagtgcctgtgccacaccagcgacgtccccggcaagctgatatacgggcagtactgcgagtgtgacaccatcaactgtgagcgctacaacggccaggtctgcggcggcccggggagggggctctgcttctgcgggaagtgccgctgccacccgggctttgagggctcagcgtgccagtgcgagaggaccactgagggctgcctgaacccgcggcgtgttgagtgtagtggtcgtggccggtgccgctgcaacgtatgcgagtgccattcaggctaccagctgcctctgtgccaggagtgccccggctgcccctcaccctgtggcaagtacatctcctgcgccgagtgcctgaagttcgaaaagggcccctttgggaagaactgcagcgcggcgtgtccgggcctgcagctgtcgaacaaccccgtgaagggcaggacctgcaaggagagggactcagagggctgctgggtggcctacacgctggagcagcaggacgggatggaccgctacctcatctatgtggatgagagccgagagtgtgtggcaggccccaacatcgccgccatcgtcgggggcaccgtggcaggcatcgtgctgatcggcattctcctgctggtcatctggaaggctctgatccacctgagcgacctccgggagtacaggcgctttgagaaggagaagctcaagtcccagtggaacaatgataatccccttttcaagagcgccaccacgacggtcatgaaccccaagtttgctgagagttaggagcacttggtgaagacaaggccgtcaggacccaccatgtctgccccatcacgcggccgagacatggcttggccacagctcttgaggatgtcaccaattaaccagaaatccagttattttccgccctcaaaatgacagccatggccggccggtgcttctgggggctcgtcggggggacagctccactctgactggcacagtctttgcatggagacttgaggagggcttgaggttggtgaggttaggtgcgtgtttcctgtgcaagtcaggacatcagtctgattaaaggtggtgccaatttatttacatttaaacttgtcagggtataaaatgacatcccattaattatattgttaatcaatcacgtgtatagaaaaaaaaataaaacttcaat

SEQ ID NO: 903 - protein, 769 aa, Homo sapien
MLGLRPPLLALVGLLSLGCVLSQECTKFKVSSCRECIESGPGCTWCQKLNFTGPGDPDSIRCDTRPQLLMRGCAADDIMDPTSLAETQEDHNGGQKQLSPQKVTLYLRPGQAAAFNVTFRRAKGYPIDLYYLMDLSYSMLDDLRNVKKLGGDLLRALNEITESGRIGFGSFVDKTVLPFVNTHPDKLRNPCPNKEKECQPPFAFRHVLKLTNNSNQFQTEVGKQLISGNLDAPEGGLDAMMQVAACPEEIGWRNVTRLLVFATDDGFHFAGDGKLGAILTPNDGRCHLEDNLYKRSNEFDYPSVGQLAHKLAENNIQPIFAVTSRMVKTYEKLTEIIPKSAVGELSEDSSNVVHLIKNAYNKLSSRVFLDHNALPDTLKVTYDSFCSNGVTHRNQPRGDCDGVQINVPITFQVKVTATECIQEQSFVIRALGFTDIVTVQVLPQCECRCRDQSRDRSLCHGKGFLECGICRCDTGYIGKNCECQTQGRSSQELEGSCRKDNNSIICSGLGDCVCGQCLCHTSDVPGKLIYGQYCECDTINCERYNGQVCGGPGRGLCFCGKCRCHPGFEGSACQCERTTEGCLNPRRVECSGRGRCRCNVCECHSGYQLPLCQECPGCPSPCGKYISCAECLKFEKGPFGKNCSAACPGLQLSNNPVKGRTCKERDSEGCWVAYTLEQQDGMDRYLIYVDESRECVAGPNIAAIVGGTVAGIVLIGILLLVIWKALIHLSDLREYRRFEKEKLKSQWNNDNPLFKSATTTVMNPKFAES

SEQ ID NO: 904 - DNA, 2107 bp, Homo sapien
ggaagggtcccgggaacgtggtggggcagggcctccgagcgtggttggactttgaaggggatcggcgccatgctgcatcccctttttggaattgctcaaccaggtggtaaccggcgccgcttcctggccttgggaggtggttcctttcttaacccacaagaacctctcccaagagaacttggtcctgatgtctgaccatggagatgtgagcctcccgcccgaagaccgggtgagggctctctcccagctgggtagtgcggtagaggtgaatgaagacattccaccccgtcggtacttccgctctggagttgagattatccgaatggcatccatttactctgaggaaggcaacattgaacatgccttcatcctctataacaagtatatcacgctctttattgagaaactaccaaaacatcgagattacaaatctgctgtcattcctgaaaagaaagacacagtaaagaaattaaaggagattgcatttcccaaagcagaagagctgaaggcagagctgttaaaacgatataccaaagaatatacagaatataatgaagaaaagaagaaggaagcagaggaattggcccggaacatggccatccagcaagagctggaaaaggaaaaacagagggtagcacaacagaagcagcagcaattggaacaggaacagttccatgccttcgaggagatgatccggaaccaggagctagaaaaagagcgactgaaaattgtacaggagtttgggaaggtagaccctggcctaggtggcccgctagtgcctgacttggagaagccctccttagatgtgttccccaccttaacagtctcatccatacagccttcagactgtcacacaactgtaaggccagctaagccacctgtggtggacaggtccttgaaacctggagcactgagcaactcagaaagtattcccacaatcgatggattgcgccatgtggtggtgcctgggcggctgtgcccacagtttctccagttagccagtgccaacactgcccggggagtggagacatgtggaattctctgtggaaaactgatgaggaatgaatttaccattacccatgttctcatccccaagcaaagtgctgggtctgattactgcaacacagagaacgaagaagaacttttcctcatacaggatcagcagggcctcatcacactgggctggattcatactcaccccacacagaccgcgtttctctccagtgtcgacctacacactcactgctcttaccagatgatgttgccagagtcagtagccattgtttgctcccccaagttccaggaaactggattctttaaactaactgaccatggactagaggagatttcttcctgtcgccagaaaggatttcatccacacagcaaggatccacctctgttctgtagctgcagccacgtgactgttgtggacagagcagtgaccatcacagaccttcgatgagcgtttgagtccaacaccttccaagaacaacaaaaccatatcagtgtactgtagccccttaatttaagctttctagaaagctttggaagtttttgtagatagtagaaaggggggcatcacctgagaaagagctgattttgtatttcaggtttgaaaagaaataactgaacatattttttaggcaagtcagaaagagaacatggtcacccaaaagcaactgtaactcagaaattaagttactcagaaattaagtagctcagaaattaagaaagaatggtataatgaacccccatatacccttccttctggattcaccaattgttaacatttttttcctctcagctatccttctaatttctctctaatttcaatttgtttatatttacctctgggctcaataagggcatctgtgcagaaatttggaagccatttagaaaatcttttggattttcctgtggtttatggcaatatgaatggagcttattactggggtgagggacagcttactccatttgaccagattgtttggctaacacatcccgaagaatgattttgtcaggaattattgttatttaataaatatttcaggatatttttcctctacaataaagtaacaattaacttaaaaaaaaaaaaaaaaaaaaa

SEQ ID NO: 905 - protein, 424 aa, Homo sapien
MSDHGDVSLPPEDRVRALSQLGSAVEVNEDIPPRRYFRSGVEIIRMASIYSEEGNIEHAFILYNKYITLFIEKLPKHRDYKSAVIPEKKDTVKKLKEIAFPKAEELKAELLKRYTKEYTEYNEEKKKEAEELARNMAIQQELEKEKQRVAQQKQQQLEQEQFHAFEEMIRNQELEKERLKIVQEFGKVDPGLGGPLVPDLEKPSLDVFPTLTVSSIQPSDCHTTVRPAKPPVVDRSLKPGALSNSESIPTIDGLRHVVVPGRLCPQFLQLASANTARGVETCGILCGKLMRNEFTITHVLIPKQSAGSDYCNTENEEELFLIQDQQGLITLGWIHTHPTQTAFLSSVDLHTHCSYQMMLPESVAIVCSPKFQETGFFKLTDHGLEEISSCRQKGFHPHSKDPPLFCSCSHVTVVDRAVTITDLR

SEQ ID NO: 906 - DNA, 5496 bp, Homo sapien
attcagccggtgcgcgcggcggcgggaggcagtggctggggagtcccgtcgacgctctgttccgagagcgtgccccggaccgccagctcagaacaggggcagccgtgtagccgaacggaagctgggagcagccgggactggtggcccgcgcccgagctccgcaggcgggaagcaccctggatttgggaagtcccgggagcagcgcggcggcacctccctcacccaaggggccgcggcgacggtcacggggcgcggcgccaccgtgagcgacccaggccaggattctaaatagacggcccaggctcctcctccgcccgggccgcctcacctgcgggcattgccgcgccgcctccgccggtgtagacggcacctgcgccgccttgctcgcgggtctccgcccctcgcccaccctcactgcgccaggcccaggcagctcacctgtactggcgcgggctgcggaagcctgcgtgagccgaggcgttgaggcgcggcgcccacgccactgtcccgagaggacgcaggtggagcgggcgcggcttcgcggaacccggcgccggccgccgcagtggtcccagcctacaccgggttccggggacccggccgccagtgcccggggagtagccgccgccgtcggctgggcaccatgaacagcagcagcgccaacatcacctacgccagtcgcaagcggcggaagccggtgcagaaaacagtaaagccaatcccagctgaaggaatcaagtcaaatccttccaagcggcatagagaccgacttaatacagagttggaccgtttggctagcctgctgcctttcccacaagatgttattaataagttggacaaactttcagttcttaggctcagcgtcagttacctgagagccaagagcttctttgatgttgcattaaaatcctcccctactgaaagaaacggaggccaggataactgtagagcagcaaatttcagagaaggcctgaacttacaagaaggagaattcttattacaggctctgaatggctttgtattagttgtcactacagatgctttggtcttttatgcttcttctactatacaagattatctagggtttcagcagtctgatgtcatacatcagagtgtatatgaacttatccataccgaagaccgagctgaatttcagcgtcagctacactgggcattaaatccttctcagtgtacagagtctggacaaggaattgaagaagccactggtctcccccagacagtagtctgttataacccagaccagattcctccagaaaactctcctttaatggagaggtgcttcatatgtcgtctaaggtgtctgctggataattcatctggttttctggcaatgaatttccaagggaagttaaagtatcttcatggacagaaaaagaaagggaaagatggatcaatacttccacctcagttggctttgtttgcgatagctactccacttcagccaccatccatacttgaaatccggaccaaaaattttatctttagaaccaaacacaaactagacttcacacctattggttgtgatgccaaaggaagaattgttttaggatatactgaagcagagctgtgcacgagaggctcaggttatcagtttattcatgcagctgatatgctttattgtgccgagtcccatatccgaatgattaagactggagaaagtggcatgatagttttccggcttcttacaaaaaacaaccgatggacttgggtccagtctaatgcacgcctgctttataaaaatggaagaccagattatatcattgtaactcagagaccactaacagatgaggaaggaacagagcatttacgaaaacgaaatacgaagttgccttttatgtttaccactggagaagctgtgttgtatgaggcaaccaacccttttcctgccataatggatcccttaccactaaggactaaaaatggcactagtggaaaagactctgctaccacatccactctaagcaaggactctctcaatcctagttccctcctggctgccatgatgcaacaagatgagtctatttatctctatcctgcttcaagtacttcaagtactgcaccttttgaaaacaactttttcaacgaatctatgaatgaatgcagaaattggcaagataatactgcaccgatgggaaatgatactatcctgaaacatgagcaaattgaccagcctcaggatgtgaactcatttgctggaggtcacccagggctctttcaagatagtaaaaacagtgacttgtacagcataatgaaaaacctaggcattgattttgaagacatcagacacatgcagaatgaaaaatttttcagaaatgatttttctggtgaggttgacttcagagacattgacttaacggatgaaatcctgacgtatgtccaagattctttaagtaagtctcccttcataccttcagattatcaacagcaacagtccttggctctgaactcaagctgtatggtacaggaacacctacatctagaacagcaacagcaacatcaccaaaagcaagtagtagtggagccacagcaacagctgtgtcagaagatgaagcacatgcaagttaatggcatgtttgaaaattggaactctaaccaattcgtgcctttcaattgtccacagcaagacccacaacaatataatgtctttacagacttacatgggatcagtcaagagttcccctacaaatctgaaatggattctatgccttatacacagaactttatttcctgtaatcagcctgtattaccacaacattccaaatgtacagagctggactaccctatggggagttttgaaccatccccataccccactacttctagtttagaagattttgtcacttgtttacaacttcctgaaaaccaaaagcatggattaaatccacagtcagccataataactcctcagacatgttatgctggggccgtgtcgatgtatcagtgccagccagaacctcagcacacccacgtgggtcagatgcagtacaatccagtactgccaggccaacaggcatttttaaacaagtttcagaatggagttttaaatgaaacatatccagctgaattaaataacataaataacactcagactaccacacatcttcagccacttcatcatccgtcagaagccagaccttttcctgatttgacatccagtggattcctgtaattccaagcccaattttgaccctggtttttggattaaattagtttgtgaaggattatggaaaaataaaactgtcactgttggacgtcagcaagttcacatggaggcattgatgcatgctattcacaattattccaaaccaaattttaatttttgcttttagaaaagggagtttaaaaatggtatcaaaattacatatactacagtcaagatagaaagggtgctgccacggagtggtgaggtaccgtctacatttcacattattctgggcaccacaaaatatacaaaactttatcagggaaactaagattcttttaaattagaaaatattctctatttgaattatttctgtcacagtaaaaataaaatactttgagttttgagctactggattcttattagttccccaaatacaaagttagagaactaaactagtttttcctatcatgttaacctctgcttttatctcagatgttaaaataaatggtttggtgctttttataaaaagataatctcagtgctttcctccttcactgtttcatctaagtgcctcacatttttttctacctataacactctaggatgtatattttatataaagtattctttttcttttttaaattaatatctttctgcacacaaatattatttgtgtttcctaaatccaaccaattttcattaattcaggcatattttaactccactgcttacctactttcttcaggtaaaagggcaaataatgatcgaaaaaataattatttattacataatttagttgtttctagactataaatgttgctatgtgccttatgttgaaaaaatttaaaagtaaaatgtctttccaaattatttcttaattattataaaaatattaagacaatagcacttaaattcctcaacagtgttttcagaagaaataaatataccactctttacctttattgatatctccatgatgatagttgaatgttgcaatgtgaaaaatctgctgttaactgcaaccttgtttattaaattgcaagaagctttatttctagctttttaattaagcaaagcacccatttcaatgtgtataaattgtctttaaaaactgttttagacctataatccttgataatatattgtgttgactttataaatttcgcttcttagaacagtggaaactatgtgtttttctcatatttgaggagtgttaagattgcagatagcaaggtttggtgcaaagtattgtaatgagtgaattgaatggtgcattgtatagatataatgaacaaaattatttgtaagatatttgcagtttttcattttaaaaagtccataccttatatatgcacttaatttgttggggctttacatactttatcaatgtgtctttctaagaaatcaagtaatgaatccaactgcttaaagttggtattaataaaaagacaaccacatagttcgtttaccttcaaactttaggtttttttaatgatatactgatcttcattaccaataggcaaattaatcaccctaccaactttactgtcctaacatggactttcaaaaagaaaaaatgacaccatcttttattctttttttttttttttttttgagagagagtcttactctgccgcccaaactggagtgcagtggcacaatcttggctcactgcaacctctacctcctgggttcaagtgattctcttgcctcagcctcccgagttgctgggattgcgggcatggtggcgtgagcctgtagtcctagctactcgggaggctgaggcaggagaatagcctgaacctgggaatcggaggttgcagggccaagatcgccccactgcactccagcctggcaatagaccgagctccgtctccaaaaaaaaaaatacaatttttatttcttttactttttttagtaagttaatgtatataaaaatggcttcggacaaaatatctctgagttctgtgtattttcagtcaaaactttaaacctgtagaatcaatttaagtgttgaaaaaaatttgtctgaaacatttcataatttgtttccagcatgaggtatctaaggatttagaccagaggtctagattaatactctatttttacatttaaaccttttattataagtcttacataaaccatttttgttactctcttccacatgttactggataaattgtttagtggaaaataggctttttaatcatgaatatgatgacaatcagttatacagttataaaattaaaagtttgaaaagcaatattgtatatttttatctatataaaataactaaaatgtatctaagaataataaaatcacgttaaacc

SEQ ID NO: 907 - protein, 848 aa, Homo sapien
MNSSSANITYASRKRRKPVQKTVKPIPAEGIKSNPSKRHRDRLNTELDRLASLLPFPQDVINKLDKLSVLRLSVSYLRAKSFFDVALKSSPTERNGGQDNCRAANFREGLNLQEGEFLLQALNGFVLVVTTDALVFYASSTIQDYLGFQQSDVIHQSVYELIHTEDRAEFQRQLHWALNPSQCTESGQGIEEATGLPQTVVCYNPDQIPPENSPLMERCFICRLRCLLDNSSGFLAMNFQGKLKYLHGQKKKGKDGSILPPQLALFAIATPLQPPSILEIRTKNFIFRTKHKLDFTPIGCDAKGRIVLGYTEAELCTRGSGYQFIHAADMLYCAESHIRMIKTGESGMIVFRLLTKNNRWTWVQSNARLLYKNGRPDYIIVTQRPLTDEEGTEHLRKRNTKLPFMFTTGEAVLYEATNPFPAIMDPLPLRTKNGTSGKDSATTSTLSKDSLNPSSLLAAMMQQDESIYLYPASSTSSTAPFENNFFNESMNECRNWQDNTAPMGNDTILKHEQIDQPQDVNSFAGGHPGLFQDSKNSDLYSIMKNLGIDFEDIRHMQNEKFFRNDFSGEVDFRDIDLTDEILTYVQDSLSKSPFIPSDYQQQQSLALNSSCMVQEHLHLEQQQQHHQKQVVVEPQQQLCQKMKHMQVNGMFENWNSNQFVPFNCPQQDPQQYNVFTDLHGISQEFPYKSEMDSMPYTQNFISCNQPVLPQHSKCTELDYPMGSFEPSPYPTTSSLEDFVTCLQLPENQKHGLNPQSAIITPQTCYAGAVSMYQCQPEPQHTHVGQMQYNPVLPGQQAFLNKFQNGVLNETYPAELNNINNTQTTTHLQPLHHPSEARPFPDLTSSGFL

SEQ ID NO: 908 - DNA, 668 bp, Homo sapien
cggggacccggctgcggtggctgcgggactgacgagaaactactaaagttcctggggaagcaaagtagaatttcataagaacaaaatggatggagaggagaaaacctatggtggctgtgaaggacctgatgccatgtatgtcaaattgatatcatctgatggccatgaatttattgtaaaaagagaacatgcattaacatcaggcacgataaaagccatgttgagtggcccaggtcagtttgctgagaacgaaaccaatgaggtcaattttagagagataccttcacatgtgctatcgaaagtatgcatgtattttacgtacaaggttcgctacactaacagctccaccgagattcctgaattcccaattgcacctgaaattgcactggaactgctgatggctgcgaacttcttagattgttaaataaaataaattataataaactgttaactcttttcagtatttaatacctgtagttcagttagtaactttttcatatatagcatgttgcctgtatgcagttgaactatataaagttcattgcaaagcagattatcttgtttttttgcatagcaatcaaagttgaaatttgtttgctacatcaacaaattaaggacattttcacaaactgagaaataaacaaatatgccaattaaaaaaaaaaaaa

SEQ ID NO: 909 - protein, 112 aa, Homo sapien
MDGEEKTYGGCEGPDAMYVKLISSDGHEFIVKREHALTSGTIKAMLSGPGQFAENETNEVNFREIPSHVLSKVCMYFTYKVRYTNSSTEIPEFPIAPEIALELLMAANFLDC

SEQ ID NO: 910 - DNA, 1584 bp, Homo sapien
aagctgtacactgcccaggcaaagcgtccgggcagcgtaggcgggcgactcagatcccagccagtggacttagcccctgtttgctcctccgataactggggtgaccttggttaatattcaccagcagcctcccccgttgcccctctggatccactgcttaaatacggacgaggacagggccctgtctcctcagcttcaggcaccaccactgacctgggacagtgaatcgacaatgccgtcttctgtctcgtggggcatcctcctgctggcaggcctgtgctgcctggtccctgtctccctggctgaggatccccagggagatgctgcccagaagacagatacatcccaccatgatcaggatcacccaaccttcaacaagatcacccccaacctggctgagttcgccttcagcctataccgccagctggcacaccagtccaacagcaccaatatcttcttctccccagtgagcatcgctacagcctttgcaatgctctccctggggaccaaggctgacactcacgatgaaatcctggagggcctgaatttcaacctcacggagattccggaggctcagatccatgaaggcttccaggaactcctccgtaccctcaaccagccagacagccagctccagctgaccaccggcaatggcttgttcctcagcgagggcctgaagctagtggataagtttttggaggatgttaaaaagttgtaccactcagaagccttcactgtcaacttcggggacaccgaagaggccaagaaacagatcaacgattacgtggagaagggtactcaagggaaaattgtggatttggtcaaggagcttgacagagacacagtttttgctctggtgaattacatcttctttaaaggcaaatgggagagaccctttgaagtcaaggacaccgaggaagaggacttccacgtggaccaggtgaccaccgtgaaggtgcctatgatgaagcgtttaggcatgtttaacatccagcactgtaagaagctgtccagctgggtgctgctgatgaaatacctgggcaatgccaccgccatcttcttcctgcctgatgaggggaaactacagcacctggaaaatgaactcacccacgatatcatcaccaagttcctggaaaatgaagacagaaggtctgccagcttacatttacccaaactgtccattactggaacctatgatctgaagagcgtcctgggtcaactgggcatcactaaggtcttcagcaatggggctgacctctccggggtcacagaggaggcacccctgaagctctccaaggccgtgcataaggctgtgctgaccatcgacgagaaagggactgaagctgctggggccatgtttttagaggccatacccatgtctatcccccccgaggtcaagttcaacaaaccctttgtcttcttaatgattgaccaaaataccaagtctcccctcttcatgggaaaagtggtgaatcccacccaaaaataactgcctctcgctcctcaacccctcccctccatccctggccccctccctggatgacattaaagaagggttgagctggaaaaaaaaaaaaaaaaaaa

SEQ ID NO: 911 - protein, 418 aa, Homo sapien
MPSSVSWGILLLAGLCCLVPVSLAEDPQGDAAQKTDTSHHDQDHPTFNKITPNLAEFAFSLYRQLAHQSNSTNIFFSPVSIATAFAMLSLGTKADTHDEILEGLNFNLTEIPEAQIHEGFQELLRTLNQPDSQLQLTTGNGLFLSEGLKLVDKFLEDVKKLYHSEAFTVNFGDTEEAKKQINDYVEKGTQGKIVDLVKELDRDTVFALVNYIFFKGKWERPFEVKDTEEEDFHVDQVTTVKVPMMKRLGMFNIQHCKKLSSWVLLMKYLGNATAIFFLPDEGKLQHLENELTHDIITKFLENEDRRSASLHLPKLSITGTYDLKSVLGQLGITKVFSNGADLSGVTEEAPLKLSKAVHKAVLTIDEKGTEAAGAMFLEAIPMSIPPEVKFNKPFVFLMIDQNTKSPLFMGKVVNPTQK

SEQ ID NO: 912 - DNA, 2618 bp, Homo sapien; identical to SEQ ID NO: 45

SEQ ID NO: 913 - protein, 582 aa, Homo sapien; identical to SEQ ID NO: 46

SEQ ID NO: 914 - DNA, 2371 bp, Homo sapien
agctggctgagaggggactgggcgccggcggggaaggaggagcgctaggtcggtgtacgaccgagattagggtgcgtgccagctccgggaggccgcggtgaggggccgggcccaagctgccgacccgagccgatcgtcagggtcgccagcgcctcagctctgtggaggagcagcagtagtcggagggtgcaggatattagaaatggctactccccagtcaattttcatctttgcaatctgcattttaatgataacagaattaattctggcctcaaaaagctactatgatatcttaggtgtgccaaaatcggcatcagagcgccaaatcaagaaggcctttcacaagttggccatgaagtaccaccctgacaaaaataagagcccggatgctgaagcaaaattcagagagattgcagaagcatatgaaacactctcagatgctaatagacgaaaagagtatgatacacttggacacagtgcttttactagtggtaaaggacaaagaggtagtggaagttcttttgagcagtcatttaacttcaattttgatgacttatttaaagactttggcttttttggtcaaaaccaaaacactggatccaagaagcgttttgaaaatcatttccagacacgccaggatggtggttccagtagacaaaggcatcatttccaagaattttcttttggaggtggattatttgatgacatgtttgaagatatggagaaaatgttttcttttagtggttttgactctaccaatcagcatacagtacagactgaaaatagatttcatggatctagcaagcactgcaggactgtcactcaacgaagaggaaatatggttactacatacactgactgttcaggacagtagttcttattctattctcactaaatccaactggttgactcttcctcattatctttgatgctaaacaattttctgtgaactattttgacaagtgcatgatttcactttaaacaatttgatatagctattaaatatatttaagggttttttttttttgacaaattcaacattcaacgagtagacaaaatgctaattatttccctgattaggaaagtttctttaaaaaacacgtaattttgcctagtgctttttctctacctgcccttgggctcactaatatcaccagtattattaccaagaaaatattgagtttacctgattaaactttaaaagttaattgtagatttaaattgtgtgaacctaatgatttttgcagtgaaacctttactaattcaaagttgcatgttctatgacatctgtgacttgcgttgcagagtgtacatgaaactgtataattgagtcattcagtaaaggagaacagtatcttggttaattgctactgaaaggttgagaaaggaatggtttgatatttaccacagcgctgtgcctttctacagtagaactggggtaaaggaaatggttttattgcccatagtcatttaggctggaaaaaagttgaaaacttaacgaaatattgccaagagattgttatgtgtttggttccagcctaaaaatgattttgtagtgttgaaatcatagctacttacatagctttttcatatttctttcttagttgttggcactcttaggtcttagtatggatttatgtgtttgtgtgtgtgtagtttatcctctctctcatctttatctagagattgactgatacctcattctgtttgtaaaaccagccagtaatttctgtgcaaccttactatgtgcaatatttttaaatcctgagaaatgtgtgcttttgttttcggatagacttatttctttagttctgcacttttccacattatactccatatgagtattaatcctatggatacatattaaaacaagtgtctcatacaacattgtatgtgagagaaatataaatatttacaacctgatattcgttgttgttttattgttaaaagtttattatgcaactctggaggtatagagggcatataagctatgggacatatgctgatcacaggctatattcatgaagttacttttgaccaacctgaaaactgataggattttgtttgtcatttggtaatttctactgcattcttaccatccttctctcacaaattttgatagcttgaagatctttttaattataattttgttgtatttgtttcctaggagcaagtgttcctgctgccagttctttcctctttaggcgtggttgagaaaaagcagaaactttacataaagctgtatttcttaatcatctttaatttgaaacttaagaaaatgaatttattctgttatatttatgtaacttatttcctggaagttatatctactagttttgtttgataataataaaattagctataccttgaa

SEQ ID NO: 915 - protein, 223 aa, Homo sapien
MATPQSIFIFAICILMITELILASKSYYDILGVPKSASERQIKKAFHKLAMKYHPDKNKSPDAEAKFREIAEAYETLSDANRRKEYDTLGHSAFTSGKGQRGSGSSFEQSFNFNFDDLFKDFGFFGQNQNTGSKKRFENHFQTRQDGGSSRQRHHFQEFSFGGGLFDDMFEDMEKMFSFSGFDSTNQHTVQTENRFHGSSKHCRTVTQRRGNMVTTYTDCSGQ

SEQ ID NO: 916 - DNA, 2371 bp, Homo sapien; identical to SEQ ID NO: 914

SEQ ID NO: 917 - protein, 223 aa, Homo sapien; identical to SEQ ID NO: 915

SEQ ID NO: 918 - DNA, 1982 bp, Homo sapien
ggcgagaggcgggctgaggcggcccagcggcggcaggtgaggcggaaccaaccctcctggccatgggaggggccgtggtggacgagggccccacaggcgtcaaggcccctgacggcggctggggctgggccgtgctcttcggctgtttcgtcatcactggcttctcctacgccttccccaaggccgtcagtgtcttcttcaaggagctcatacaggagtttgggatcggctacagcgacacagcctggatctcctccatcctgctggccatgctctacgggacaggtccgctctgcagtgtgtgcgtgaaccgctttggctgccggcccgtcatgcttgtggggggtctctttgcgtcgctgggcatggtggctgcgtccttttgccggagcatcatccaggtctacctcaccactggggtcatcacggggttgggtttggcactcaacttccagccctcgctcatcatgctgaaccgctacttcagcaagcggcgccccatggccaacgggctggcggcagcaggtagccctgtcttcctgtgtgccctgagcccgctggggcagctgctgcaggaccgctacggctggcggggcggcttcctcatcctgggcggcctgctgctcaactgctgcgtgtgtgccgcactcatgaggcccctggtggtcacggcccagccgggctcggggccgccgcgaccctcccggcgcctgctagacctgagcgtcttccgggaccgcggctttgtgctttacgccgtggccgcctcggtcatggtgctggggctcttcgtcccgcccgtgttcgtggtgagctacgccaaggacctgggcgtgcccgacaccaaggccgccttcctgctcaccatcctgggcttcattgacatcttcgcgcggccggccgcgggcttcgtggcggggcttgggaaggtgcggccctactccgtctacctcttcagcttctccatgttcttcaacggcctcgcggacctggcgggctctacggcgggcgactacggcggcctcgtggtcttctgcatcttctttggcatctcctacggcatggtgggggccctgcagttcgaggtgctcatggccatcgtgggcacccacaagttctccagtgccattggcctggtgctgctgatggaggcggtggccgtgctcgtcgggcccccttcgggaggcaaactcctggatgcgacccacgtctacatgtacgtgttcatcctggcgggggccgaggtgctcacctcctccctgattttgctgctgggcaacttcttctgcattaggaagaagcccaaagagccacagcctgaggtggcggccgcggaggaggagaagctccacaagcctcctgcagactcgggggtggacttgcgggaggtggagcatttcctgaaggctgagcctgagaaaaacggggaggtggttcacaccccggaaacaagtgtctgagtggctgggcggggccggcaggcacagggaggaggtacagaagccggcaacgcttgctatttattttacaaactggactggctcaggcagggccacggctgggctccagctgccggcccagcggatcgtcgcccgatcagtgttttgagggggaaggtggcggggtgggaaccgtgtcattccagagtggatctgcggtgaagccaagccgcaaggttacaaggcatcctcaccaggggccccgcctgctgctcccaggtggcctgcggccactgctatgctcaaggacctggaaacccatgcttcgagacaacgtgactttaatgggagggtgggtgggccgcagacaggctggcagggcaggtgctgcgtggggccctctccagcccgtcctaccctgggctcacatggggcctgtgcccacccctcttgagtgtcttggggacagctctttccacccctggaagatggaaataaacctgcgtgtgggtggagtgttctcgtgccgaattcaaaaagctt

SEQ ID NO: 919 - protein, 465 aa, Homo sapien
MGGAVVDEGPTGVKAPDGGWGWAVLFGCFVITGFSYAFPKAVSVFFKELIQEFGIGYSDTAWISSILLAMLYGTGPLCSVCVNRFGCRPVMLVGGLFASLGMVAASFCRSIIQVYLTTGVITGLGLALNFQPSLIMLNRYFSKRRPMANGLAAAGSPVFLCALSPLGQLLQDRYGWRGGFLILGGLLLNCCVCAALMRPLVVTAQPGSGPPRPSRRLLDLSVFRDRGFVLYAVAASVMVLGLFVPPVFVVSYAKDLGVPDTKAAFLLTILGFIDIFARPAAGFVAGLGKVRPYSVYLFSFSMFFNGLADLAGSTAGDYGGLVVFCIFFGISYGMVGALQFEVLMAIVGTHKFSSAIGLVLLMEAVAVLVGPPSGGKLLDATHVYMYVFILAGAEVLTSSLILLLGNFFCIRKKPKEPQPEVAAAEEEKLHKPPADSGVDLREVEHFLKAEPEKNGEVVHTPETSV

SEQ ID NO: 920 - DNA, 1982 bp, Homo sapien; identical to SEQ ID NO: 918

SEQ ID NO: 921 - protein, 465 aa, Homo sapien; identical to SEQ ID NO: 919

SEQ ID NO: 922 - DNA, 4656 bp, Homo sapien; identical to SEQ ID NO: 51

SEQ ID NO: 923 - protein, 1290 aa, Homo sapien; identical to SEQ ID NO: 52

SEQ ID NO: 924 - DNA, 1447 bp, Homo sapien
agtcctgctctccgcacgccaccttaggcccgcagccgtgccgggtgctcttcagcatgtccttcatcccggtggccgaggattccgacttccccatccacaacctgccctacggcgtcttctcgaccagaggcgacccaagaccgaggataggtgtggccattggcgaccagatcctggacctcagcatcatcaagcacctctttactggtcctgtcctctccaaacaccaggatgtcttcaatcagcctacactcaacagcttcatgggcctgggtcaggctgcctggaaggaggcgagagtgttcttgcagaacttgctgtctgtgagccaagccaggctcagagatgacaccgaacttcggaagtgtgcattcatctcccaggcttctgccacgatgcaccttccagccaccataggagactacacagacttctattcctctcggcagcatgctaccaacgtcggaatcatgttcagggacaaggagaatgcgttgatgccaaattggctgcacttaccagtgggctaccatggccgtgcctcctctgtcgtggtgtctggcaccccaatccgaaggcccatgggacagatgaaacctgatgactctaagcctcccgtatatggtgcctgcaagctcttggacatggagctggaaatggctttttttgtaggccctggaaacagattgggagagccgatccccatttccaaggcccatgagcacatttttggaatggtccttatgaacgactggagtgcacgagacattcagaagtgggagtatgtccctctcgggccattccttgggaagagttttgggaccactgtctctccgtgggtggtgcccatggatgctctcatgccctttgctgtgcccaacccgaagcaggaccccaggcccctgccgtatctgtgccatgacgagccctacacatttgacatcaacctctctgttaacctgaaaggagaaggaatgagccaggcggctaccatatgcaagtccaattttaagtacatgtactggacgatgctgcagcagctcactcaccactctgtcaacggctgcaacctgcggccgggggacctcctggcttctgggaccatcagcgggccggagccagaaaacttcggctccatgttggaactgtcgtggaagggaacgaagcccatagacctggggaatggtcagaccaggaagtttctgctggacggggatgaagtcatcataacagggtactgccagggggatggttaccgcatcggctttggccagtgtgctggaaaagtgctgcctgctctcctgccatcatgagattttctctgctcttctggaaacaaagggctcaagcacccctttcaaccctgtgactggggtcctccctcgggctgtaggcctggtccgccattcagtgacaaataaagccattgtgctctgaggcctgc

SEQ ID NO: 925 - protein, 419 aa, Homo sapien
MSFIPVAEDSDFPIHNLPYGVFSTRGDPRPRIGVAIGDQILDLSIIKHLFTGPVLSKHQDVFNQPTLNSFMGLGQAAWKEARVFLQNLLSVSQARLRDDTELRKCAFISQASATMHLPATIGDYTDFYSSRQHATNVGIMFRDKENALMPNWLHLPVGYHGRASSVVVSGTPIRRPMGQMKPDDSKPPVYGACKLLDMELEMAFFVGPGNRLGEPIPISKAHEHIFGMVLMNDWSARDIQKWEYVPLGPFLGKSFGTTVSPWVVPMDALMPFAVPNPKQDPRPLPYLCHDEPYTFDINLSVNLKGEGMSQAATICKSNFKYMYWTMLQQLTHHSVNGCNLRPGDLLASGTISGPEPENFGSMLELSWKGTKPIDLGNGQTRKFLLDGDEVIITGYCQGDGYRIGFGQCAGKVLPALLPS

SEQ ID NO: 926 - DNA, 3579 bp, Homo sapien
ctgaggcccacgcagggcctagggtgggaagatggcaggtgggggcggcgacctgagcaccaggaggctgaatgaatgtatttcaccagtagcaaatgagatgaaccatcttcctgcacacagccacgatttgcaaaggatgttcacggaagaccagggtgtagatgacaggctgctctatgacattgtattcaagcacttcaaaagaaataaggtggagatttcaaatgcaataaaaaagacatttccattcctcgagggcctccgtgatcgtgatctcatcacaaataaaatgtttgaagattctcaagattcttgtagaaacctggtccctgtacagagagtggtgtacaatgttcttagtgaactggagaagacatttaacctgccagttctggaagcactgttcagcgatgtcaacatgcaggaataccccgatttaattcacatttataaaggctttgaaaatgtaatccatgacaaattgcctctccaagaaagtgaagaagaagagagggaggagaggtctggcctccaactaagtcttgaacaaggaactggtgaaaactcttttcgaagcctgacttggccaccttcgggttccccatctcatgctggtacaaccccacctgaaaatggactctcagagcacccctgtgaaacagaacagataaatgcaaagagaaaagatacaaccagtgacaaagatgattcgctaggaagccaacaaacaaatgaacaatgtgctcaaaaggctgagccaacagagtcctgcgaacaaattgctgtccaagtgaataatggggatgctggaagggagatgccctgcccgttgccctgtgatgaagaaagcccagaggcagagctacacaaccatggaatccaaattaattcctgttctgtgcgactggtggatataaaaaaggaaaagccattttctaattcaaaagttgagtgccaagcccaagcaagaactcatcataaccaggcatctgacataatagtcatcagcagtgaggactctgaaggatccactgacgttgatgagcccttagaagtcttcatctcagcaccgagaagtgagcctgtgatcaataatgacaaccctttagaatcaaatgatgaaaaggagggccaagaagccacttgctcacgaccccagattgtaccagagcccatggatttcagaaaattatctacattcagagaaagttttaagaaaagagtgataggacaagaccacgacttttcagaatccagtgaggaggaggcgcccgcagaagcctcaagcggggcactgagaagcaagcatggtgagaaggctcctatgacttctagaagtacatctacttggagaatacccagcaggaagagacgtttcagcagtagtgacttttcagacctgagtaatggagaagagcttcaggaaacctgcagctcatccctaagaagagggtcaggatcacagccacaagaacctgaaaataagaagtgctcctgtgtcatgtgttttccaaaaggtgtgccaagaagccaagaagcaaggactgaaagtagtcaagcatctgacatgatggataccatggatgttgaaaacaattctactttggaaaaacacagtgggaaaagaagaaaaaagagaaggcatagatctaaagtaaatggtctccaaagagggagaaagaaagacagacctagaaaacatttaactctgaataacaaagtccaaaagaaaagatggcaacaaagaggaagaaaagccaacactagacctttgaaaagaagaagaaaaagaggtccaagaattcccaaagatgaaaatattaattttaaacaatctgaacttcctgtgacctgtggtgaggtgaagggcactctatataaggagcgattcaaacaaggaacctcaaagaagtgtatacagagtgaggataaaaagtggttcactcccagggaatttgaaattgaaggagaccgcggagcatccaagaactggaagctaagtatacgctgcggtggatataccctgaaagtcctgatggagaacaaatttctgccagaaccaccaagcacaagaaaaaagagaatactggaatctcacaacaataccttagttgacccttgtgaggagcataagaagaagaacccagatgcttcagtcaagttctcagagtttttaaagaagtgctcagagacatggaagaccatttttgctaaagagaaaggaaaatttgaagatatggcaaaggcggacaaggcccattatgaaagagaaatgaaaacctatatccctcctaaaggggagaaaaaaaagaagttcaaggatcccaatgcacccaagaggcctcctttggcctttttcctgttctgctctgagtatcgcccaaaaatcaaaggagaacatcctggcctgtccattgatgatgttgtgaagaaactggcagggatgtggaataacaccgctgcagctgacaagcagttttatgaaaagaaggctgcaaagctgaaggaaaaatacaaaaaggatattgctgcatatcgagctaaaggaaagcctaattcagcaaaaaagagagttgtcaaggctgaaaaaagcaagaaaaagaaggaagaggaagaagatgaagaggatgaacaagaggaggaaaatgaagaagatgatgataaataagttgcttctagtgcagtttttttcttgtctataaagcatttaagctgcctgtacacaactcactccttttaaagaaaaaaacttcaacgtaagactgtgtaagatttgtttttaaaccgtacactgtgtttttttgtatagttaaccactaccgaatgtgtcttcagatagccctgtcctggtggtatttagccactaacctttgcctggtacagtatgggggttgtaaattggcatggaaatttaaagcaggttcttgttagtgcacagcacaaattagttgtataggaggatggtagttttttcaccttcagttgtctctgatgtagcttatacaaaacatttgttgttctgttaactgaatgccactctgtaattgcaaaaaaaaaaaacagttgcagctgttttgttgacattctgaatgcttctaagtaaatacaatttttaaaaaaccgtatgagggaactgtgtagacaaggtaccaggtcagtcttcttccatgttctattagctccacaaagccaatctcaatccctcaaaacaatcttgtcatacttgaaaatatgacactctagtcaaagccttggtaaaataatcagtgtttccaatctgtcctgttacaaaagaaacagattattattgaacttatgcaaataaccattgtcataagaatgtttatgaatagtttccaaattatggcaaattcatgtagagagagaaaagtaactgttttggttttgctcacaaaagtctactttacctaagggctgtcagatataagtaacttaaaagaaagagaagttttcttgacttttgaaaacaaaatatgaaaagaatcggcaatgtttcaaacaaaaagtcataaaagtcactttattcctccatcaaaaaaaaaaaaaaaaaaaaaa

SEQ ID NO: 927 - protein, 879 aa, Homo sapien
MAGGGGDLSTRRLNECISPVANEMNHLPAHSHDLQRMFTEDQGVDDRLLYDIVFKHFKRNKVEISNAIKKTFPFLEGLRDRDLITNKMFEDSQDSCRNLVPVQRVVYNVLSELEKTFNLPVLEALFSDVNMQEYPDLIHIYKGFENVIHDKLPLQESEEEEREERSGLQLSLEQGTGENSFRSLTWPPSGSPSHAGTTPPENGLSEHPCETEQINAKRKDTTSDKDDSLGSQQTNEQCAQKAEPTESCEQIAVQVNNGDAGREMPCPLPCDEESPEAELHNHGIQINSCSVRLVDIKKEKPFSNSKVECQAQARTHHNQASDIIVISSEDSEGSTDVDEPLEVFISAPRSEPVINNDNPLESNDEKEGQEATCSRPQIVPEPMDFRKLSTFRESFKKRVIGQDHDFSESSEEEAPAEASSGALRSKHGEKAPMTSRSTSTWRIPSRKRRFSSSDFSDLSNGEELQETCSSSLRRGSGSQPQEPENKKCSCVMCFPKGVPRSQEARTESSQASDMMDTMDVENNSTLEKHSGKRRKKRRHRSKVNGLQRGRKKDRPRKHLTLNNKVQKKRWQQRGRKANTRPLKRRRKRGPRIPKDENINFKQSELPVTCGEVKGTLYKERFKQGTSKKCIQSEDKKWFTPREFEIEGDRGASKNWKLSIRCGGYTLKVLMENKFLPEPPSTRKKRILESHNNTLVDPCEEHKKKNPDASVKFSEFLKKCSETWKTIFAKEKGKFEDMAKADKAHYEREMKTYIPPKGEKKKKFKDPNAPKRPPLAFFLFCSEYRPKIKGEHPGLSIDDVVKKLAGMWNNTAAADKQFYEKKAAKLKEKYKKDIAAYRAKGKPNSAKKRVVKAEKSKKKKEEEEDEEDEQEEENEEDDDK

SEQ ID NO: 928 - DNA, 1590 bp, Homo sapien
gaggcagttctgttgccactctctctcctgtcaatgatggatctcagaaataccccagccaaatctctggacaagttcattgaagactatctcttgccagacacgtgtttccgcatgcaaatcgaccatgccattgacatcatctgtgggttcctgaaggaaaggtgcttccgaggtagctcctaccctgtgtgtgtgtccaaggtggtaaagggtggctcctcaggcaagggcaccaccctcagaggccgatctgacgctgacctggttgtcttcctcagtcctctcaccacttttcaggatcagttaaatcgccggggagagttcatccaggaaattaggagacagctggaagcctgtcaaagagagagagcactttccgtgaagtttgaggtccaggctccacgctggggcaacccccgtgcgctcagcttcgtactgagttcgctccagctcggggagggggtggagttcgatgtgctgcctgcctttgatgccctgggtcagttgactggcagctataaacctaacccccaaatctatgtcaagctcatcgaggagtgcaccgacctgcagaaagagggcgagttctccacctgcttcacagaactacagagagacttcctgaagcagcgccccaccaagctcaagagcctcatccgcctagtcaagcactggtaccaaaattgtaagaagaagcttgggaagctgccacctcagtatgccctggagctcctgacggtctatgcttgggagcgagggagcatgaaaacacatttcaacacagcccaaggatttcggacggtcttggaattagtcataaactaccagcaactctgcatctactggacaaagtattatgactttaaaaaccccattattgaaaagtacctgagaaggcagctcacgaaacccaggcctgtgatcctggacccggcggaccctacaggaaacttgggtggtggagacccaaagggttggaggcagctggcacaagaggctgaggcctggctgaattacccatgctttaagaattgggatgggtccccagtgagctcctggattctgctggctgaaagcaacagtacagacgatgagaccgacgatcccaggacgtatcagaaatatggttacattggaacacatgagtaccctcatttctctcatagacccagcacgctccaggcagcatccaccccacaggcagaagaggactggacctgcaccatcctctgaatgccagtgcatcttgggggaaagggctccagtgttatctggaccagttccttcattttcaggtgggactcttgatccagagaagacaaagctcctcagtgagctggtgtataatccaagacagaacccaagtctcctgactcctggccttctatgccctctatcctatcatagataacattctccacagcctcacttcattccacctattctctgaaaatattccctgagagagaacagagagatttagataagagaatgaaattccagccttgactttcttctgtgcacctgatgggagggtaatgtctaatgtattatcaataacaataaaaataaagcaaataccaaaaa

SEQ ID NO: 929 - protein, 400 aa, Homo sapien
MMDLRNTPAKSLDKFIEDYLLPDTCFRMQIDHAIDIICGFLKERCFRGSSYPVCVSKVVKGGSSGKGTTLRGRSDADLVVFLSPLTTFQDQLNRRGEFIQEIRRQLEACQRERALSVKFEVQAPRWGNPRALSFVLSSLQLGEGVEFDVLPAFDALGQLTGSYKPNPQIYVKLIEECTDLQKEGEFSTCFTELQRDFLKQRPTKLKSLIRLVKHWYQNCKKKLGKLPPQYALELLTVYAWERGSMKTHFNTAQGFRTVLELVINYQQLCIYWTKYYDFKNPIIEKYLRRQLTKPRPVILDPADPTGNLGGGDPKGWRQLAQEAEAWLNYPCFKNWDGSPVSSWILLAESNSTDDETDDPRTYQKYGYIGTHEYPHFSHRPSTLQAASTPQAEEDWTCTIL

SEQ ID NO: 930 - DNA, 1686 bp, Homo sapien
ccacgcgtccgggcgtaagccaggcgtgttaaagccggtcggaactgctccggagggcacgggctccgtaggcaccaactgcaaggacccctccccctgcgggcgctcccatggcacagttcgcgttcgagagtgacctgcactcgctgcttcagctggatgcacccatccccaatgcaccccctgcgcgctggcagcgcaaagccaaggaagccgcaggcccggccccctcacccatgcgggccgccaaccgatcccacagcgccggcaggactccgggccgaactcctggcaaatccagttccaaggttcagaccactcctagcaaacctggcggtgaccgctatatcccccatcgcagtgctgcccagatggaggtggccagcttcctcctgagcaaggagaaccagtctgaaaacagccagacgcccaccaagaaggaacatcagaaagcctgggctttgaacctgaacggttttgatgtagaggaagccaagatccttcggctcagtggaaaaccacaaaatgcgccagagggttatcagaacagactgaaagtactctacagccaaaaggccactcctggctccagccggaagacctgccgttacattccttccctgccagaccgtatcctggatgcgcctgaaatccgaaatgactattacctgaaccttgtggattggagttctgggaatgtactggccgtggcactggacaacagtgtgtacctgtggagtgcaagctctggtgacatcctgcagcttttgcaaatggagcagcctggggaatatatatcctctgtggcctggatcaaagagggcaactacttggctgtgggcaccagcagtgctgaggtgcagctatgggatgtgcagcagcagaaacggcttcgaaatatgaccagtcactctgcccgagtgggctccctaagctggaacagctatatcctgtccagtggttcacgttctggccacatccaccaccatgatgttcgggtagcagaacaccatgtggccacactgagtggccacagccaggaagtgtgtgggctgcgctgggccccagatggacgacatttggccagtggtggtaatgataacttggtcaatgtgtggcctagtgctcctggagagggtggctgggttcctctgcagacattcacccagcatcaaggggctgtcaaggccgtagcatggtgtccctggcagtccaatgtcctggcaacaggagggggcaccagtgatcgacacattcgcatctggaatgtgtgctctggggcctgtctgagtgccgtggatgcccattcccaggtgtgctccatcctctggtctccccattacaaggagctcatctcaggccatggctttgcacagaaccagctagttatttggaagtacccaaccatggccaaggtggctgaactcaaaggtcacacatcccgggtcctgagtctgaccatgagcccagatggggccacagtggcatccgcagcagcagatgagaccctgaggctatggcgctgttttgagttggaccctgcgcggcggcgggagcgggagaaggccagtgcagccaaaagcagcctcatccaccaaggcatccgctgaagaccaacccatcacctcagttgttttttatttttctaataaagtcatgtctcccttcatgtttttttttttaaaa

SEQ ID NO: 931 - protein, 499 aa, Homo sapien
MAQFAFESDLHSLLQLDAPIPNAPPARWQRKAKEAAGPAPSPMRAANRSHSAGRTPGRTPGKSSSKVQTTPSKPGGDRYIPHRSAAQMEVASFLLSKENQSENSQTPTKKEHQKAWALNLNGFDVEEAKILRLSGKPQNAPEGYQNRLKVLYSQKATPGSSRKTCRYIPSLPDRILDAPEIRNDYYLNLVDWSSGNVLAVALDNSVYLWSASSGDILQLLQMEQPGEYISSVAWIKEGNYLAVGTSSAEVQLWDVQQQKRLRNMTSHSARVGSLSWNSYILSSGSRSGHIHHHDVRVAEHHVATLSGHSQEVCGLRWAPDGRHLASGGNDNLVNVWPSAPGEGGWVPLQTFTQHQGAVKAVAWCPWQSNVLATGGGTSDRHIRIWNVCSGACLSAVDAHSQVCSILWSPHYKELISGHGFAQNQLVIWKYPTMAKVAELKGHTSRVLSLTMSPDGATVASAAADETLRLWRCFELDPARRREREKASAAKSSLIHQGIR

SEQ ID NO: 932 - DNA, 1999 bp, Homo sapien
gccgggagcgccgctccagcgaggcgcgggctgtggggccgccgcgtgcctggccccgctcgcccgtgccggccgctcgcccgccatgcctggcttcgactacaagttcctggagaagcccaagcgacggctgctgtgcccactgtgcgggaagcccatgcgcgagcctgtgcaggtttccacctgcggccaccgtttctgcgatacctgcctgcaggagttcctcagtgaaggagtcttcaagtgccctgaggaccagcttcctctggactatgccaagatctacccagacccggagctggaagtacaagtattgggcctgcctatccgctgcatccacagtgaggagggctgccgctggagtgggccactacgtcatctacagggccacctgaatacctgcagcttcaatgtcattccctgccctaatcgctgccccatgaagctgagccgccgtgatctacctgcacacttgcagcatgactgccccaagcggcgcctcaagtgcgagttttgtggctgtgacttcagtggggaggcctatgagagccatgagggtatgtgcccccaggagagtgtctactgtgagaataagtgtggtgcccgcatgatgcggcggctgctggcccagcatgccacctctgagtgccccaagcgcactcagccctgcacctactgcactaaggagttcgtctttgacaccatccagagccaccagtaccagtgcccaaggctgcctgttgcctgccccaaccaatgtggtgtgggcactgtggctcgggaggacctgccaggccatctgaaggacagctgtaacaccgccctggtgctctgcccattcaaagactccggctgcaagcacaggtgccctaagctggcaatggcacggcatgtggaggagagtgtgaagccacatctggccatgatgtgtgccctggtgagccggcaacggcaggagctgcaggagcttcggcgagagctggaggagctatcagtgggcagtgatggcgtgctcatctggaagattggcagctatggacggcggctacaggaggccaaggccaagcccaaccttgagtgcttcagcccagccttctacacacataagtatggttacaagctgcaggtgtctgcattcctcaatggcaatggcagtggtgagggcacacacctctcactgtacattcgtgtgctgcctggtgcctttgacaatctccttgagtggccctttgcccgccgtgtcaccttctccctgctggatcagagcgaccctgggctggctaaaccacagcacgtcactgagaccttccaccccgacccaaactggaagaatttccagaagccaggcacgtggcggggctccctggatgagagttctctgggctttggttatcccaagttcatctcccaccaggacattcgaaagcgaaactatgtgcgggatgatgcagtcttcatccgtgctgctgttgaactgccccggaagatcctcagctgagtgcaggtggggttcgaggggaaaggacgatggggcatgacctcagtcaggcactggctgaacttggagagggggccggacccccgtcagctgcttctgctgcctaggttctgttaccccatcctccctcccccagccaccaccctcaggtgcctccaattggtgcttcagccctggcccctgtggggaacaggtcttggggtcatgaagggctggaaacaagtgaccccagggcctgtctcccttcttgggtagggcagacatgccttggtgccggtcacactctacacggactgaggtgcctgctcaggtgctatgtcccaagagccataagggggtgggaattggggagggagaaagggtagttcaaagagtctgtcttgagatctgattttttccccctttacctagctgtgccccctctggttatttatttccttagtgccaggagggcacagcaggggagccctgatttttaataaatccggaattgtatttatt

SEQ ID NO: 933 - protein, 470 aa, Homo sapien
MPGFDYKFLEKPKRRLLCPLCGKPMREPVQVSTCGHRFCDTCLQEFLSEGVFKCPEDQLPLDYAKIYPDPELEVQVLGLPIRCIHSEEGCRWSGPLRHLQGHLNTCSFNVIPCPNRCPMKLSRRDLPAHLQHDCPKRRLKCEFCGCDFSGEAYESHEGMCPQESVYCENKCGARMMRRLLAQHATSECPKRTQPCTYCTKEFVFDTIQSHQYQCPRLPVACPNQCGVGTVAREDLPGHLKDSCNTALVLCPFKDSGCKHRCPKLAMARHVEESVKPHLAMMCALVSRQRQELQELRRELEELSVGSDGVLIWKIGSYGRRLQEAKAKPNLECFSPAFYTHKYGYKLQVSAFLNGNGSGEGTHLSLYIRVLPGAFDNLLEWPFARRVTFSLLDQSDPGLAKPQHVTETFHPDPNWKNFQKPGTWRGSLDESSLGFGYPKFISHQDIRKRNYVRDDAVFIRAAVELPRKILS

SEQ ID NO: 934 - DNA, 2149 bp, Homo sapien
gttctgtgttcgcttgggtagaggaagccgtgaggccggagcttaggtcgggaagggatggatcgctgagccgatagcgtccgctaggctgtctgcctcggtacctgttactgctgctacttcctcgtttgacaccttcctggaatctctcttgatttttgaggaaatacctagtaacaaacatgactgagttctggcttatatctgctcctggggagaaaacctgtcagcaaacatgggagaaattgcatgcggcaacttcaaagaacaataatcttgctgtcacttccaagttcaatattcctgacttaaaggttggcacgttggatgtcttggttggcttgtcagatgaactggctaaactggatgcatttgtagaaggagtggttaagaaagtagctcaatacatggctgatgtattggaagatagcaaagacaaagttcaagagaatctgttggctaatggagtggacttggttacttatataacaaggttccagtgggacatggccaaatatccaatcaagcagtccctgaaaaatatttctgaaataattgccaagggagtaactcagattgataatgacctgaaatctcgagcatctgcatacaataacctgaaaggaaatcttcagaatttggaacgaaagaatgcaggaagtttgctaactagaagtctagcagaaattgtgaagaaggatgactttgttcttgattcagagtatctcgtcacattactggtagtagttcccaagttaaaccacaacgactggattaagcagtatgaaacactagccgaaatggtagttccaaggtctagcaatgttctttcagaggaccaagacagttacctgtgtaatgtcaccttgtttaggaaggcagttgatgacttcagacacaaagccagagaaaacaaattcattgttcgtgacttccagtataatgaagaggagatgaaagcagataaagaagaaatgaacaggctttctactgataagaaaaaacaatttggaccacttgtacggtggctgaaagtgaattttagtgaagcatttattgcatggattcacgtgaaagcattacgggttttcgttgagtctgttttaaggtatggcttgccagtgaacttccaagcaatgctacttcagcccaataagaaaactttgaagaaactgagagaagtattacatgaattgtataaacatctagacagcagtgcagcagctattattgatgctcctatggatattccaggtttaaacctgagtcaacaagaatactacccctatgtgtactacaagattgattgcaacttgctggaattcaagtgaaaatgggctcctcccccgacaatcctgtccttgtgtttgtgtgtgctaacagaaataagttgcagtatggtcgtacttttaactctagtatcctttgcttgcttcttaccccctttcctaggtgaattctcccacagtggtctgtatctcaacattttctttttaaaggaaaaaatatatatatatagtttctttttattgatcaggtctgtaaatgtgtactaaaaaaatcagagtttatttataaacagaatagtttatttaaagagaaggtctcttccttattgatatcatggtatgcattaattccatttgttactattgtgcacaaaagccctgttcacaggggaatggtgtaaacatttatactgttttgttcactgtatttagtagacataactgttgaatagttactgaatcatgatgtaaagaatatgtgaccatcttcaggtatgggatttctgaacgtttcaaatttcaatcaatgagcactgtcaacacccacaggagagaataaaattacctgtgcaaaggtgtattgtggtgtgtgtaacttaagattacagttctgtttgagagttaaatgatgtcatagctcacttgctatgctgcttccaggattttgttatatgctgaggtgtaaccatttgtgttgtctgactttcgtatgatttaattgagccaaatttgggtcagaacacaaatttgaagatgacttttcagtatatgatgggtatttacatttgaacactagaattttaggtctctcaaataattaagaatagagccagttttgaataaagtctagcagaactatg

SEQ ID NO: 935 - protein, 382 aa, Homo sapien
MTEFWLISAPGEKTCQQTWEKLHAATSKNNNLAVTSKFNIPDLKVGTLDVLVGLSDELAKLDAFVEGVVKKVAQYMADVLEDSKDKVQENLLANGVDLVTYITRFQWDMAKYPIKQSLKNISEIIAKGVTQIDNDLKSRASAYNNLKGNLQNLERKNAGSLLTRSLAEIVKKDDFVLDSEYLVTLLVVVPKLNHNDWIKQYETLAEMVVPRSSNVLSEDQDSYLCNVTLFRKAVDDFRHKARENKFIVRDFQYNEEEMKADKEEMNRLSTDKKKQFGPLVRWLKVNFSEAFIAWIHVKALRVFVESVLRYGLPVNFQAMLLQPNKKTLKKLREVLHELYKHLDSSAAAIIDAPMDIPGLNLSQQEYYPYVYYKIDCNLLEFK

SEQ ID NO: 936 - DNA, 3308 bp, Homo sapien
gcgagcgggggcgcgggtggcgcggcgggacgcgagcggcgagccggagcgcgagcccgctcccgcaccatggaggaggacgacagctacgttcccagtgacctgacagcagaggagcgtcaagaactggagaacatccgacggagaaaacaggagctgctggctgacattcagaggctgaaggatgagatagcagaagtagctaatgaaattgaaaacctgggatccacagaggaaaggaaaaacatgcagaggaacaaacaggtagccatgggcaggaaaaaatttaatatggaccctaaaaaggggatccagttcttaatagagaacgacctcctgaagaacacttgtgaagacattgcccagttcttatataaaggcgaagggctcaacaagacagccatcggcgactacctaggggagagagatgagtttaatatccaggttcttcatgcatttgtggagctgcatgagttcactgatcttaatctcgtccaggcactacggcagttcctgtggagcttccggctacccggagaggcccagaagatcgaccggatgatggaggcgtttgcccagcgatattgtcagtgcaataatggcgtgttccagtccacggatacttgttacgtcctctcctttgccatcatcatgttgaacaccagtctgcacaaccccaatgtcaaagataagcccactgtggagaggttcattgccatgaaccgaggcatcaatgatgggggagacctgccggaggagctcctccggaatctctatgagagcataaaaaatgaaccctttaaaatcccagaagacgacgggaatgacctcactcacactttcttcaatccagaccgagaaggctggctattgaaactcggtggcagggtaaagacttggaagagacgctggttcattctgactgacaactgcctttactactttgagtataccacggataaggagccccgtggaatcatccctttagagaatctgagtatccgggaagtggaggactccaaaaaaccaaactgctttgagctttatatccccgacaataaagaccaagttatcaaggcctgcaagaccgaggctgacgggcgggtggtggaggggaaccacatgtttaccggatctcagctccgacgccccgaggagaaggaggagtggattaagtgcattaaagcagccatcagcagggaccctttctacgaaatgctcgcagcacggaaaaagaaggtctcctccacgaagcgacactgagcgtgcagccaagggcgttggtctgcgggggccttggagctcctgctcttctcccgcacctccatggatgcactgctgccgagcagagcgtcctctgccaggccccgccctggattcctagagactagcttcagcttttgctattttttttaagtgggagaagggtgggcagttatcactggggaagagaggaccggccacctgtccagcatgggctccagagccttcctctctcacagggcagagctcttgtcggcagggcagcctcctggccagtttctctgctcagtgttctggtagcagagctcagagccaactgtttacctcttggttgtccccgtgaagaagccttcaaaccctgcaccataaatacatgtgtccatatattattatatgttaagagaaaaaggtggaaaggaagagaagccacatactataaagatctattttttttttttaagagagaacgtagggctgttcaggtgcattctgccctggctgcgctggggagcttctccctggagaagagcacctggggctgcggccaaggggcatcagcctgggcccgcggcagggcctggcctgcctctcctgtgctgtgggagctcgctgcctggtgcttgtcttggcgagatggacaggtgaggtcgaggacgcagagggcagaggcccagtggagcctcagacggcacagtcagagtcgggggcctgcctggccggggtcgcagtcggcagcagcgtgcagtccggcatctcccgcggatgcttttccatcccaagtgcctgcggagcccgaggagaggagagagctgactggacgcttacgttattttcctccttcagaatccaagttcttgttgggctttaaagtagaaagtcagcattttccttgagctaaatacctaataaccaaaactgtgaggaaggttatcgggacagaggttccggataacctgtttcattttgggttttcttcctcttccccagactccagtcctcgttctagaggaaggagtaggacttccccgatccccgtagcttcagctttttctgcctcaaaaccagccctaactggactactctggatgcattttgtggtgggccccctagagggaagatgggcctttatctgctccgtggggtgcactggagtgaggggggtggccgggctgcctctcgcatctctgtcttcccctgcaggcgctgtgtgagctggccctgcccctcctcattacagtatgaagggagccgtgacacgcagcattttcctgccgttctctcagggactctcagggcagctcctgccactccgccagggccagcatgccagtccaggcagagcaggtggctggctgtctggccgtctcgccccgcccctccacaggaccctggaccagggcggtgcagggcgcagccccgaggaggcaggtggaggagctgcgggttttcacagggccgcgtcgccacggctcctctgatcctttagggttggcgagcatctctggaaatagcttttgcagaggagtggtgggaggaatagagggggacagtctgtcacctccctccccgccactttgtgtagatcctacctggagggaatggctttaggcacttttgtgccagagcttgtgagggtgacagaagagggtccaggctggaaacctgaactttctgggtgggagaaccaggtggtgcctgccgaggtctgggcgtgtttgggccggtgctggagcctgtccagctggcccgggccctggcctggttctcaagtgtttcctagacagagaggcacctgggtcagtattagtctatttatcagaggtgtaaataatctatgtatagtttttctccttttagattattttgtatttgtttaaaagaagttttgtcaaaatacaaaaatataaagaaatgactgaaagttgttgacagggtttttaagaaataattattctaattgtttttgtttgtttgtttttgccttgtaaactagcgccaaggaactgcagcaaataaactccaactctgcccaagcaaaaaaaaaa

SEQ ID NO: 937 - protein, 397 aa, Homo sapien
MEEDDSYVPSDLTAEERQELENIRRRKQELLADIQRLKDEIAEVANEIENLGSTEERKNMQRNKQVAMGRKKFNMDPKKGIQFLIENDLLKNTCEDIAQFLYKGEGLNKTAIGDYLGERDEFNIQVLHAFVELHEFTDLNLVQALRQFLWSFRLPGEAQKIDRMMEAFAQRYCQCNNGVFQSTDTCYVLSFAIIMLNTSLHNPNVKDKPTVERFIAMNRGINDGGDLPEELLRNLYESIKNEPFKIPEDDGNDLTHTFFNPDREGWLLKLGGRVKTWKRRWFILTDNCLYYFEYTTDKEPRGIIPLENLSIREVEDSKKPNCFELYIPDNKDQVIKACKTEADGRVVEGNHMFTGSQLRRPEEKEEWIKCIKAAISRDPFYEMLAARKKKVSSTKRH

SEQ ID NO: 938 - DNA, 1378 bp, Homo sapien
ctgattttgtttggaattttccagttcttgcattggcataatgaggagcaggagggaaaaggcctttactagattcttgtcacaaatttctagtcaatgtgttcttaactgggtggagaaagaatggaaaaccttcaagatctcatccaagcaaatggcaacaacttagaagaaatcatttagtgacttaattctttctaaagatgaaatgggattgttttttactcgtattccttgttaaatcattatttaagccgttcttattgaccaattcctgacacttgattgtctcctaatgctttatccatcaccacctgggctcctgcatcctcactgtggaatcaggcaccagccacataatgttccagacaaagcctggaagggtgtggacccagacgtggagtggagtgattctcttgacgtttacatatatctctgtgtctctccatcattccaaagctaaatgtacatgtttagaataacttattttataaactcttcgggagacatgttgagatttgaccgtaatgaaagccacattttcctgaattatgatggtctgcattagtctcatgtgaaaggggaatgtggaagctcagggttaatgtagtggttgttttggtttttatttgctcaattttgtctgtactcatgtcattcagaaacctgaagtgtggctgcatcttgctgctaatgtgtgatgttgacgcctaactgaatttgaacagctcaccactgtgcctacatttaaaaatacttctctctcttttctaaaaagctttaactgtagtgcctcctaataagcagtatgtttgtttcattgtgagattgcagttctgtatttcgaatgagtctaagaaccacagggataatactgtgcagatttcctgttctttacctggctctgcttccagcagtattgacacctagtccttgctgcattgtacagtagcttttcaaactgcagttttattgctaagtttttagtatgggtgatactggagtcttatcatttgaagtgtttgcttttctacttttacagtaaaacctcattaattctgaaatttaagataatgagttaagctgaagagtttactgaagcaaattaatagtgaggaagcctatttgaactacttaaacagtattaaagccctttttaaaaagcacctatttgggatcatttgaggtcaagaattcgagatcagcctgaccaacatggtgaaaccccatctctactaaaaatacaaaaaagttagctgggcgtggtggcacacacctgtagtcccagctactcaggaggctgaggcaggagaattgcttgaacctgggaggtagaggttgcactgagccgagatcgcgccactgcactctagcctgg

SEQ ID NO: 939 - DNA, 4404 bp, Homo sapien
ttcggcacgaggcgcggttgcacgtcggccccagccctgaggagccggaccgatgtggaaactgctgcccgccgcgggcccggcaggaggagaaccatacagacttttgactggcgttgagtacgttgttggaaggaaaaactgtgccattctaattgaaaatgatcagtcgatcagccgaaatcatgctgtgttaactgctaacttttctgtaaccaacctgagtcaaacagatgaaatccctgtattgacattaaaagataattctaagtatggtacctttgttaatgaggaaaaaatgcagaatggcttttcccgaactttgaagtcgggggatggtattacttttggagtgtttggaagtaaattcagaatagagtatgagcctttggttgcatgctcttcttgtttagatgtctctgggaaaactgctttaaatcaagctatattgcaacttggaggatttactgtaaacaattggacagaagaatgcactcaccttgtcatggtatcagtgaaagttaccattaaaacaatatgtgcactcatttgtggacgtccaattgtaaagccagaatattttactgaattcctgaaagcagttcagtccaagaagcagcctccacaaattgaaagtttttacccacctcttgatgaaccatctattggaagtaaaaatgttgatctgtcaggacggcaggaaagaaaacaaatcttcaaagggaaaacatttatatttttgaatgccaaacagcataagaaattgagttccgcagttgtctttggaggtggggaagctaggttgataacagaagagaatgaagaagaacataatttctttttggctccgggaacgtgtgttgttgatacaggaataacaaactcacagaccttaattcctgactgtcagaagaaatggattcagtcaataatggatatgctccaaaggcaaggtcttagacctattcctgaagcagaaattggattggcggtgattttcatgactacaaagaattactgtgatcctcagggccatcccagtacaggattaaagacaacaactccaggaccaagcctttcacaaggcgtgtcagttgatgaaaaactaatgccaagcgccccagtgaacactacaacatacgtagctgacacagaatcagagcaagcagatacatgggatttgagtgaaaggccaaaagaaatcaaagtctccaaaatggaacaaaaattcagaatgctttcacaagacgcacccactgtaaaggagtcctgcaaaacaagctctaataataatagtatggtatcaaatactttggctaagatgagaatcccaaactatcagctttcaccaactaaattgccaagtataaataaaagtaaagatagggcttctcagcagcagcagaccaactccatcagaaactactttcagccgtctaccaaaaaaagggaaagggatgaagaaaatcaagaaatgtcttcatgcaaatcagcaagaatagaaacgtcttgttctcttttagaacaaacacaacctgctacaccctcattgtggaaaaataaggagcagcatctatctgagaatgagcctgtggacacaaactcagacaataacttatttacagatacagatttaaaatctattgtgaaaaattctgccagtaaatctcatgctgcagaaaagctaagatcaaataaaaaaagggaaatggatgatgtggccatagaagatgaagtattggaacagttattcaaggacacaaaaccagagttagaaattgatgtgaaagttcaaaaacaggaggaagatgtcaatgttagaaaaaggccaaggatggatatagaaacaaatgacactttcagtgatgaagcagtaccagaaagtagcaaaatatctcaagaaaatgaaattgggaagaaacgtgaactcaaggaagactcactatggtcagctaaagaaatatctaacaatgacaaacttcaggatgatagtgagatgcttccaaaaaagctgttattgactgaatttagatcactggtgattaaaaactctacttccagaaatccgtctggcataaatgatgattatggtcaactaaaaaatttcaagaaattcaaaaaggtcacatatcctggagcaggaaaacttccacacatcattggaggatcagatctaatagctcatcatgctcgaaagaatacagaactagaagagtggctaaggcaggaaatggaggtacaaaatcaacatgcaaaagaagagtctcttgctgatgatctttttagatacaatccttatttaaaaaggagaagataactgaggattttaaaaagaagccatggaaaaacttcctagtaagcatctacttcaggccaacaaggttatatgaatatatagtgtatagaagcgatttaagttacaatgttttatggcctaaatttattaaataaaatgcacaaaactttgattcttttgtatgtaacaattgtttgttctgttttcaggctttgtcattgcatctttttttcatttttaaatgtgttttgtttattaaatagttaatatagtcacagttcaaaattctaaatgtacgtaaggtaaagactaaagtcacccttccaccattgtcctagctacttggttcccctcagaaaaaaattcatgatactcatttcttatgaatctttccagggatttttgagtcctattcaaattcctatttttaaataatttcctacacaaatgatagcataacatatgcagtgttctacaccttgcttttttacttagtagattaaaaattataggaatatcaatataatgtttttaatattttttcttttccattatgctgtagtcttacctaaactctggtgatccaaacaaaatggcttcagtggtgcagatgtcacctacatgttattctagtactagaaactgaagaccatgtggagacttcatcaaacatgggtttagttttcaccagaatggaaagacctgtacccctttttggtggtcttactgagctgggtgggtgtctgttttgagcttatttagagtcctagttttcctacttataaagtagaaatggtgagattgttttctttttctaccttaaagggagatggtaagaaacaatgaatgtcttttttcaaactttattgacaagtgattttcaagtctgtgttcaaaaatatattcatgtacctgtgatccagcaagaagggagttccagtcaagagtcactacaactgattagttgtttagagaatgagaaatggaacagtgaggaatggaggccatatttccatgacttcccttgtaaacagaagcaacagaagggacaagaggctggcctctacatcactctcaccttccaaatcttgtggaagtgcatctacttgccagaaccaaattaacttacttccaagttctggctgcttgcaggtggaactccagctgcaagggagttagggaaatgaaggtctttttttaaaagcttctcagccttcctagggaacagaaattgggtgagccaatctgcaatttctactacaggcattgagaccagttagattattgaaatattatagagagttatgaacacttaaattatgatagtggtatgacattggatagaacatgggatactttagaagtagaattgacagggcatattagttgatgaaatggagtcatttgagtctcttaatagccatgtatcataattaccaagtgaagctggtggaacatatggtctccattttacagttaaggaatataatggacagattaatattgttctctgtcatgcccacaatccctttctaaggaagactgccctactatagcagtttttatatttgtcaatttatgaatataatgaatgaggagttctggtacctcctgtctttacaaatattgggtgttgtccagtatttttccctttttaaccattccaatcggtgtgtagtgatgtttcattttggttttaatttgtatatccctgatagctataattgggtcatagaaattctttatacattctagatgcaagtctcttgtcggatatatgtattgagatattacacctagtctgtggcttgactgttttctttatgtcttttgatgaatagaagttttaaattttgacaaggtcaaatttatttttttcttttgtttgatattttttctctccaatttaaccccaagatttcagatattctgctctattatataaactttatatttttatatttgtgatctaccttgaattgatatgtatgttgtgaattatggatcagggttctttttttcccccatacaagtatccagtcattgtaacactgtttattgaaagaattatcctttcctcattaaattaccttgccaattagtaaaaa

SEQ ID NO: 940 - protein, 754 aa, Homo sapien [sequence omitted]

SEQ ID NO: 941 - DNA, 4404 bp, Homo sapien; identical to SEQ ID NO: 939

SEQ ID NO: 942 - protein, 754 aa, Homo sapien [sequence omitted]

SEQ ID NO: 943 - DNA, 3262 bp, Homo sapien
aggaaatggtttctggaaaacgttagtaaggtcagtttttaaacactgaatccaaggttgtcttctggaatatccaaattggttatgaccagaatgtgattcattatactaagctaaaggaatagattaaagaattagcaacagtggccgggtgcagtggctcatgcctgtaaccccagcactttgggggaggcccaggtgggtggatcatttgaggtcaggagtttgagaccagcctggccaacatggtgaaacctaaaaatacaaaaattagccaggtgtggtggcaggtgcttgtaatcccagctgcttgggaggctgaagcaggagaattgcttgaacccggaggcaggggttgcagtgagccaagatcacaccattgcactccagcctgggtggcagagtgagactctgtctcaaaaattaaaaagcaacagtgtatatgcaatagttgcaagatgtaagatcacccaaagagtatgcagagggaaatgagggacagaacccagaaatattaatacccagggagtgaacaggaggaggaccccaagaagttactgagtcagatttttcccactcatccaggtgaaagtttaggtcaataatgtgaaataccagagggattaaatgtctacagaaataaaaccatgtctcacattaagacaaacaagtaggttggagggatattttgaaaggcaaggtgatattaaactttattctgaaagtagtttgttagagaaagaggcatgataagagttgcagttaactgattggaaactatgcagcagatgaaactggaataaaggaaactcatcaggaaatgattatagtaataagggccagaaataagggcttgcttgcctgaactaaaaacaaagaggatacaaaggttctagaaatatttcaaaggaattagctttaattcagcaatactcattgagaatcacctatgcacctggctctgaagatgaagtgctgagtaaacttagacatggaccctgctatcatggagatggcagattattggtcagaatgctcttacctgtcattgtagcaattttgttagatccttaatacctctgaattgctaataaacttgttttggctgaaaaaatagtcctgtgaattttaccatgcagttaaataagaaactaaaagcaaacctaaataccaccaaaaaggttagtagtctgttatatgcattagccttaatctaaggaaatattttattataggtctccttgaagaaaatgatattttcaggaatgctcaagcaggtgttctcatcagcactaatagtcatccaatcttaaggaaaaacagaatatttgatggatttgccgcaggtattgaaattacaaatcacgcaactgcaacactagaaggcaatcagatttttaacaaccggtttggaggcttatttttagcatctggtgttaatgtgacaatgaaagataacaaaataatgaacaatcaagatgccatagaaaaggctgttagtagaggccaatgtttatataaaatatcaagttataccagctatcccatgcatgatttctacagatgtcatacttgtaacaccacagatcgaaatgccatatgtgtgaactgcattaagaagtgccatcagggacatgatgtagagtttattagacatgataggtatgtagcacacttgcttgatatattacccaattactttccccctcacttttctaatatttgggtttcattttgctttaggtttttctgtgactgtggtgctggaacactgtctaatccttgtacattagctggtgagcctacacatgatacagatacactatatgactctgctccacctatagaatctaatacattgcagcacaactgaattccttccctaaagaaaaagtcctgccattgtaacatcataacttaaaacacttttttggaagaagatttaaaatatttgcccatgctacaggaagagactgtattaaaaatggatacacaaggtcagttgacactatgaagctcaagctaccaaaaagaaagtggcaatatattgactcaggatctcaaagctgggtgttttagcattactgtgtaaagacttgaagggacagaagtgaagaaaataagctgcaattttgtacagataccaacttctgaaaagctggtgtttttacaactagcattgaatgcagtccaatttgcagtagtaatcttcaatagacaagcagctttgttgctgcctttatggacatgggtaccaattgcttttgtaatatggtaaaaatgtgagctagcacttctgcgttccttttgattttttttttttaacatgtattcagattgagaaatatgattttaatgccttaatctcatgtagtttgtttttaatttcaagcaaaatcttactgtacttgaatgtgccctgttttgttagcacacctagacttgctgtaactgtactcatgtcccagtatgtacgttctttctatgaaagagaaaacactaatcttaaattatatccagcaatgtttctggtatcctttaagaaaagttaagactattatttccttcccttccctgtgcagcattcaaaaatcacccctagaaaaagtgagtgttttaatgagacttcctaggaagggatgcactgtaaaacaaaagtattcttgtaactcagttttgtgaaaggtaaaaaactactatgttttaagtacactttagaaagtctcttcaaaacaaacagtcctgtatttgaactctgttcatagtttttttttgaacagtttagacaaaactgttggaaattaaaccaatttcctgcattaagctgagacaagtatataaacagccctatacagtttcatagcttttcctcccccatttatgtgtattggtgacagtgggtataaaacagcctgaaagtgtatgcatgtaccataacatttagacttaatatattgtggagtattcaataaccattatgtagaaggtagataagaattaaaagggtttaatttcctagaaagaaaatggaaaaatggtcatttttaaaaaataaagtttattagatcataatgttgtctgaatttaccacctttgtcagaagtcaactcaaagcttccaatgtagtcagtctataattccttaatcaaagtcagcaatttatggacagcttcagcatttacagttgacctttcactagccaggcaaacttcccttaaaattaaaaaaaaaaaaaaaaaaaaaaaaaaaaaaaaaaaaaaaa

SEQ ID NO: 944 - protein, 141 aa, Homo sapien
MKDNKIMNNQDAIEKAVSRGQCLYKISSYTSYPMHDFYRCHTCNTTDRNAICVNCIKKCHQGHDVEFIRHDRYVAHLLDILPNYFPPHFSNIWVSFCFRFFCDCGAGTLSNPCTLAGEPTHDTDTLYDSAPPIESNTLQHN

SEQ ID NO: 945 - DNA, 428 bp, Homo sapien
atgtctcttgtcagctgtctttcagaagacctggtggggcaagtccgtgggcatcatgttgaccgagctggagaaagccttgaactctatcatcgacgtctaccacaagtactccctgataaaggggaatttccatgccgtctacagggatgacctgaagaaattgctagagaccgagtgtcctcagtatatcaggaaaaagggtgcagacgtctggttcaaagagttggatatcaacactgatggtgcagttaacttccaggagttcctcattctggtgataaagatgggcgtggcagcccacaaaaaaagccatgaagaaagccacaaagagtagctgagttactgggcccagaggctgggcccctggacatgtacctgcagaataataaagtcatcaatacctcaaaaaaaaaaaaaaaaaaaaa

SEQ ID NO: 946 - protein, 93 aa, Homo sapien
MLTELEKALNSIIDVYHKYSLIKGNFHAVYRDDLKKLLETECPQYIRKKGADVWFKELDINTDGAVNFQEFLILVIKMGVAAHKKSHEESHKE

SEQ ID NO: 947 - DNA, 5640 bp, Homo sapien
atggcccgaccgccgccactaccggggcctgagggggcctggcggagcccgagcgcggcccggcccgcagcgtggggccccgagcgcggtgaagagattgttttctgaaagctgcgttggaggctgtgacagagctgagagcctgtgtggagcggatggggaggctttctcaataacatggccctttgccattagccttgccatgaccacatttttcaccagcgtccccccctggattcaagatgcaaagcaggaggaggaagtgggctggaaactagttcccaggcctcggggccgggaggcggagagtcaagtgaagtgccaatgtgaaatttcgggaacacctttctcaaatggggagaagctgaggcctcacagcctcccgcaaccagagcagagaccatatagctgccctcagctgcactgtggcaaggcttttgcttccaaatacaagctgtataggcacatggccacccactcagcccagaaaccccaccagtgtatgtactgtgataagatgtttcaccgcaaggaccatctgcggaaccatctgcagacccatgatcctaacaaagaggccctccactgctctgagtgcggtaagaattacaatacgaagctgggctaccggcgccacctggccatgcatgctgccagcagcggtgacctcagctgcaaggtgtgcctgcagacctttgagagtacccaggccctgctagagcacctgaaggcccactcacgccgggtagcaggcggtgccaaggagaagaagcacccctgtgaccactgcgaccggcggttctatactcgtaaggatgtacggcggcacctagtggtgcacacaggccgtaaggacttcctgtgccagtactgtgcccagcggtttggccgtaaggaccacctgacgcgtcatgtcaagaagagccactcgcaggagctgctcaagatcaagacagagcccgtggacatgttaggcctactcagctgcagctccacagtcagtgtgaaggaagagctgagccctgtgctgtgcatggcctctcgggacgtaatggggaccaaggccttccctggcatgttgcccatgggcatgtatggtgcccacatccctaccatgcccagcacgggcgtgccacactccctggtgcacaacacgctgcccatgggtatgagctaccctctggaatcctcacctatctcttccccagctcagctccctccaaaataccagcttggatctacctcatacttgcccgacaaattgcccaaagtggaggtggatagttttctggcggagcttcctggaagcctgtctctctcatccgctgaaccccagcccgcctcacctcagccggcggcagctgcggccctcctagatgaagcactgcttgccaagagccccgccaacctctctgaggccctctgcgctgctaatgtggacttctcccacctactgggctttcttccactcaacctgcccccgtgtaacccacctggggccacaggaggcctggtcatgggctactcccaggctgaggcacagcccctgcttaccactttgcaagctcagcctcaagattccccaggagctgggggaccactgaactttgggcctctgcactccttgcctcctgtcttcacgtctggcctgagtagcaccaccctgcctcgtttccatcaagcattccagtagcccccacagaggccctcagctcagtttttggctctgttatggagccttagtacccaccccgtctgtgtcccccatgaaggcagctgagctttcagagctgggttcaaaaaaaaaaattccagtgtctgtatacaggagcacttggtttgggggttcaggctctaggatcgattccagaaggagccttgagccccaaccccgtgaaaagatctcataccgtaggacttcaggtattatttacttttatttttttgacctgaatcgggagccacacttggccctcttcctctccaaagcgccagaacctccttctctttggagaatggggaggcctcttggagacacagagggtttcaccttggatgacctctagagaaattgcccaagaagcccaccttctggtcccaacctgcagaccccacagcagtcagttggtcaggccctgctgtagaaggtcacttggctccattgcctgcttccaaccaatgggcaggagagaaggcctttatttctcgcccacccattcctcctgtaccagcacctccgttttcagtcagtgttgtccagcaacggtaccgtttacacagtcacctcagacacaccatttcacctcccttgccaagctgttagccttagagtgattgcagtgaacactgtttacacaccgtgaatccattcccatcagtccattccagttggcaccagcctgaaccatttggtacctggtgttaactggagtcctgtttacaaggtggagtcggggcttgctgacttctcttcatttgaggtcacatttttcccccgtggggaaataaactgactttggactgcttcagtctctgccatcttccatgactgcatttgttcctgcctgcctcggcggtatccacagaagacaggcaagaggattggagcagttttctcacaggtctgcaattctgtttttctccaagtacattatgaccccctcatccttctcttgaactggagaggggaagaaatgaaaggcatgcccacgtccgtcacctccccatcccctagtccccaccttgaacatcatgagctgttgttattagtcttggaagcagagtctgggttggtgtggatagcaaaggaggaagtctgagcccctcattggtcttcctcccacctgtcccttttccgggaagttgtggaattgttggaagaagagtttgcagaaggttaggaatgggtagatagctaagtcctaatctatgggtacattgttgtgtcccaaaccaaaattttccttatccacaatgtcccttctgtctcttccactttacagtggactcggccactgtgcataggcttctctgctctccatcaaatcacttccactttcctgtgcccccacccccgcctccagttttccgctagtatccggcaaggtttcttgcaacaaatgattagttcttttcttctgactcgtggggctccctgctgcagagagcacagcccttgcctggagcccaggaaccccatccttgcttcatctcagttcttcatgggcttcactcttcccactcacggaagggaggtagctcagggacctccactgtgggacccttgagatgcttccactctgattcagaaacacacttctacctctttactgttaactcttaacagatgcagtcagcagtttctgggcacttctctcagtaggtgcctcatgctgacttctccactagggtttcaggacaaactaccaaggaattgcctcagcctcctaccagtcctccctcacccaccttctgtctaggttcacttggtttgtcatcaggaactgagcaggtccaggactcagctttctgcttcagcctaagccagtactccttgtttgaggtaaaagccttaaaatttagctccctagctcttgattagaagcaatttggagtaagtgtgttttgatttaggcagggtagcttgggatacctttttaaaaacaccagatattaaaatgtctggcaaggttagaatcagactagatgatttgcttctaaaaattagtttcagtgagtcccagggactaattaaggtttattttaaaaagtgtctaccttggtacgcagccacctcctgcatgctgtgcatgttattgggacttgtattataggcgatggtatgtgagaatccagttgggactcgctgttgccatcctctttgttgtatctggttttcatcactagactcagcaacccttctcaccttaactgccaccttccctacactctcagtttacagaggccactgggcctctggctgcagaatacaaagtcccgggctgttagaggagtcctttcctctctgcctgccctttcctgtccctccctgaattctctctccccgtaagtgatgctggaaaagtcataggactggcaaagcaactgtttaaaccctttgtaaccggggccttgcccccacctcctgtcttttctccttgccttccccactcctgtgtcctcccatctatcctgtctttcctttcctcctctcagtgtcctcagcacccacaaggaattttcctatcactgtgaactttgctggtacagaggaataatatctgccttcacctttttttttttggaccatagctagccagtcatttcttaaacctcccttcctaaaatctggggggtcggggggaaagaaaaaaaaagccttagtggcctggttgttcaaaggataagaatagctttatcctgcactcagtacccgaactcacttcagtatgcttactgaggccatgagaacctgaggggcatctgcccaggacagaagccatggcatatgacaaagaccaatgagggaccaggaaaaaaagtgatgtcccctttccctgccacctccagcctctgccagcaatgagctgtccccctcccaccctacacagtagctggtcagggctgagtacagtcctgggggtaaggggatgacatgcccaggtgtcagctcaaaggatctctgcatcatcttgaggtgggaggcagggaaaggagcgccaatgaggttccctgcaacccccgccctccagcccaccgcccagccttttacaaatggcattttcttaattgaaaatccgggaagcaggtgtgattacttttttgctcgtagatattgtcctaagttggaattctcccactgccctaaaactttccctagtagtcctttaaactcccccctccctttttggtagctgtttctccgtcctctctccacctgccctcttatctaggagctgtttgtaagcacgatttttttaacaggttatattgtacaggatcaatattttgctttttaacaaggatatttatgtaataagaaactttgccttaggcaggtgttggccagaaaagtccagattcctctgggatcccaccctggcctctcctggaactctgaacctgctgtggaaggaattggccatgaccttcacctctggagagtagggtctatggcgagggaaaagggtgttcaccatgataacctagtgcctccatagaggggtttggaaaaattccagtccgatttctttgtgtgtcagctgacttccttagctgattgttcccacttgcacctctccacctttggcactagaactcctgagacaccacttctcatgcttctccctccctaccagcggtcaaggctttggagccactcttttgtaactccagattatttaaagagaaaagtacaagacagaaatcttctagcactttgtaaacacagtgaataacctcttggagtatttttggctttatataaaacaaggtttttaattgtaaagtataagtgccattagaaaatgcacagggcatatctttgttaaagtagatttttcaatgttttacagaattacattttcaaaaaaaggtttttataatgaagttgtttattaaaaacttctgaatgatgtgttc

SEQ ID NO: 948 - protein, 496 aa, Homo sapien
MTTFFTSVPPWIQDAKQEEEVGWKLVPRPRGREAESQVKCQCEISGTPFSNGEKLRPHSLPQPEQRPYSCPQLHCGKAFASKYKLYRHMATHSAQKPHQCMYCDKMFHRKDHLRNHLQTHDPNKEALHCSECGKNYNTKLGYRRHLAMHAASSGDLSCKVCLQTFESTQALLEHLKAHSRRVAGGAKEKKHPCDHCDRRFYTRKDVRRHLVVHTGRKDFLCQYCAQRFGRKDHLTRHVKKSHSQELLKIKTEPVDMLGLLSCSSTVSVKEELSPVLCMASRDVMGTKAFPGMLPMGMYGAHIPTMPSTGVPHSLVHNTLPMGMSYPLESSPISSPAQLPPKYQLGSTSYLPDKLPKVEVDSFLAELPGSLSLSSAEPQPASPQPAAAAALLDEALLAKSPANLSEALCAANVDFSHLLGFLPLNLPPCNPPGATGGLVMGYSQAEAQPLLTTLQAQPQDSPGAGGPLNFGPLHSLPPVFTSGLSSTTLPRFHQAFQ

SEQ ID NO: 949 - DNA, 2178 bp, Homo sapien
ccgcctgtcgcctgtgcgcctgcgcgcggcgccgaggggacggggtccgactcagaaatggcggcctccatgttctacggcaggctagtggccgtggccacccttcggaaccaccggcctcggacggcccagcgggctgctgctcaggttctgggaagttctggattgtttaataaccatggactccaagtacagcagcaacagcaaaggaatctctcactacatgaatacatgagtatggaattattgcaagaagctggtgtctccgttcccaaaggatatgtggcaaagtcaccagatgaagcttatgcaattgccaaaaaattaggttcaaaagatgtcgtgataaaggcacaggttttagctggtggtagaggaaaaggaacatttgaaagtggcctcaaaggaggagtgaagatagttttctctccagaagaagcaaaagctgtttcttcacaaatgattgggaaaaaattgtttaccaagcaaacgggagaaaagggcagaatatgcaatcaagtattggtctgtgagcgaaaatatcccaggagagaatactactttgcaataacaatggaaaggtcatttcaaggtcctgtattaataggaagttcacatggtggtgtcaacattgaagatgttgctgctgagtctcctgaagcaataattaaagaacctattgatattgaagaaggcatcaaaaaggaacaagctctccagcttgcacagaagatgggatttccacctaatattgtggaatcagcagcagaaaacatggtcaagctttacagcctttttctgaaatacgatgcaaccatgatagaaataaatccaatggtggaagattcagatggagctgtattgtgtatggatgcaaagatcaattttgactctaattcagcctatcgccaaaagaaaatctttgatctacaggactggacccaggaagatgaaagggacaaagatgctgctaaggcaaatctcaactacattggcctcgatggaaatataggctgcctagtaaatggtgctggtttggctatggccacaatggatataataaaacttcatggagggactccagccaacttccttgatgttggtggtggtgctacagtccatcaagtaacagaagcatttaagcttatcacttcagataaaaaggtactggctattctggtcaacatttttggaggaatcatgcgctgtgatgttattgcacagggtatagtcatggcagtaaaagacttggaaattaaaatacctgttgtggtacggttacaaggtacacgagtcgatgatgctaaggcactgatagcggacagtggacttaaaatacttgcttgtgatgacttggatgaagctgctagaatggttgtaaagctctctgaaatagtgaccttagcgaagcaagcacatgtggatgtgaaatttcagttgccaatatgatctgaaaacccagtggatggctgaaggtgttaaatgtgctataatcattaagaatactgtgttctgtgttattgttctttttctttttagtgtgtggagattgtaattgccatctaggcacacaaacatttaaaaggatttggactgcatttaattgtaccattcagaatggactgtttgtacgaagcatgtataatgcagttatcttctttctttcgtcgcagccagtcttttttgcttctcctacaaaacgtaacttgcaatttgccagtttattattgttggatacaaagttcttcattgataagagtcctataaataagataaatacgaagataaagctttattctttagtgttaaaatacagtatatctaataactagcctcattagtagagcagtatattaaaacaatgttttatgtaaaaagtgtttatcttcagcaccaaatacatgataaatgtatcaatcactatttataaacagagctttcaaacactcctcagaatattcttctaagtattttgatgaagtaactttgtaattatttgaacattgttttaatcattaggaaacactgattaactgcaagtcttcatgattctgtcatattaagaaacacctgtaggtttgcttcaaataaaggcatatataccaaggacttacagacaaaattaagaatgtcaatttaagttaataaaaatctcccaatatgaaaaaaaaaaaaaaa

SEQ ID NO: 950 - protein, 463 aa, Homo sapien
MAASMFYGRLVAVATLRNHRPRTAQRAAAQVLGSSGLFNNHGLQVQQQQQRNLSLHEYMSMELLQEAGVSVPKGYVAKSPDEAYAIAKKLGSKDVVIKAQVLAGGRGKGTFESGLKGGVKIVFSPEEAKAVSSQMIGKKLFTKQTGEKGRICNQVLVCERKYPRREYYFAITMERSFQGPVLIGSSHGGVNIEDVAAESPEAIIKEPIDIEEGIKKEQALQLAQKMGFPPNIVESAAENMVKLYSLFLKYDATMIEINPMVEDSDGAVLCMDAKINFDSNSAYRQKKIFDLQDWTQEDERDKDAAKANLNYIGLDGNIGCLVNGAGLAMATMDIIKLHGGTPANFLDVGGGATVHQVTEAFKLITSDKKVLAILVNIFGGIMRCDVIAQGIVMAVKDLEIKIPVVVRLQGTRVDDAKALIADSGLKILACDDLDEAARMVVKLSEIVTLAKQAHVDVKFQLPI

SEQ ID NO: 951 - DNA, 2210 bp, Homo sapien
cgcgcccctccctcctcgcggacctggcggtgccggcgcccggagtggccctttaaaaggcagcttattgtccggagggggcgggcggggggcgccgaccgcggcctgaggcccggcccctcccctctccctccctctgtccccgcgtcgctcgctggctagctcgctggctcgctcgcccgtccggcgcacgctccgcctccgtcagttggctccgctgtcgggtgcgcggcgtggagcggcagccggtctggacgcgcggccggggctgggggctgggagcgcggcgcgcaagatctccccgcgcgagagcggcccctgccaccgggcgaggcctgcgccgcgatggcagagatgggcagtaaaggggtgacggcgggaaagatcgccagcaacgtgcagaagaagctcacccgcgcgcaggagaaggttctccagaagctggggaaggcagatgagaccaaggatgagcagtttgagcagtgcgtccagaatttcaacaagcagctgacggagggcacccggctgcagaaggatctccggacctacctggcctccgtcaaagccatgcacgaggcttccaagaagctgaatgagtgtctgcaggaggtgtatgagcccgattggcccggcagggatgaggcaaacaagatcgcagagaacaacgacctgctgtggatggattaccaccagaagctggtggaccaggcgctgctgaccatggacacgtacctgggccagttccccgacatcaagtcacgcattgccaagcgggggcgcaagctggtggactacgacagtgcccggcaccactacgagtcccttcaaactgccaaaaagaaggatgaagccaaaattgccaaggccgaggaggagctcatcaaagcccagaaggtgtttgaggagatgaatgtggatctgcaggaggagctgccgtccctgtggaacagccgcgtaggtttctacgtcaacacgttccagagcatcgcgggcctggaggaaaacttccacaaggagatgagcaagctcaaccagaacctcaatgatgtgctggtcggcctggagaagcaacacgggagcaacaccttcacggtcaaggcccagcccagaaagaaaagtaaactgttttcgcggctgcgcagaaagaagaacagtgacaacgcgcctgcaaaagggaacaagagcccttcgcctccagatggctcccctgccgccacccccgagatcagagtcaaccacgagccagagccggccggcggggccacgcccggggccaccctccccaagtccccatctcagccagcagaggcctcggaggtggcgggtgggacccaacctgcggctggagcccaggagccaggggagacggcggcaagtgaagcagcctccagctctcttcctgctgtcgtggtggagaccttcccagcaactgtgaatggcaccgtggagggcggcagtggggccgggcgcttggacctgcccccaggtttcatgttcaaggtacaggcccagcacgactacacggccactgacacagacgagctgcagctcaaggctggtgatgtggtgctggtgatccccttccagaaccctgaagagcaggatgaaggctggctcatgggcgtgaaggagagcgactggaaccagcacaaggagctggagaagtgccgtggcgtcttccccgagaacttcactgagagggtcccatgacggcggggcccaggcagcctccgggcgtgtgaagaacacctcctcccgaaaaatgtgtggttcttttttttgttttgttttcgtttttcatcttttgaagagcaaagggaaatcaagaggagacccccaggcagaggggcgttctcccaaagattaggtcgttttccaaagagccgcgtcccggcaagtccggcggaattcaccagtgttcctgaagctgctgtgtcctctagttgagtttctggcgcccctgcctgtgcccgcatgtgtgcctggccgcagggcggggctgggggctgccgagccaccatgcttgcctgaagcttcggccgcgccacccgggcaagggtcctcttttcctggcagctgctgtgggtggggcccagacaccagcctagcctggctctgccccgcagacggtctgtgtgctgtttgaaaataaatcttagtgttcaaaacaaaatgaaacaaaaaaaaaatgataaaaactctcaaaaaaa

SEQ ID NO: 952 - protein, 409 aa, Homo sapien
MAEMGSKGVTAGKIASNVQKKLTRAQEKVLQKLGKADETKDEQFEQCVQNFNKQLTEGTRLQKDLRTYLASVKAMHEASKKLNECLQEVYEPDWPGRDEANKIAENNDLLWMDYHQKLVDQALLTMDTYLGQFPDIKSRIAKRGRKLVDYDSARHHYESLQTAKKKDEAKIAKAEEELIKAQKVFEEMNVDLQEELPSLWNSRVGFYVNTFQSIAGLEENFHKEMSKLNQNLNDVLVGLEKQHGSNTFTVKAQPSDNAPAKGNKSPSPPDGSPAATPEIRVNHEPEPAGGATPGATLPKSPSQSSLPAVVVETFPATVNGTVEGGSGAGRLDLPPGFMFKVQAQHDYTATDTDELQLKAGDVVLVIPFQNPEEQDEGWLMGVKESDWNQHKELEKCRGVFPENFTERVP

SEQ ID NO: 953 - DNA, 2244 bp, Homo sapien
acaccatcctcttagttgctcagactgaaaagctagcagccatcctggatttctctcacactgcctattcaacgtgtgaatgcatgagtggaaagctgagttcgcactcgtgactggccggggtcgactctgacattcactcccactttggcgcgctgatttgcctctgagcggatgaaggttgagccatggcgggcggggccggggaggcgggcttggagcgagggggcggggcaggcgccacaaaaacgcgctcgcgccggcgccgaaccgcaactcccggcgacccccgcgctcccgggtggcaagatggtggcgcgcaggaggaagtgcgcgcgcgggacccggagaccgtatcccgagcccactgcgtacgcagctattccaatcaagttctctgaaaagcaacaggcttctcactacctctatgtgagagcacacggcgttcgacaaggcaccaagtccacctggcctcagaagaggactctttttgtcctcaatgtgcccccatactgcacagaggagagcctgtcccgcctcctgtccacctgtggcctcgtccagtctgtagagttgcaggagaagccggacctggctgagagcccaaaggagtcaaggtcgaagttttttcatcccaagccagttccgggtttccaggtagcctatgtggtgttccagaagccaagtggggtgtcagcggccttggccctgaagggccccctgctggtgtccacagagagccaccctgtgaagagtggcattcacaagtggatcagtgactacgcagactctgtgcccgaccctgaggccctgagggtggaagtggacacgttcatggaggcatatgaccagaagatcgctgaggaagaagctaaggccaagggggaggagggggtccctgacgaggagggctgggtgaaggtgacccgccggggccggcgcctgtgctcccccggactgaggcagccagcttgcgggtgctggagagggagagacggaagcgcagcgaaaagagctgctcaacttctacgcctggcagcatcgagagagcaagatggagcatctagcgcagctcgcaagaagttcgaggaggacaagcagaggatcgagctgctgcgggcccagcgcaaattccgaccgtactgagctgtgagagccgcagtgaatggctggaggtgcagggccaggaggaggcgaggcagggcctgcagcggtctctgagaggccgagctctggccaacgggccccaggttgaaggccaccgcgtccaacagccccatcagagtccacacaggccaggagggaaggaccaggccacccctcgggtcttgtgcttcagcagtcctggggacccaggcgtgccgagaggaggacttgtccttcctgcttcttgcctccacaccctcctctccaggaccctggatgaatccgttctgtgcttccttttccctcaatgcaaaagcccttgctggcaacgaaaaagcctcaaaagcagtgagaatacaagaaccttttattttccatccagttgggcagcagggaaaggctaggtgggcccagcctgcccttccttcctccagctggctggatatttattattagccaggagaaagcagccctggaacccagactctgtctccctcttgaggtcacagatgttgaagttggaatctcgctccttcccctgactaccatcctaggctgggctcaagactagtgaggcctgtccccaccatccctggccttgttgtggggctcaggaactcagagtcccagtgttgagtctgggagcactaggtcttcatagttccaggcccagagctacagctgggctgggagcatgtgtgtgcactgtaagaaggagctgatgatactggccacgtgctggggttcgctcatgtggacacagtgattgcctgggacttccacaaactggaactgctctttgagggtggatttcatcgtgtctatcatgaacgacagggactccttctcagagtaattctgtcttgaatcaaaatatccgtggactgctttgatcaacaggacatggcctgcagcttcctgatggaatgcgcacacagctccctgctgatgaagtcaatgctgttctctgcccaggcgagcctctggtctctgttcagaaccagacctgtgggcaccttcgtggttcctctttgcaggagaactccccgcactcctcactcaagtggctattgctcttcagtaacctctgcagcagct

SEQ ID NO: 954 - protein, 323 aa, Homo sapien
MKVEPWRAGPGRRAWSEGAGQAPQKRARAGAEPQLPATPALPGGKMVARRRKCARGTRRPYPEPTAYAAIPIKFSEKQQASHYLYVRAHGVRQGTKSTWPQKRTLFVLNVPPYCTEESLSRLLSTCGLVQSVELQEKPDLAESPKESRSKFFHPKPVPGFQVAYVVFQKPSGVSAALALKGPLLVSTESHPVKSGIHKWISDYADSVPDPEALRVEVDTFMEAYDQKIAEEEAKAKGEEGVPDEEGWVKVTRRGRRLCSPGLRQPACGCWRGRDGSAAKRAAQLLRLAASREQDGASSAARKKFEEDKQRIELLRAQRKFRPY

SEQ ID NO: 955 - DNA, 3103 bp, Homo sapien
ctgtgacactgccagcagcgcgcagagggagggatgggggcgggtatcggcgtaggggccctcggaaagaacggatattgctgtgacaccgcggggacgctctgaagggacgagtgtcggtgtggcaccggtgcacgctgaaggagccggcggaaccgggtggccatggggatgtgggcatcgctggacgctttgtgggagatgccggccgagaagcgtatcttcggggccgtgctgctcttttcctggacagtgtatctttgggagaccttcctagcacagcggcagagaaggatatataaaacaacaactcatgtaccaccggagttaggacagatcatggattctgaaacatttgagaaatctcgactctatcaactggataaaagcactttcagcttctggtcaggactctattcagagactgaaggcactcttattcttctctttggaggaataccttatctctggagactttctggacggttctgtggttatgctggctttggaccagaatatgagatcactcagtccctggtgtttctgctgttggctacacttttcagtgcattgactggtttgccatggagtctttataatacttttgtgatagaagaaaaacatggcttcaatcaacagactttggggttcttcatgaaagatgcaatcaagaaatttgttgtgactcagtgtattttgttgcctgtgtcttcacttctactttacattattaaaattgggggtgactatttttttatttatgcctggctgttcacattagttgtgtctctggttcttgtcacaatctatgctgattatattgcccctttatttgacaaattcacacctctgcctgagggaaagcttaaagaagaaattgaagtaatggcaaagagtattgactttcctttgacgaaggtgtatgttgtggaaggatctaaacgctcttcccacagcaatgcttatttttatggcttcttcaagaacaagcgaatagttttgtttgacactctactagaagagtactctgtactaaacaaagacatccaggaggattctggcatggaaccccgcaatgaggaagaagggaacagtgaagaaataaaagctaaagttaaaaataagaaacaaggatgtaaaaatgaggaggtactcgctgtactaggccatgaactggggcactggaagttgggacatacagtcaaaaatatcattattagccagatgaattctttcctgtgtttttttttatttgctgtattaattggtcgaaaggagctttttgctgcatttggtttttatgatagccaacccactcttattggactattgatcatcttccagtttattttttcaccttacaatgaggttctttctttttgcctaacagtcctaagccgcagatttgagtttcaagctgatgcatttgccaagaaacttgggaaggctaaagacttatattctgctttaatcaaacttaacaaagataacttgggattccctgtttctgactggttgttctcaatgtggcattattctcatcctccactgctagagagacttcaagctttgaaaactatgaagcaacactgagatgtccaggatctgtgactgaagacatttctgattatttctgtcctggcagcatgttccagctcttgatgtttttaaacttttttttagaagaaaaattaagtacagaaaagcccagatttaaatacatttaatatgtcattttaaaaatgattttaataattcatttcttaaaacactgaatgaattttgaagcttaatgtttttaaaggcatagttttatctttgacatctaatttaccatcaagttgtaaaattatttggaaaaatacagaactcgttttatttgtatacttatatggaatctgcatgtgaggtgtttgagggcatatgtttgaaagagggagcatcaccacaggaatcctttctgtgaggtggaaacagtggtcctgaatcattgtgctcacacctaacttgaaatctggtcttactttcatgctgttatgatttcacctggtgaatcagtgttttaaataagaaaggtaatagttggtaaggccaatgttatttaaatgaaagtagttagaaaaatgctctcctattctaccaaatttttaatttctttcttccctttcttgctacacagtgatcaagagtttctcatagtgctttgaagttagaaattatgtataggatattttaaatcattgagttttgtggggtttttttgtttgtttgtttcttttgttttttggaaaatccgtgtctttatctttttttcccacgtggtagatatgatcccattggaggtaaattgtagcttcttctcattcatgcagtaaataatacatcctttcactcagcagagatggccatattaaacacgttttgctatgttaaaagtggcagaacaggaaagacgaattaaaaataacattttttaagcgacataaggatgaaatactgatgaatctctgtgacattacagggaaaaaaatatagttttctatctctttcaagggcagaagagttttcatttttatttttgtaattttatctgtaagtcataaatattacttaatcaggcctgattctacttttgaaaattacagttcttgaaatgcagataatgtttactttgaaaacaaatgtcatgaatgatttccagtttttaaagctatatgtttcactgcttcatatctctgtccactttctgaatgagaacttattttgtgcctagagctctcactcactgataatgcttattaccttctgggcatttattccaaagtgggatcaactgtacgcctttggtatctgaccataaagtcttttgctccgctgacatttgggtgatgtcttcacatggaaatataataaaaataaaaatctagtttaatactgcattatttattttcctaaggctaaagaggagcagtcctatgcttttattcagcatcctttatctgtgacttcatgctctgataactgcctttccttccttctgtgcctttgaatacaaatttcagttctgcaaaagtgaaacattaaacattgccaacgcaaatgt

SEQ ID NO: 956 - protein, 475 aa, Homo sapien
MGMWASLDALWEMPAEKRIFGAVLLFSWTVYLWETFLAQRQRRIYKTTTHVPPELGQIMDSETFEKSRLYQLDKSTFSFWSGLYSETEGTLILLFGGIPYLWRLSGRFCGYAGFGPEYEITQSLVFLLLATLFSALTGLPWSLYNTFVIEEKHGFNQQTLGFFMKDAIKKFVVTQCILLPVSSLLLYIIKIGGDYFFIYAWLFTLVVSLVLVTIYADYIAPLFDKFTPLPEGKLKEEIEVMAKSIDFPLTKVYVVEGSKRSSHSNAYFYGFFKNKRIVLFDTLLEEYSVLNKDIQEDSGMEPRNEEEGNSEEIKAKVKNKKQGCKNEEVLAVLGHELGHWKLGHTVKNIIISQMNSFLCFFLFAVLIGRKELFAAFGFYDSQPTLIGLLIIFQFIFSPYNEVLSFCLTVLSRRFEFQADAFAKKLGKAKDLYSALIKLNKDNLGFPVSDWLFSMWHYSHPPLLERLQALKTMKQH

SEQ ID NO: 957 - DNA, 827 bp, Homo sapien
ggaacagtgtggcccgccatgttcttctccgcggcgctccgggcccgggcggctggcctcaccgcccactggggaagacatgtaaggaatttgcataagacagctatgcaaaatggagctggaggagctttatttgtgcacagagatactcctgagaataaccctgatactccatttgatttcacaccagaaaactataagaggatagaggcaattgtaaaaaactatccagaaggccataaagcagcagctgttcttccagtcctggatttagcccaaaggcagaatgggtggttgcccatctctgctatgaacaaggttgcagaagttttacaagtacctccaatgagagtatatgaagtagcaactttttatacaatgtataatcgaaagccagttggaaagtatcacattcaggtctgcactactacaccctgcatgcttcgaaactctgacagcatactggaggccattcagaaaaagcttggaataaaggttggggagactacacctgacaaacttttcactcttatagaagtggaatgtttaggggcctgtgtgaacgcaccaatggttcaaataaatgacaattactatgaggatttgacagctaaggatattgaagaaattattgatgagctcaaggctggcaaaatcccaaaaccagggccaaggagtggacgcttctcttgtgagccagctggaggtcttacctctttgactgaaccacccaagggacctggatttggtgtacaagcaggcctttaatttatattgaactgtaaatatgtcactagagaaataaaatatggacttccaatctacgt

SEQ ID NO: 958 - protein, 249 aa, Homo sapien
MFFSAALRARAAGLTAHWGRHVRNLHKTAMQNGAGGALFVHRDTPENNPDTPFDFTPENYKRIEAIVKNYPEGHKAAAVLPVLDLAQRQNGWLPISAMNKVAEVLQVPPMRVYEVATFYTMYNRKPVGKYHIQVCTTTPCMLRNSDSILEAIQKKLGIKVGETTPDKLFTLIEVECLGACVNAPMVQINDNYYEDLTAKDIEEIIDELKAGKIPKPGPRSGRFSCEPAGGLTSLTEPPKGPGFGVQAGL

SEQ ID NO: 959 - DNA, 852 bp, Homo sapien
caccctgtaagtggctgcggcgggaagatggcggagctgcgcgtgctcgtagctgtcaagagggtcatcgactacgccgtgaagatccgagtgaagcctgacaggaccggtgtggtcacggatggtgtgaagcactccatgaaccccttctgtgagatcgcggtggaggaggctgtgcggctcaaggagaagaagctggtgaaggaggtcatcgccgtcagctgtgggcctgcacagtgccaggagacgattcgtaccgccctggccatgggtgcagaccgaggtatccacgtggaggtgcccccagcagaagcagaacgcttgggtcccctgcaggtggctcgggtcctggccaagctggcagagaaggagaaggtggacctggtgctgctgggcaaacaggccatcgatgatgactgtaaccagacagggcagatgacagctggatttcttgactggccacagggcacattcgcctcccaggtgacgctggagggggacaagttgaaagtggagcgggagatcgatgggggcctggagaccctgcgcctgaagctgccagctgtggtgacagctgacctgaggctcaacgagccccgctacgccacgctgcccaacatcatgaaagccaagaagaagaagatcgaggtgatcaagcctggggacctgggtgtggacctgacctccaagctctctgtgatcagtgtggaggacccgccccagcgcacggccggcgtcaaggtggagaccactgaggacctggtggccaagctgaaggagattgggcggatttgagcccctcccagagatggcaataaaactgactctcaacatcaaaaaaaaaaaaaaaaa

SEQ ID NO: 960 - protein, 255 aa, Homo sapien
MAELRVLVAVKRVIDYAVKIRVKPDRTGVVTDGVKHSMNPFCEIAVEEAVRLKEKKLVKEVIAVSCGPAQCQETIRTALAMGADRGIHVEVPPAEAERLGPLQVARVLAKLAEKEKVDLVLLGKQAIDDDCNQTGQMTAGFLDWPQGTFASQVTLEGDKLKVEREIDGGLETLRLKLPAVVTADLRLNEPRYATLPNIMKAKKKKIEVIKPGDLGVDLTSKLSVISVEDPPQRTAGVKVETTEDLVAKLKEIGRI

SEQ ID NO: 961 - DNA, 783 bp, Homo sapien
ggcacgagcgagttcctgtctctctgccaacgccgcccggatggcttcccaaaaccgcgacccagccgccactagcgtcgccgccgcccgtaaaggagctgagccgagcgggggcgccgcccggggtccggtgggcaaaaggctacagcaggagctgatgaccctcatgatgtctggcgataaagggatttctgccttccctgaatcagacaaccttttcaaatgggtagggaccatccatggagcagctggaacagtatatgaagacctgaggtataagctctcgctagagttccccagtggctacccttacaatgcgcccacagtgaagttcctcacgccctgctatcaccccaacgtggacacccagggtaacatatgcctggacatcctgaaggaaaagtggtctgccctgtatgatgtcaggaccattctgctctccatccagagccttctaggagaacccaacattgatagtcccttgaacacacatgctgccgagctctggaaaaaccccacagcttttaagaagtacctgcaagaaacctactcaaagcaggtcaccagccaggagccctgacccaggctgcccagcctgtccttgtgtcgtctttttaatttttccttagatggtctgtcctttttgtgatttctgtataggactctttatcttgagctgtggtatttttgttttgtttttgtcttttaaattaagcctcggttgagcccttgtatattaaataaatgcatttttgtccttttttaaaaaaaaaaaaaaaaaaa

SEQ ID NO: 962 - protein, 179 aa, Homo sapien
MASQNRDPAATSVAAARKGAEPSGGAARGPVGKRLQQELMTLMMSGDKGISAFPESDNLFKWVGTIHGAAGTVYEDLRYKLSLEFPSGYPYNAPTVKFLTPCYHPNVDTQGNICLDILKEKWSALYDVRTILLSIQSLLGEPNIDSPLNTHAAELWKNPTAFKKYLQETYSKQVTSQEP

SEQ ID NO: 963 - DNA, 2798 bp, Homo sapien
gccctctcccacagcggagtccaaaacaggcctaccagtcagttcttatttctattgggtgtttccatgctccaccatgttaagagctaagaatcagctttttttactttcacctcattacctgaggcaggtaaaagaatcatcaggctccaggctcatacagcaacgacttctacaccagcaacagccccttcacccagaatgggctgccctggctaaaaagcagctgaaaggcaaaaacccagaagacctaatatggcacaccccggaagggatctctataaaacccttgtattccaagagagatactatggacttacctgaagaacttccaggagtgaagccattcacacgtggaccatatcctaccatgtatacctttaggccctggaccatccgccagtatgctggttttagtactgtggaagaaagcaataagttctataaggacaacattaaggctggtcagcagggattatcagttgcctttgatctggcgacacatcgtggctatgattcagacaaccctcgagttcgtggtgatgttggaatggctggagttgctattgacactgtggaagataccaaaattctttttgatggaattcctttagaaaaaatgtcagtttccatgactatgaatggagcagttattccagttcttgcaaattttatagtaactggagaagaacaaggtgtacctaaagagaaacttactggtaccatccaaaatgatatactaaaggaatttatggttcgaaatacatacatttttcctccagaaccatccatgaaaattattgctgacatatttgaatatacagcaaagcacatgccaaaatttaattcaatttcaattagtggataccatatgcaggaagcaggggctgatgccattctggagctggcctatactttagcagatggattggagtactctagaactggactccaggctggcctgacaattgatgaatttgcaccaaggttgtctttcttctggggaattggaatgaatttctatatggaaatagcaaagatgagagctggtagaagactctgggctcacttaatagagaaaatgtttcagcctaaaaactcaaaatctcttcttctaagagcacactgtcagacatctggatggtcacttactgagcaggatccctacaataatattgtccgtactgcaatagaagcaatggcagcagtatttggagggactcagtctttgcacacaaattcttttgatgaagctttgggtttgccaactgtgaaaagtgctcgaattgccaggaacacacaaatcatcattcaagaagaatctgggattcccaaagtggctgatccttggggaggttcttacatgatggaatgtctcacaaatgatgtttatgatgctgctttaaagctcattaatgaaattgaagaaatgggtggaatggccaaagctgtagctgagggaatacctaaacttcgaattgaagaatgtgctgcccgaagacaagctagaatagattctggttctgaagtaattgttggagtaaataagtaccagttggaaaaagaagacgctgtagaagttctggcaattgataatacttcagtgcgaaacaggcagattgaaaaacttaagaagatcaaatccagcagggatcaagctttggctgaacattgtcttgctgcactaaccgaatgtgctgctagcggagatggaaatatcctggctcttgcagtggatgcatctcgggcaagatgtacagtgggagaaatcacagatgccctgaaaaaggtatttggtgaacataaagcgaatgatcgaatggtgagtggagcatatcgccaggaatttggagaaagtaaagagataacatctgctatcaagagggttcataaattcatggaacgtgaaggtcgcagacctcgtcttcttgtagcaaaaatgggacaagatggccatgacagaggagcaaaagttattgctacaggatttgctgatcttggttttgatgtggacataggccctcttttccagactcctcgtgaagtggcccagcaggctgtggatgcggatgtgcatgctgtgggcgtaagcaccctcgctgctggtcataaaaccctagttcctgaactcatcaaagaacttaactcccttggacggccagatattcttgtcatgtgtggaggggtgataccacctcaggattatgaatttctgtttgaagttggtgtttccaatgtatttggtcctgggactcgaattccaaaggctgccgttcaggtgcttgatgatattgagaagtgtttggaaaagaagcagcaatctgtataatatcctctttttgttttagcttttgtctaaaatattattttagttatgatcaaagaagagagtaaagctatgtcttcaatttaatttcaatacctgatttgtactttccttgaaagctttactttaaaataccttacttataggcctggtgtcatgctataagtatgtacatacagtttcacttcaaaaataaaaaaaaatccctaaaaactctctatactctctataacaatactttatcaagaactctggacaatggtattatttttaaaaatcatggtgatgtatttattagaatgtttcttataaatctctttcatttttatattaagaattaaactgtacctaaaaaaactctgactattcccatttctcagtttagcattacattgtcttgagcaccagaaaataaaatccatatattaattaaaacctatcttgaaaaaaaaaaaaaaaaaaaaaaaaaaaa

SEQ ID NO: 964 - protein, 750 aa, Homo sapien
MLRAKNQLFLLSPHYLRQVKESSGSRLIQQRLLHQQQPLHPEWAALAKKQLKGKNPEDLIWHTPEGISIKPLYSKRDTMDLPEELPGVKPFTRGPYPTMYTFRPWTIRQYAGFSTVEESNKFYKDNIKAGQQGLSVAFDLATHRGYDSDNPRVRGDVGMAGVAIDTVEDTKILFDGIPLEKMSVSMTMNGAVIPVLANFIVTGEEQGVPKEKLTGTIQNDILKEFMVRNTYIFPPEPSMKIIADIFEYTAKHMPKFNSISISGYHMQEAGADAILELAYTLADGLEYSRTGLQAGLTIDEFAPRLSFFWGIGMNFYMEIAKMRAGRRLWAHLIEKMFQPKNSKSLLLRAHCQTSGWSLTEQDPYNNIVRTAIEAMAAVFGGTQSLHTNSFDEALGLPTVKSARIARNTQIIIQEESGIPKVADPWGGSYMMECLTNDVYDAALKLINEIEEMGGMAKAVAEGIPKLRIEECAARRQARIDSGSEVIVGVNKYQLEKEDAVEVLAIDNTSVRNRQIEKLKKIKSSRDQALAEHCLAALTECAASGDGNILALAVDASRARCTVGEITDALKKVFGEHKANDRMVSGAYRQEFGESKEITSAIKRVHKFMEREGRRPRLLVAKMGQDGHDRGAKVIATGFADLGFDVDIGPLFQTPREVAQQAVDADVHAVGVSTLAAGHKTLVPELIKELNSLGRPDILVMCGGVIPPQDYEFLFEVGVSNVFGPGTRIPKAAVQVLDDIEKCLEKKQQSV

SEQ ID NO: 965 - DNA, 3615 bp, Homo sapien
ggactgtgtgtgtctggctgtagcagacgcgaggcggcgacgaggcgccggggacccgcgcgaggggcggccgggaggcggcggcggcggccgccagaagtagcagcaggaccggcggcggcgacggcagccctgaaatgcattttcctctccagcggccatgttaaccaggaaaccttcggccgccgctcccgccgcctacccgaccggccgaggtggggacagcgccgttcgtcagcttcaggcttccccggggctcggtgcagggcccacccggagcggagtggggactggcccgccctcccccatcgccctgccgcctctccgggccagcaacgctgccgccgcagcccacacgattggcggcagtaagcacacaatgaatgatcacctgcatgtcggcagccacgctcacggacagatccaggttcaacagttgtttgaggataacagtaacaagcggacagtgctcacgacacaaccaaatgggcttacaacagtgggcaaaacgggcttgccagtggtgccagagcggcagctggacagcattcatagacggcaggggagctccacctctctaaagtccatggaaggcatggggaaggtgaaagccacccccatgacacctgaacaagcaatgaagcaatacatgcaaaaactcacagccttcgaacaccatgagattttcagctaccctgaaatatatttcttgggtctaaatgctaagaagcgccagggcatgacaggtgggcccaacaatggtggctatgatgatgaccagggatcatatgtgcaggtgccccacgatcacgtggcttacaggtatgaggtcctcaaggtcattgggaaggggagctttgggcaggtggtcaaggcctacgatcacaaagtccaccagcacgtggccctaaagatggtgcggaatgagaagcgcttccaccggcaagcagcggaggagatccgaatcctggaacacctgcggaagcaggacaaggataacacaatgaatgtcatccatatgctggagaatttcaccttccgcaaccacatctgcatgacgtttgagctgctgagcatgaacctctatgagctcatcaagaagaataaattccagggcttcagtctgcctttggttcgcaagtttgcccactcgattctgcagtgcttggatgctttgcacaaaaacagaataattcactgtgaccttaagcccgagaacattttgttaaagcagcagggtagaagcggtattaaagtaattgattttggctccagttgttacgagcatcagcgtgtctacacgtacatccagtcgcgtttttaccgggctccagaagtgatccttggggccaggtatggcatgcccattgatatgtggagcctgggctgcattttagcagagctcctgacgggttaccccctcttgcctggggaagatgaaggggaccagctggcctgtatgattgaactgttgggcatgccctcacagaaactgctggatgcatccaaacgagccaaaaattttgtgagctccaagggttatccccgttactgcactgtcacgactctctcagatggctctgtggtcctaaacggaggccgttcccggagggggaaactgaggggcccaccggagagcagagagtgggggaacgcgctgaaggggtgtgatgatccccttttccttgacttcttaaaacagtgtttagagtgggatcctgcagtgcgcatgaccccaggccaggctttgcggcacccctggctgaggaggcggttgccaaagcctcccaccggggagaaaacgtcagtgaaaaggataactgagagcaccggtgctatcacatctatatccaagttacctccaccttctagctcagcttccaaactgaggactaatttggcgcagatgacagatgccaatgggaatattcagcagaggacagtgttgccaaaacttgttagctgagctcacgtcccctgatgctggtaacctgaaagatacgacattgctgagccttactgggttgaaaaggagtagctcagacctgtttttatttgctcaataactctactcatttgtatcttttcagcacttaattttaatgtaagaaagttgttcattttgtttttataaaatacatgaggacaatgctttaagtttttatactttcagaaactttttgtgttctaaaagtacaatgagccttactgtatttagtgtggcagaataataacatcagtggcaggccactgattacttcatgactgccacgcatttacagattggtgtcaaagacattcactatgtttttatggttcatgttatatcctccccagggtgacagccccttaaggccctccttttccctccatgctccaggtccatgcacaggtgtagcatgtcctgcttccgtttttcataaattaatctgggtgttgggggtagtgggaggagaacggtcagaatcaaagtgacattctaagaaaaactgtaccttagagattttcctctagtgctcaaacaaatacaaaataagatccccaaggtttaaactgcccagttagcattctgacattctaaaagccggcaaagcagcttttagtggataaatgggaatggaaacgtgtgtgttcctccaaattttctagtatgatcggtgagctgttttgtaaagaagcctcatattacagagttgcttttgcacctaaatttagaattgtattccatgaactgttcctcccttttctctgcttttctcctctctgttcctcttttaataccacacgtctgttgcttgcatttagtttgtcttcttccttcagctgtgtatcccagactgttaatacagaaaagagacatttcagctgtgattatgaccattgtttcatattccaattaaaaaaagaacagcagcctagctacttaaggtggggatttcatagttccaaagaagatttagcagattagagtgagttcacacttttcaggtgccactgtaaggttctctcagcctgggaaactatcaactctttctttaaaaagaaagagggttgaaaatcctctggacgaacagaagtcactttggctgttcagtaaggccaatgttaacaacacgtttagaggaggaaaagttcaacctcaagttaaatggtttgacttattcttcgtatcattagaagaaccccagagatagcattcctctattttattttactttcttttggattgcactgattgtttttgtgggaatgacactttatctggcaaagtaactgagagtttggtaaaagaatattttcttctctgaataataattattttcacagtgaaaatttcagtattttatcactaatgtatgagcaatgatctatatcaatttcaaggcacgtgaaaaaaattttttagtatgtgcaatttaatatagaaagatttctgcctgtttggacaataggttttgggtagtacagattaggataagtaagcttatatatgcacagagattattgtattacctgtaaattgatttacaagtacttaaaagcgtggtccccagtgaggccaagaaagtttccggttaagttctttaataataatcctacagtttatcttaagaa

SEQ ID NO: 966 - protein, 601 aa, Homo sapien
MLTRKPSAAAPAAYPTGRGGDSAVRQLQASPGLGAGPTRSGVGTGPPSPIALPPLRASNAAAAAHTIGGSKHTMNDHLHVGSHAHGQIQVQQLFEDNSNKRTVLTTQPNGLTTVGKTGLPVVPERQLDSIHRRQGSSTSLKSMEGMGKVKATPMTPEQAMKQYMQKLTAFEHHEIFSYPEIYFLGLNAKKRQGMTGGPNNGGYDDDQGSYVQVPHDHVAYRYEVLKVIGKGSFGQVVKAYDHKVHQHVALKMVRNEKRFHRQAAEEIRILEHLRKQDKDNTMNVIHMLENFTFRNHICMTFELLSMNLYELIKKNKFQGFSLPLVRKFAHSILQCLDALHKNRIIHCDLKPENILLKQQGRSGIKVIDFGSSCYEHQRVYTYIQSRFYRAPEVILGARYGMPIDMWSLGCILAELLTGYPLLPGEDEGDQLACMIELLGMPSQKLLDASKRAKNFVSSKGYPRYCTVTTLSDGSVVLNGGRSRRGKLRGPPESREWGNALKGCDDPLFLDFLKQCLEWDPAVRMTPGQALRHPWLRRRLPKPPTGEKTSVKRITESTGAITSISKLPPPSSSASKLRTNLAQMTDANGNIQQRTVLPKLVS

SEQ ID NO: 967 - DNA, 4491 bp, Homo sapien
aaatgtagagaagcagccgataaaatagcattgcctgaagaagtttggaggctgagagcagcagtagactggccaactgcagagcaagttgtttctccagccgtgcggtgcagcctcatgcccccaacccagcttagccactgtaagaagacgttcactgtacagacgaccaaacttgccgtggaagagacagttgtgagattcccttgcaaatttacatacgagaatggcttgtgaaatcatgcctctgcaaagttcacaggaagatgaaagacctctgtcacctttctatttgagtgctcatgtaccccaagtcagcaatgtgtctgcaaccggagaactcttagaaagaaccatccgatcagctgtagaacaacatctttttgatgttaataactctggaggtcaaagttcagaggactcagaatctggaacactatcagcatcttctgccacatctgccagacagcgccgccgccagtccaaggagcaggatgaagttcgacatgggagagacaagggacttatcaacaaagaaaatactccttctgggttcaaccaccttgatgattgtattttgaatactcaggaagtcgaaaaggtacacaaaaatacttttggttgtgctggagaaaggagcaagcctaaacgtcagaaatccagtactaaactttctgagcttcatgacaatcaggacggtcttgtgaatatggaaagtctcaattccacacgatctcatgagagaactggacctgatgattttgaatggatgtctgatgaaaggaaaggaaatgaaaaagatggtggacacactcagcattttgagagccccacaatgaagatccaggagcatcccagcctatctgacaccaaacagcagagaaatcaagatgccggtgaccaggaggagagctttgtctccgaagtgccccagtcggacctgactgcattgtgtgatgaaaagaactgggaagagcctatccctgctttctcctcctggcagcgggagaacagtgactctgatgaagcccacctctcgccgcaggctgggcgcctgatccgtcagctgctggacgaagacagcgaccccatgctctctcctcggttctacgcttatgggcagagcaggcaatacctggatgacacagaagtgcctccttccccaccaaactcccattctttcatgaggcggcgaagctcctctctggggtcctatgatgatgagcaagaggacctgacacctgcccagctcacacgaaggattcagagccttaaaaagaagatccggaagtttgaagatagattcgaagaagagaagaagtacagaccttcccacagtgacaaagcagccaatccggaggttctgaaatggacaaatgaccttgccaaattccggagacaacttaaagaatcaaaactaaagatatctgaagaggacctaactcccaggatgcggcagcgaagcaacacactccccaagagttttggttcccaacttgagaaagaagatgagaagaagcaagagctggtggataaagcaataaagcccagtgttgaagccacattggaatctattcagaggaagctccaggagaagcgagcggaaagcagccgccctgaggacattaaggatatgaccaaagaccagattgctaatgagaaagtggctctgcagaaagctctgttatattatgaaagcattcatggacggccggtaacaaagaacgaacggcaggtgatgaagccactatacgacaggtaccggctggtcaaacagatcctctcccgagctaacaccatacccatcattggttccccctccagcaagcggagaagccctttgctgcagccaattatcgagggcgaaactgcttccttcttcaaggagataaaggaagaagaggaggggtcagaagacgatagcaatgtgaagccagacttcatggtcactctgaaaaccgatttcagtgcacgatgctttctggaccaattcgaagatgacgctgatggatttatttccccaatggatgataaaataccatcaaaatgcagccaggacacagggctttcaaatctccatgctgcctcaatacctgaactcctggaacacctccaggaaatgagagaagaaaagaaaaggattcgaaagaaacttcgggattttgaagacaactttttcagacagaatggaagaaatgtccagaaggaagaccgcactcctatggctgaagaatacagtgaatataagcacataaaggcgaaactgaggctcctggaggtgctcatcagcaagagagacactgattccaagtccatgtgaggggcatggccaagcacagggggctggcagctgcggtgagagtttactgtccccagagaaagtgcagctctggaaggcagccttggggctggccctgcaaagcatgcagcccttctgcctctagaccatttggcatcggctcctgtttccattgcctgccttagaaactggctggaagaagacaatgtgacctgacttaggcattttgtaattggaaagtcaagactgcagtatgtgcacatgcgcacgcgcatgcacgcacacacacacacagtagtggagctttcctaacactagcagagattaatcactacattagacaacactcatctacagagaatatacactgttcttccctggataactgagaaacaagagaccattctctgtctaactgtgataaaaacaagctcaggactttattctatagagcaaacttgctgtggagggccatgctctccttggacccagttaactgcaaacgtgcattggagccctatttgctgccgctgccattctagtgacctttccacagagctgcgccttcctcacgtgtgtgaaaggttttccccttcagccctcaggtagatggaagctgcatctgcccacgatggcagtgcagtcatcatcttcaggatgtttcttcaggacttcctcagctgacaaggaattttggtccctgcctaggaccgggtcatctgcagaggacagagagatggtaagcagctgtatgaatgctgattttaaaaccaggtcatgggagaagagcctggagattctttcctgaacactgactgcacttaccagtctgattttatcgtcaaacaccaagccaggctagcatgctcatggcaatctgtttggggctgttttgttgtggcactagccaaacataaaggggcttaagtcagcctgcatacagaggatcggggagagaaggggcctgtgttctcagcctcctgagtacttaccagagtttaatttttttaaaaaaaatctgcactaaaatccccaaactgacaggtaaatgtagccctcagagctcagcccaaggcagaatctaaatcacactattttcgagatcatgtataaaaagaaaaaaaagaagtcatgctgtgtggccaattataatttttttcaaagactttgtcacaaaactgtctatattagacattttggagggaccaggaaatgtaagacaccaaatcctccatctcttcagtgtgcctgatgtcacctcatgatttgctgttacttttttaactcctgcgccaaggacagtgggttctgtgtccacctttgtgctttgcgaggccgagcccaggcatctgctcgcctgccacggctgaccagagaaggtgcttcaggagctctgccttagacgacgtgttacagtatgaacacacagcagaggcaccctcgtatgttttgaaagttgccttctgaaagggcacagttttaaggaaaagaaaaagaatgtaaaactatactgacccgttttcagttttaaagggtcgtgagaaactggctggtccaatgggatttacagcaacattttccattgctgaagtgaggtagcagctctcttctgtcagctgaatgttaaggatggggaaaaagaatgcctttaagtttgctcttaatcgtatggaagcttgagctatgtgttggaagtgccctggttaatccatacacaaagacggtacataatcctacaggtttaaatgtacataaaaatatagtttggaattctttgctctactgtttacattgcagattgctataatttcaaggagtgagattataaataaaatgatgcactttaggatgtttcctatttttgaaatctgaacatgaatcattcacatgaccaaaaattgtgtttttttaaaaatacatgtctagtctgtcctttaatagctctcttaaataagctatgatattaatcagatcattaccagttagcttttaaagcacatttgtttaagactatgtttttggaaaaatacgctacagaatttttttttaagctacaaataaatgagatgctactaattgttttggaatctgttgtttctgccaaaggtaaattaactaaagatttattcaggaatccccatttgaatttgtatgattcaataaaagaaaacaccaagtaagttatataaaat

SEQ ID NO: 968 - protein, 697 aa, Homo sapien
MACEIMPLQSSQEDERPLSPFYLSAHVPQVSNVSATGELLERTIRSAVEQHLFDVNNSGGQSSEDSESGTLSASSATSARQRRRQSKEQDEVRHGRDKGLINKENTPSGFNHLDDCILNTQEVEKVHKNTFGCAGERSKPKRQKSSTKLSELHDNQDGLVNMESLNSTRSHERTGPDDFEWMSDERKGNEKDGGHTQHFESPTMKIQEHPSLSDTKQQRNQDAGDQEESFVSEVPQSDLTALCDEKNWEEPIPAFSSWQRENSDSDEAHLSPQAGRLIRQLLDEDSDPMLSPRFYAYGQSRQYLDDTEVPPSPPNSHSFMRRRSSSLGSYDDEQEDLTPAQLTRRIQSLKKKIRKFEDRFEEEKKYRPSHSDKAANPEVLKWTNDLAKFRRQLKESKLKISEEDLTPRMRQRSNTLPKSFGSQLEKEDEKKQELVDKAIKPSVEATLESIQRKLQEKRAESSRPEDIKDMTKDQIANEKVALQKALLYYESIHGRPVTKNERQVMKPLYDRYRLVKQILSRANTIPIIGSPSSKRRSPLLQPIIEGETASFFKEIKEEEEGSEDDSNVKPDFMVTLKTDFSARCFLDQFEDDADGFISPMDDKIPSKCSQDTGLSNLHAASIPELLEHLQEMREEKKRIRKKLRDFEDNFFRQNGRNVQKEDRTPMAEEYSEYKHIKAKLRLLEVLISKRDTDSKSM

SEQ ID NO: 969 - DNA, 4491 bp, Homo sapien; identical to SEQ ID NO: 967

SEQ ID NO: 970 - protein, 697 aa, Homo sapien; identical to SEQ ID NO: 968

SEQ ID NO: 971 - DNA, 1379 bp, Homo sapien
gcgcgcagcagccatctccactccaaagttagacaaaatgccaggaatgttcttctctgctaacccaaaggaattgaaaggaaccactcattcacttctagacgacaaaatgcaaaaaaggaggccaaagacttttggaatggatatgaaagcatacctgagatctatgatcccacatctggaatctggaatgaaatcttccaagtccaaggatgtactttctgctgctgaagtaatgcaatggtctcaatctctggaaaaacttcttgccaaccaaactggtcaaaatgtctttggaagtttcctaaagtctgaattcagtgaggagaatattgagttctggctggcttgtgaagactataagaaaacagagtctgatcttttgccctgtaaagcagaagagatatataaagcatttgtgcattcagatgctgctaaacaaatcaatattgacttccgcactcgagaatctacagccaagaagattaaagcaccaacccccacgtgttttgatgaagcacaaaaagtcatatatactcttatggaaaaggactcttatcccaggttcctcaaatcagatatttacttaaatcttctaaatgacctgcaggctaatagcctaaagtgactggtccctggctgaagggaattaacagatagtatcaagcgcagaaggaatgtgccagtatggctccctgggtgaacagcttggccttttgtgggtgtcttgacagcccaagaagaacaaatgactcagaatggattaacatgaaagttatccaggcgcagagttgaagaagcataagcaagacaaaaacagagagaccgcagaaggaggaagatactgtggtactgtcataaaaaacagtggagctctgtattagaaagcccctcagaactgggaaggccaggtaactctagttacacagaaactgtgactaaagtctatgaaactgattacaacagactgtaagaatcaaagtcaactgacatctatgctacatattattatatagtttgtactgagctattgaagtcccattaacttaaagtatatgttttcaaattgccattgctactattgcttgtcggtgttattttattttattgtttttgactttggaagagatgaactgtgtatttaacttaagctattgctcttaaaaccagggagtcagaatatatttgtaagttaaatcattggtgctaataataaatgtggattttgtattaaaatatatagaagcaatttctgtttacatgtccttgctacttttaaaaacttgcatttattcctcagattttaaaaataaataaataattcatttaaaaaaaaaaaaaaaaaaaaaaaaaaaaaaaaaaaaaaaaaaaaaaaaaaa

SEQ ID NO: 972 - protein, 196 aa, Homo sapien
MPGMFFSANPKELKGTTHSLLDDKMQKRRPKTFGMDMKAYLRSMIPHLESGMKSSKSKDVLSAAEVMQWSQSLEKLLANQTGQNVFGSFLKSEFSEENIEFWLACEDYKKTESDLLPCKAEEIYKAFVHSDAAKQINIDFRTRESTAKKIKAPTPTCFDEAQKVIYTLMEKDSYPRFLKSDIYLNLLNDLQANSLK

SEQ ID NO: 973 - DNA, 1020 bp, Homo sapien
ccatggcaggtcgctcctgcagtattagttcttgcagctggtggcggcggctgaggcggcatggatctcagcgagctggagagagacaatacaggccgctgtcgcctgagttcgcctgtgcccgcggtgtgccgcaaggagccttgcgtcctgggcgtcgatgaggcgggcaggggccccgtgctgggccccatggtctacgccatctgttattgtcccctgcctcgcctggcagatctggaggcgctgaaagtggcagactcaaagaccctattggagagcgagcgggaaaggctgtttgcgaaaatggaggacacggactttgtcggctgggcgctggatgtgctgtctccaaacctcatctctaccagcatgcttgggcgggtcaaatacaacctgaactccctgtcacatgatacagccactgggcttatacagtatgcattggaccagggcgtgaacgtcacccaggtattcgtggacaccgtagggatgccagagacataccaggcgcagctgcagcaaagttttcccgggattgaggtgacggtcaaggccaaagcagatgccctctacccggtggttagtgctgccagcatctgtgccaaggtggcccgggaccaggccgtgaagaaatggcagttcgtggagaaactgcaggacttggatactgattatggctcaggctaccccaatgatcccaagacaaaagcgtggttgaaggagcacgtggagcctgtgttcggcttcccccagtttgtccggttcagctggcgcacggcccagaccatcctggagaaagaggcggaagatgttatatgggaggactcagcatccgagaatcaggagggactcaggaagatcacatcctacttcctcaatgaagggtcccaagcccgtccccgttcttcccaccgatatttcctggaacgcggcctggagtcagcaaccagcctctagcagctgcctctacgcgctctacctgcttccccaacccagacattaaaattgtttaaggag

SEQ ID NO: 974 - protein, 299 aa, Homo sapien
MDLSELERDNTGRCRLSSPVPAVCRKEPCVLGVDEAGRGPVLGPMVYAICYCPLPRLADLEALKVADSKTLLESERERLFAKMEDTDFVGWALDVLSPNLISTSMLGRVKYNLNSLSHDTATGLIQYALDQGVNVTQVFVDTVGMPETYQAQLQQSFPGIEVTVKAKADALYPVVSAASICAKVARDQAVKKWQFVEKLQDLDTDYGSGYPNDPKTKAWLKEHVEPVFGFPQFVRFSWRTAQTILEKEAEDVIWEDSASENQEGLRKITSYFLNEGSQARPRSSHRYFLERGLESATSL

SEQ ID NO: 975 - DNA, 1280 bp, Homo sapien
gcggccgccgtggccaggcaacctatgggtaccaccgggttctcgcgggtcttgcgaacgaacttttccttgaaactctctggattcctgtaaacagtggggctcagcccctcaatgactggaggcttcgatggttcaaaggggacctccggaatcacagggccgggagtcgccatgtccgggccacagcagcaggagaaaatcgggactccgacctcagcctcccggtgaaggtcatgaaaggggcggggaaacgaataaattgagccttgtacgcaggcgcaaatgctcgttgcatcctgggagtcgtagtgctcagcacggtagtgctacaaaaggactacatttccccaaatgcccgcaaagccttgtgcacgccttccggaaggagtttgttacacgaggtctgagagacagaggcagcgtgtttgagctgctggtgcggtggtcagcgcgatgcccaaggccaagggcaaaacccggaggcagaagtttggttacagtgtcaaccgaaagcgtctgaaccggaatgctcgacggaaggcagcgcgcggaatcgaatgctcccacatccgacatgcctgggaccacgctaaatcggtacggcagaacctggccgagatggggttggctgtggaccccaacagggcggtgcccctccgtaagagaaaggtgaaggccatggaggtggacatagaggagaggcctaaagagcttgtacggaagccctatgtgctgaatgacctggaggcagaagccagccttccagaaaagaaaggaaatactctgtctcgggacctcattgactatgtacgctacatggtagagaaccacggggaggactataaggccatggcccgtgatgagaagaattactatcaagataccccaaaacagattcggagtaagatcaacgtctataaacgcttttacccagcagagtggcaagacttcctcgattctttgcagaagaggaagatggaggtggagtaactggtttacatcacagctgccccaggctgaggcgtcccccggaccagtgaagctggagccagggtgtaaggcaaggaggtgctgtgtggctccagaggggctggccaggtcccatggaatcagaaggttacacacacacgtgcacactccccgctctggggaaggaactgttctcagaggctccaatttatattcatctgggggttcacggaaaagccagaacctgctgttttcagggtgggtgatgtaaatatagtgtgtacataataaagcaaatatattttaaa

SEQ ID NO: 976 - protein, 178 aa, Homo sapien
MPKAKGKTRRQKFGYSVNRKRLNRNARRKAARGIECSHIRHAWDHAKSVRQNLAEMGLAVDPNRAVPLRKRKVKAMEVDIEERPKELVRKPYVLNDLEAEASLPEKKGNTLSRDLIDYVRYMVENHGEDYKAMARDEKNYYQDTPKQIRSKINVYKRFYPAEWQDFLDSLQKRKMEVE

SEQ ID NO: 977 - DNA, 5645 bp, Homo sapien
cgtccaccgtggagtctctccttgctttgggtccactgagccccacacattgttgagtgtctgattgtctccttgcccttacaggacaggaaagcgaaatctctgttcctttgtagggacctttcttttgtaggtgaaagggacagaaatatgattctggcctccttgatggtgaatacaggaacactttcagataaattacaatagagaggagtcagcttatttaaacaaactgaggttaagccagagattgcagttaacagtgaaaaaatttaaagcaagtacctggatggatgcaaagcagtgcccaggagacccaacttacgtgacagagatgatcattgtcactcattcattatgttttgagcaccagccatgtgccaggtccagaactagaagaaacttgggtgtaggtgagatcataggaacagtccctgccccagctgaacatcaggaagccagactgggagcacatgccgtggctgactaggactccagcagggacctggggttccatcagatcagtgtaaagcgatggtttcccaaatgagacctctccagagatggttcattccaccccgcaatggccaccagaaacattgtgctgaccagagggcttcactgccccaaaccccaaaatcacactccaggatgagaaacctaaaagtctatcttgatgaggcttcatagctggaaaccacccctcatggatccacaggctgcatttgatgaaaggagactccaggaagtcgagccattccaggcagacatgtagcaaaagcccgagctggggtccgccctcatgcaataaataacacctgtgcacataagagaggtgacaggcagggcatccctggggacctgggcctgtggcacgtgaagaaacacccaagagagcacgaagtcccaatgccatgaccagatatttcggtgccaggcatgcttctgggtcccagcaaaagacacacaaatccgtgtccttggggacccacagtctagtgacctagggctggccgggtcgcacgcttcttttcaagggctcgaaagcctctgcatggatgcaactttgggggaaaagtaaccctaaccctctgcttctctcatcctcccctcttctgtgtatatgtctgtctctttctctctgtgtgtgcccttccccactcccatccccattcctttttttatttattatattttggtggtgtgtggctcggtttctgttggtcccctcgtgtggcccctcccctgctgcagaactcgtccagctcggcctcctccgaagcctcggaaacctgccagtcagtgagcgagtgcagctcccccacctctgtcagctcgggctccaccatgggtgcctgggtgtccacagagaaggtgaccgcccgggtggcagccacagcggccccactctccctggtccccctgcctgctgctcagacagccctcacagccgcggcaacctggaagctcagaatcgacaccaagagtggggctcctcttggggacagagggtgggacaaggctgagagcattttctagaatgagtgcctggctgctggacaatgaccacatggttgtctcaagggagaggaaggggtatggggaatttggaggtgtgaaggctttctcccagaccaggtgttgcgtgcctgtccatcctcctccctcccttcccgagccacccaccagaccgttggatgagccatgtcactgtgtcagaggctgtgtgcttttccgctttttagtttgcacccccacccccctgcccttgattgagaatgtgctcctgagcaatgcgacgattttggaaacctagaatgaacagattcatttgaagatgctttggaatttttaaatttgcataatgaaatgagcaaatcactatcaccattaaatgaggcttcattagttacattatcaaaaaccattgacaaggccacaaattgagggcactgatcaatttccaaacttctaaaacgtaggtcaaacatagatgcttatttgctgtcaaactcatgtgcattctttgcaccccggctcttttctcttgcatcacagatcatccgtgagcagcagagccccaatgtttgttttatttataaatattcaggtttcccctcccttgaatgtcaatgccattttgtatctccgcactcatcctgttatattaattttttttcctttcccccccctttttttgtttgtttccagttgtctaacgggttttctcactatagtttatcaagtgagtcccacgtggggcccacgggtgcaggccttttccctcattgcctgcctgcctcccgcctgctccctcgggtcacctctgtccaccttccagactacgctcattattacaccattgggcccggcatgttcccgtcatctcagatccctagctggaaggactgggctaagcctgggccctatgaccagcctctggtgaacaccctgcagcgccgcaaagagaagcgagaaccggaccccaacgggggaggacccactaccgccagcggcccacctgcagcagctgaggaggctcagagaccacggagcatgactgtatcggctgccaccaggcctggtgaggagatggaggcttgtgaggagctggccctggccctgtctcggggcctgcagctggacacccagaggagcagccgggactcgcttcagtgctccagcggctacagcacccagacaaccaccccctgctgctctgaggacaccatcccttcccaagtttcagattatgattatttctctgtaagtggtgaccaggaggcagatcagcaggagttcgacaagtcctccaccattccaagaaacagcgacatcagccagtcctaccgacggatgttccaagccaagcgtccagcctcaactgctggcctccccaccaccctgggacctgctatggtcactccaggggttgcaactatccgacggaccccttccaccaagccttctgtccgccggggaaccattggagctggtcccatccccatcaagacacccgtgatccctgtcaagaccccaaccgtcccagacctcccaggggtgttgccagcccctccagatgggccagaagagcggggggagcacagccctgagtcgccatctgtgggtgagggcccccaaggtgtcaccagcatgccctcctcaatgtggagcggccaagcttccgttaaccctccacttccaggcccgaagcccagtatccctgaggagcacagacaggcaattccagaaagtgaagctgaagaccaggaacgggaacccccaagtgccactgtctccccaggccagattccagagagtgaccctgcagacctgagcccaagggatactccacaaggagaagacatgctgaacgccatccgaaggggcgtgaaactgaagaagaccacgacaaacgatcgctcagcccctcgcttttcttaggttcacaagaaatgcgccggtggggaatgaactgtttcattaataaaacctaatttgtcttgatccattccactctataataaaacaaaagattttgtaggcaactcggaatatagctcttttgaaagtactcgacacctttagataagaattaaaaccaacctatgtaactgacataatcttgatcttttaatttgtaaatattgacaattttctttctgcacattttaatcttagtttcccttttgatttttctgaaggtgccaaattccatttaacttttttacaagtctttgtaaaattttaaatgcataaagggggttggggcaggggaaccacgaagtagttaattttagaaaaggatttactatacttcactcttctttttttttccccacaagcttttgtagatgcattgtagtagtctagcttagaagcaaatgcaagttattttaatgtacaaactaaatgggtaagaggtaaaatcttcatttaaatatactatgttctggatgaaaagagcaggagtaacaattgatgagcaatattcagagtgaagtaaatctggaaatggtagactgtgttgggattggggggagggccatgggaggggtacatcgtcaacatagccgatcctgttacatttaagagtagcctcgtaggttgaatttcttctggtagcttcatggtaaatgcatccgaataagccatactggattgcagtgtttgtttctgtagggtgtttaaggacttgacttcctttctcccatgattcctctggactgcacacagcacccacaaccagccccatgcatgctgctgcctctgggcagtcgtagaatctcccacttcagtttctcgttgattgtactcacctttatggaatccaaatacatccaaaagggtaaggcagttttaaaaatgtgaaaacatttaaaaatgataatagcagggaattcttagattatagtaaatgccttttacttaactgtgcccagcaggctgggtgcgttaaaaagcccaagtattttgaaaaaactcgaacagatttgacaagggtagccagcttggagtctagcaacttgccaatgtgtttaccaatctgggggcttgtttttcttttcttctttcaaataaatggcagttaactggctttacagtaaacattgaagagaggaggatttgtttattgtcactgggaatctgaccactatactgtcctttttttgtattctgggtaatgttttttggaaaagatttgtcttttctaagtggaagttaaatttgttatactgcccatcccctaaagccaacagagatttgtagatttaaagggatcacatttgaagacaatagtgtttaagaaagcaagcaagtcccttagcagtcaggtcataacagggcacatttctgaccgaaccctctcaaggcagaggaggagtttggtgggtttcatacaccctgcagattcctgttggctctaaccctcaattacctaatcttatgctttaacacataactgcattggatgtgagagtaacgtaccgtatggtcattgttctatatattaacattgaacactgctgcgattgctcaaggacattttatgttacggctttaaagcaaaggcatgattattagaaactatttaagcttttttctttgaaaaacaagcttcttttacagaatataaacaacagtagtgcctgtggtttagcccaccaatcttgatgactaaaagtagctgatgcattgtgcatatgatgcttgagatggtttttgcaaaagcagaaatcgctgcaaggtaatcacaatagataaaagtggtattttaaacctttgaaataaatggatgtaactgtaccttggtacagcttttcacttgtttagtttttaaacgttagtataatctgaataaataaaatgttgccaaattcaatgtagaaagaatgtgacaacacaccttgggtagttctgcttgtgtttttgcatattgtaaaagcagtgtcacagctaaaaagaaagaaatcgtttctaacagtaaattattgtgctttagttgctagtttgtactgagagttgacctctccctgtgcagttttttgttctaaacttgtataaataacaattgtgtaatgtgtctccctcctacattgtaacaattgcttcagcctacgttataaataaagaaccactagatt

SEQ ID NO: 978 - protein, 356 aa, Homo sapien
MFPSSQIPSWKDWAKPGPYDQPLVNTLQRRKEKREPDPNGGGPTTASGPPAAAEEAQRPRSMTVSAATRPGEEMEACEELALALSRGLQLDTQRSSRDSLQCSSGYSTQTTTPCCSEDTIPSQVSDYDYFSVSGDQEADQQEFDKSSTIPRNSDISQSYRRMFQAKRPASTAGLPTTLGPAMVTPGVATIRRTPSTKPSVRRGTIGAGPIPIKTPVIPVKTPTVPDLPGVLPAPPDGPEERGEHSPESPSVGEGPQGVTSMPSSMWSGQASVNPPLPGPKPSIPEEHRQAIPESEAEDQEREPPSATVSPGQIPESDPADLSPRDTPQGEDMLNAIRRGVKLKKTTTNDRSAPRFS

SEQ ID NO: 979 - DNA, 4565 bp, Homo sapien
ggcgagctaagccggaggatgtgcagctgcggcggcggcgccggctacgaagaggacggggacaggcgccgtgcgaaccgagcccagccagccggaggacgcgggcagggcgggacgggagcccggactcgtctgccgccgccgtcgtcgccgtcgtgccggccccgcgtccccgcgcgcgagcgggaggagccgccgccacctcgcgcccgagccgccgctagcgcgcgccgggcatggtcccctcttaaaggcgcaggccgcggcggcgggggcgggcgtgcggaacaaagcgccggcgcggggcctgcgggcggctcgggggccgcgatgggcgcggcgggcccgcggcggcggcggcgctgcccgggccgggcctcgcggcgctagggcgggctggcctccgcgggcgggggcagcgggctgagggcgcgcggggcctgcggcggcggcggcggcggcggcggcggcccggcgggcggagcggcgcgggcatggccgcgcgcggccggcgcgcctggctcagcgtgctgctcgggctcgtcctgggcttcgtgctggcctcgcggctcgtcctgccccgggcttccgagctgaagcgagcgggcccacggcgccgcgccagccccgagggctgccggtccgggcaggcggcggcttcccaggccggcggggcgcgcggcgatgcgcgcggggcgcagctctggccgcccggctcggacccagatggcggcccgcgcgacaggaactttctcttcgtgggagtcatgaccgcccagaaatacctgcagactcgggccgtggccgcctacagaacatggtccaagacaattcctgggaaagttcagttcttctcaagtgagggttctgacacatctgtaccaattccagtagtgccactacggggtgtggacgactcctacccgccccagaagaagtccttcatgatgctcaagtacatgcacgaccactacttggacaagtatgaatggtttatgagagcagatgatgacgtgtacatcaaaggagaccgtctggagaacttcctgaggagtttgaacagcagcgagcccctctttcttgggcagacaggcctgggcaccacggaagaaatgggaaaactggccctggagcctggtgagaacttctgcatgggggggcctggcgtgatcatgagccgggaggtgcttcggagaatggtgccgcacattggcaagtgtctccgggagatgtacaccacccatgaggacgtggaggtgggaaggtgtgtccggaggtttgcaggggtgcagtgtgtctggtcttatgagatgcagcagcttttttatgagaattacgagcagaacaaaaaggggtacattagagatctccataacagtaaaattcaccaagctatcacattacaccccaacaaaaacccaccctaccagtacaggctccacagctacatgctgagccgcaagatatccgagctccgccatcgcacaatacagctgcaccgcgaaattgtcctgatgagcaaatacagcaacacagaaattcataaagaggacctccagctgggaatccctccctccttcatgaggtttcagccccgccagcgagaggagattctggaatgggagtttctgactggaaaatacttgtattcggcagttgacggccagccccctcgaagaggaatggactccgcccagagggaagccttggacgacattgtcatgcaggtcatggagatgatcaatgccaacgccaagaccagagggcgcatcattgacttcaaagagatccagtacggctaccgccgggtgaaccccatgtatggggctgagtacatcctggacctgctgcttctgtacaaaaagcacaaagggaagaaaatgacggtccctgtgaggaggcacgcgtatttacagcagactttcagcaaaatccagtttgtggagcatgaggagctggatgcacaagagttggccaagagaatcaatcaggaatctggatccttgtcctttctctcaaactccctgaagaagctcgtcccctttcagctccctgggtcgaagagtgagcacaaagaacccaaagataaaaagataaacatactgattcctttgtctgggcgtttcgacatgtttgtgagatttatgggaaactttgagaagacgtgtcttatccccaatcagaacgtcaagctcgtggttctgcttttcaattctgactccaaccctgacaaggccaaacaagttgaactgatgacagattaccgcattaagtaccctaaagccgacatgcagattttgcctgtgtctggagagttttcaagagccctggccctggaagtaggatcctcccagtttaacaatgaatctttgctcttcttctgcgacgtcgacctcgtctttactacagaattccttcagcgatgtcgagcaaatacagttctgggccaacaaatatattttccaatcatcttcagccagtatgacccaaagattgtttatagtgggaaagttcccagtgacaaccattttgcctttactcagaaaactggcttctggagaaactatgggtttggcatcacgtgtatttataagggagatcttgtccgagtgggtggctttgatgtttccatccaaggctgggggctggaggatgtggaccttttcaacaaggttgtccaggcaggtttgaagacgtttaggagccaggaagtaggagtagtccacgtccaccatcctgtcttttgtgatcccaatcttgaccccaaacagtacaaaatgtgcttggggtccaaagcatcgacctatgggtccacacagcagctggctgagatgtggctggaaaaaaatgatccaagttacagtaaaagcagcaataataatggctcagtgaggacagcctaatgtccagctttgctggaaaagacgtttttaattatctaatttatttttcaaaaattttttgtatgatcagtttttgaagtccgtatacaaggatatattttacaagtggttttcttacataggactcctttaagattgagctttctgaacaagaaggtgatcagtgtttgcctttgaacacatcttcttgctgaacattatgtagcagacctgcttaactttgacttgaaatgtacctgatgaacaaaacttttttaaaaaaatgttttcttttgagaccctttgctccagtcctatggcagaaaacgtgaacattcctgcaaagtattattgtaacaaaacactgtaactctggtaaatgttctgttgtgattgttaacattccacagattctaccttttgtgttttgtttttttttttttacaattgttttaaagccatttcatgttccagttgtaagataaggaaatgtgataatagctgtttcatcattgtcttcaggagagctttccagagttgatcatttcccctcatggtactctgctcagcatggccacgtaggttttttgtttgttttgttttgttctttttttgagacggagtctcactctgttacccaggctggaatgcagtggcgcaatcttggctcactttaacctccacttccctggttcaagcaattcccctgcctttgcctcccgagtagctgggattacaggcacacaccaccacgcccagctagtttttttgtatttttagtagagacggggtttcaccatgcaagcccagctggccacgtaggttttaaagcaaggggcgtgaagaaggcacagtgaggtatgtggctgttctcgtggtagttcattcggcctaaatagacctggcattaaatttcaagaaggatttggcattttctcttcttgacccttctctttaaagggtaaaatattaatgtttagaatgacaaagatgaattattacaataaatctgatgtacacagactgaaacacacacacatacaccctaatcaaaacgttggggaaaaatgtatttggttttgttcctttcatcctgtctgtgttatgtgggtggagatggttttcattctttcattactgttttgttttatcctttgtatctgaaatacctttaatttatttaatatctgttgttcagagctctgccatttcttgagtacctgttagttagtattatttatgtgtatcgggagtgtgtttagtctgttttatttgcagtaaaccgatctccaaagatttccttttggaaacgctttttcccctccttaatttttatattccttactgttttactaaatattaagtgttctttgacaattttggtgctcatgtgttttggggacaaaagtgaaatgaatctgtcattataccagaaagttaaattctcagatcaaatgtgccttaataaatttgttttcatttagatttcaaacagtgatagacttgccattttaatacacgtcattggagggctgcgtatttgtaaatagcctgatgctcatttggaaaaataaaccagtgaacaatatttttctattgtacttttcagaaccattttgtctcattattcctgttttagctgaagaattgtattacatttggagagtaaaaaacttaaacacg

SEQ ID NO: 980 - protein, 802 aa, Homo sapien
MAARGRRAWLSVLLGLVLGFVLASRLVLPRASELKRAGPRRRASPEGCRSGQAAASQAGGARGDARGAQLWPPGSDPDGGPRDRNFLFVGVMTAQKYLQTRAVAAYRTWSKTIPGKVQFFSSEGSDTSVPIPVVPLRGVDDSYPPQKKSFMMLKYMHDHYLDKYEWFMRADDDVYIKGDRLENFLRSLNSSEPLFLGQTGLGTTEEMGKLALEPGENFCMGGPGVIMSREVLRRMVPHIGKCLREMYTTHEDVEVGRCVRRFAGVQCVWSYEMQQLFYENYEQNKKGYIRDLHNSKIHQAITLHPNKNPPYQYRLHSYMLSRKISELRHRTIQLHREIVLMSKYSNTEIHKEDLQLGIPPSFMRFQPRQREEILEWEFLTGKYLYSAVDGQPPRRGMDSAQREALDDIVMQVMEMINANAKTRGRIIDFKEIQYGYRRVNPMYGAEYILDLLLLYKKHKGKKMTVPVRRHAYLQQTFSKIQFVEHEELDAQELAKRINQESGSLSFLSNSLKKLVPFQLPGSKSEHKEPKDKKINILIPLSGRFDMFVRFMGNFEKTCLIPNQNVKLVVLLFNSDSNPDKAKQVELMTDYRIKYPKADMQILPVSGEFSRALALEVGSSQFNNESLLFFCDVDLVFTTEFLQRCRANTVLGQQIYFPIIFSQYDPKIVYSGKVPSDNHFAFTQKTGFWRNYGFGITCIYKGDLVRVGGFDVSIQGWGLEDVDLFNKVVQAGLKTFRSQEVGVVHVHHPVFCDPNLDPKQYKMCLGSKASTYGSTQQLAEMWLEKNDPSYSKSSNNNGSVRTA

SEQ ID NO: 981 - DNA, 4417 bp, Homo sapien
ggcacgagtggcggaaaggctgcggccccgcgccagagggccggtggctcctccgggcttctgaggacccgcagggagcgggcctcatcatttctgtctcctgtttctccacttccttctctattggttggtccactgatgtatggacttgcacatgatgaactgtgaacttctagccacatgtagtgcccttgggtacttggagggagacacttaccataaggaaccagattgcttagagagcgtgaaggatctgatccgctatttgaggcatgaggatgagacacgagatgtgcggcagcagctgggggcagcccagatcctacagagcgaccttctgcccatcctcacccagcaccaccaggacaagcctctctttgatgctgttatcagactgatggtgaacttgacacaaccagccttgctctgttttggcaatctgcctaaggagcccagctttcggcaccattttttgcaggtgctaacttatttgcaggcctacaaagaggcctttgccagtgagaaggcttttggagtcctcagtgaaaccttgtatgagctgctgcagctgggctgggaggaacggcaggaggaagacaacttgctgattgaacggatcctactgctggtcagaaatattctccatgtcccagctgaccttgatcaggagaagaagattgatgatgacgccagtgcccatgaccagctcctctgggcgattcacctcagcggcctggatgacctgctcctctttctggccagctcgtctgctgaggagcaatggagcctacatgtgctagagattgtctcccttatgtttcgtgaccagaaccccgagcagctggcgggagtagggcagggacgcttagctcaggagcggagtgcagattttgcagaactggaggtattgcgccagcgagagatggcagaaaagaagactcgagccctccagcgaggcaacaggcattctcgatttgggggctcctatattgtccaggggttgaaatccattggggagagggacctcatctttcacaaaggccttcacaacctacgaaactacagttcagatttgggaaagcagccgaaaaaggtgcctaaacgtcgccaggccgcccgagagctgtccattcagcgccgttctgccctcaatgtgaggctcttcctcagagacttctgctctgagttcctggagaactgttacaaccggctcatgggatcagtaaaggatcacctgcttcgggagaaagctcagcagcatgatgagacctattatatgtgggccttggctttcttcatggccttcaaccgagctgcctccttccggccaggcctggtttctgagaccctcagtgtccgtaccttccacttcattgagcagaacctcaccaactactatgagatgatgctgactgaccgcaaggaagctgcctcctgggcacgccggatgcacttggctctgaaggcctatcaggagctgctggcaacagtgaatgagatggacttatctccagatgaggctgtgagggagagcagccgcatcatcaagaacaatattttctatgtgatggagtaccgagaactattcctggcactttttcgaaagtttgatgagagatgccagccccgctctttccttcgtgacctggtggagaccacccacctcttcctcaaaatgttggagcgattctgtcggagccgtgggaacctggtggtgcagaacaaacaaaagaagagaaggaagaagaagaagaaggtcctagaccaggccattgtttctggtaatgtcccatctagcccagaagaagtggaggctgtgtggccagccctggctgagcagctacagtgctgtgcccagaattctgagctcagcatggactccgtggttccctttgatgcggcctcagaggtgccagtggaggagcagcgggcagaagctatggtacggatccaagactgtctcctggctggccaggccccacaggccctgactctcctgaggtctgctcgggaggtgtggcctgaaggagatgtgtttggctctcaagacatttctccagaggaagagatccagttgctgaaacaaatcctctctgctccacttccccggcagcagggcccagaggaacgtggggcagaggaagaagaagaggaggaggaggaggaagaggaggagttgcaagtggtccaggtgtcggagaaagaatttaattttctggactacctgaaacgctttgcatgttcaactgtcgttcgagcctatgtgctgctactaaggagctaccagcagaatagtgcccacactaaccattgcattgtgaagatgctgcaccggctggcccatgacctcaaaatggaagccctactttttcagctgtcagtcttctgcctcttcaatcgtctgcttagtgaccctgctgctggagcctacaaagagctagtgacttttgccaaatacatcctgggcaaattttttgcactggctgcagtcaaccaaaaagcctttgtggagctgttgttctggaagaacacagctgtggttcgagagatgactgagggctatggctccctggatgacaggtcttccagtcgcagagcacctacatggagccccgaagaagaggctcatcttcaggagctgtacctcgccaataaggacgtggaagggcaggatgtggtggaagccatcttggcccacctgaatactgttcctcgaacacgcaagcagatcatccaccatctggtacagatgggactggctgacagtgtcaaggacttccaaaggaaaggaacccatattgtactgtggacgggggatcaggagttggagctgcagcggctttttgaggaattccgggactcagatgatgtcctgggtcatatcatgaagaatatcacagccaaacgctcacgggcccgaatagtggataaactcttggctctggggctggtggctgagcggcgggagctgtacaagaaacggcagaaaaagttggcatcctccatcttgccaaatggagcggagtccctgaaagatttttgccaggaagatctggaagaagaggaaaacctgcctgaggaagacagcgaagaggaagaagaagggggctcagaagcagaacaagtccagggtagcttagtcctttcaaatgaaaaccttggtcaaagcctgcatcaggaaggcttttctatcccgctcctatggctccagaactgcctgatccgagcagctgatgatcgggaagaggatggctgctcccaggccgttccattggtgccactcacagaggaaaatgaggaagccatggaaaacgaacagtttcagcagctgttgcgcaagctaggggttcggccccctgcctctgggcaggaaaccttctggcgaattccagccaagctgagtcctacccagctccggagggcagcagcttctttgagtcaaccagaggaggaacagaagctgcagccagagctgcagcctaaagtccctggagagcaaggctctgatgaggagcactgtaaagagcaccgagcacaagccctgagggccctcttgctagcccacaagaagaaagcgggcctggcatccccagaggaggaagacgctgttggtaaagagccgctgaaggcagcacccaagaaacgacaattgctggacagcgacgaggaacaggaagaagatgagggcaggaacagagcaccagagttgggagctccaggaatccaaaagaagaaacgataccagattgaggatgatgaggatgactgaagagctaagaagcctaggggtagagatagacacgtttttagatggtgcattcaagtcagagttggaagggtcatacaggacccagaagctcctcttactggacagagcagtagaatcccaggctctttcacggatttaggctgagaaacttcagcagcagtattggacttctctgctgtcagtctttgtttctcccagtttttatcggtatgccccagcagctctctggagatttagttctcttcttctaggaaccatttcttttggttattggagctccttagcaaataagaggagtgagtgaaatagagaaagcaccccggaccccttttattggtctgttcctttggctttctcttggaggtgggtcgcagcaccagatggggagctttatgacatgacaggcgggagttttgtaccacttttagaagataccagatgcctctgtcctcattttgtttcctatgatcatcctctagataccagatagaggcccattcctgcatttgagatagggttggaatatagtactctagatgatgaatgtgtttgctttgtgtttggtattaaacatgtaagattagaagttctcaaaaaaaaaaaaaaaaaaaaaaaaaaaaaaaaaaaaaaaaaaaaaaaaaaaaaaaa

SEQ ID NO: 982 - protein, 1208 aa, Homo sapien
MDLHMMNCELLATCSALGYLEGDTYHKEPDCLESVKDLIRYLRHEDETRDVRQQLGAAQILQSDLLPILTQHHQDKPLFDAVIRLMVNLTQPALLCFGNLPKEPSFRHHFLQVLTYLQAYKEAFASEKAFGVLSETLYELLQLGWEERQEEDNLLIERILLLVRNILHVPADLDQEKKIDDDASAHDQLLWAIHLSGLDDLLLFLASSSAEEQWSLHVLEIVSLMFRDQNPEQLAGVGQGRLAQERSADFAELEVLRQREMAEKKTRALQRGNRHSRFGGSYIVQGLKSIGERDLIFHKGLHNLRNYSSDLGKQPKKVPKRRQAARELSIQRRSALNVRLFLRDFCSEFLENCYNRLMGSVKDHLLREKAQQHDETYYMWALAFFMAFNRAASFRPGLVSETLSVRTFHFIEQNLTNYYEMMLTDRKEAASWARRMHLALKAYQELLATVNEMDLSPDEAVRESSRIIKNNIFYVMEYRELFLALFRKFDERCQPRSFLRDLVETTHLFLKMLERFCRSRGNLVVQNKQKKRRKKKKKVLDQAIVSGNVPSSPEEVEAVWPALAEQLQCCAQNSELSMDSVVPFDAASEVPVEEQRAEAMVRIQDCLLAGQAPQALTLLRSAREVWPEGDVFGSQDISPEEEIQLLKQILSAPLPRQQGPEERGAEEEEEEEEEEEEELQVVQVSEKEFNFLDYLKRFACSTVVRAYVLLLRSYQQNSAHTNHCIVKMLHRLAHDLKMEALLFQLSVFCLFNRLLSDPAAGAYKELVTFAKYILGKFFALAAVNQKAFVELLFWKNTAVVREMTEGYGSLDDRSSSRRAPTWSPEEEAHLQELYLANKDVEGQDVVEAILAHLNTVPRTRKQIIHHLVQMGLADSVKDFQRKGTHIVLWTGDQELELQRLFEEFRDSDDVLGHIMKNITAKRSRARIVDKLLALGLVAERRELYKKRQKKLASSILPNGAESLKDFCQEDLEEEENLPEEDSEEEEEGGSEAEQVQGSLVLSNENLGQSLHQEGFSIPLLWLQNCLIRAADDREEDGCSQAVPLVPLTEENEEAMENEQFQQLLRKLGVRPPASGQETFWRIPAKLSPTQLRRAAASLSQPEEEQKLQPELQPKVPGEQGSDEEHCKEHRAQALRALLLAHKKKAGLASPEEEDAVGKEPLKAAPKKRQLLDSDEEQEEDEGRNRAPELGAPGIQKKKRYQIEDDEDD

SEQ ID NO: 983 - DNA, 1256 bp, Homo sapien
cgtctgtgccagctcaaatccagcccctcgccctgtgccaccccaactgtgcctgatagacctgccccagcgttcctgacttcttgctggcctgtggagggtgaggtgtaattatttgtcacctgaacctaatgtatattctccttgagccccagatcccttcaagctggaagggatggggctgttggtggggtcagggtccaagaggaatgggtgttctgtggcctcgagtcctctcctgtttgcgaaaataccagttttgctctctgtgggacaaagcactgctgatgaagtccccgtgggctcatccgggctggaattcttggtttttcagccattccctgcagagtcactcaatcatcaagtccctcacagccatttctgttcccagaggagccaggcctgcagctggctgctcaggagatggcctcattcctcctgttctcccagtttgctttccacttaagacaaagccttgtctatgtggggggcggggaccggggaaagagggaggctgaaatgtttattctgcttctcccgtgtttcatgccatctcgcgtcccccttcctgcacatgggtgtgaatgcacacacatacgcgtacacacaggacttggtctgctggcctggcctcttctgcccaggtgggttggaacacgtttgctgcctgagcctgtgccactgagcatgttaggtggagcagttggtgtggcacgtgcggggtgttggcaccggaggcatggaaaagcacaggctgtactgccaggctgcgatgcgtgctggcccccgcacaggctcctgtgtgcagggactgattcctcagcacacgaggcttccacaacccagtctgctccatagcactctggcccaccctgtctgcaggtgaaacaggagggctgtttgcctctgccccatccccccgactgtgttcaggagtcccaccttgcatttcagacctgggctggcagtctgttggacttctcttcaggaagaaaaagcatcagggggaaatggaatgcccctgccccaggaacatggcagaagcacaggttctgtacctcagatggactcctgctgggccttcggggtctcagttggcttcccccagattctgattctacagctgcagaatgtatataacgcaataaaagcaaatgtttgaaccagtaaaaaaaaaaaaaaaaaaaaaaaaaaaaaaaaaaaaaaaaaaaaaaaaaaaaaaaaaaaaaaaaaaaaaaaaaaaaaaaaaaaaaaaa

SEQ ID NO: 984 - protein, 144 aa, Homo sapien
MASFLLFSQFAFHLRQSLVYVGGGDRGKREAEMFILLLPCFMPSRVPLPAHGCECTHIRVHTGLGLLAWPLLPRWVGTRLLPEPVPLSMLGGAVGVARAGCWHRRHGKAQAVLPGCDACWPPHRLLCAGTDSSAHEASTTQSAP

SEQ ID NO: 985 - DNA, 2146 bp, Homo sapien
tactcccggagtcactcatcccttaagcaagcagggtggggttaggtgcgcgtgcgcggttttaatactcctccccgaactgccaactcttcacgcacgcgaagtaggccccaccctggctgggtttacgcgtgcgcactaacgggcctggtcccggaagaccacacgcgtgcgtggtggggactacggtgacagtaccccgggtggggcgagggccagtcatggcggagtcctggtctgggcaggccttgcaggctctgccggccacggtgctgggcgcgctgggcagcgagttcttgcgggagtgggaggcgcaggacatgcgcgtgaccctcttcaagctgctgctgctgtggttggtgttaagtctcctgggcatccagctggcgtgggggttctacgggaatacagtgaccgggttgtatcaccgtccaggtctgggtggtcagaatggatccacgcctgatggctccacgcatttcccttcgtgggaaatggcagcaaacgaacctctcaaaacccacagagaataagggaaggcagcagagggtctccaagggcatcactgggtctgctggcttctacactgggttctgctactccccagacctcagggacaactgccgggggttcagggttggtagcagggagtacccagtgcctacagggctgggcctcttctgcctcttaagcctgctccctcacccaggcactgggcaagtgaagagtttgcctgtactcttatctgggtgccttaaggagagagattgtgttcttcctctctcaggggtgataactcaggaagcctctgggttgggaagaccatcagttcttttgtcttaggtttcttttcctgtccctcttccatccccaagatgtgaccccataaaaatttttcctgagttggccaggcatggtggctcacgcctgtaatcccaacactttgggaggctgaggcaggcagatcacgaggtcaggagttcgagaccagcctgaccaacatggtgaaaaccccatctctactaaaaatacaaaaattagccgggtgtggtggcacacaccagtaatcccagctactcgggaggctgaagcaggagatttgcttgaacctgggaggcagaggttgcagtgagccaagattgcgccgttgtactccagcctgggcaacagagcaagacccatctcaaaaaaaaaatttttttcctgagaggaagcctgaggttgaccagctctggggtttgtaaggcaggtctgttttctcctaggccctgagttttctgaatctctggttttgctttgttggcaaggagccagggaatcctgacctgagccagaccttaagctctatggttatttagctggccattcaggtataaggcagggtggtgtacctgctggcactatccagatggaggcaccaaacacccacatacctggcccaaccagacttctcccgtgagccaggcaaaggaaattgtcatctgccaactgtcctactcatattcctctcagtccttcttgggggtaagctgattacctgaaggacagctgaacccctggggtagcctcctatccaccactgcttaagtgcctatgggaatgtgggtctgcaccttgtcccctcataggatggtaccaagcatttagtgcacagtggccccatcatagcctgcagcctcatcatttcccatctggacctggtacaaatgcacgtcacaggctcagctcctccccactagcatcttctctaccttcaagaaccaggcagccctgccatgtcacaataggccaggggagtttccaaagatgtgggtggcaaatgcccctatagaaacaccagtacctgaaagcactgtagccctggacctgcctccttccctcggggccatacttctgtttccatctgctgggccaccagccactttagtgacccctgcctacttccttcctgttggatatcatacttccatctggctgcctttgcttaagccatctttgtggtagaggggccctggaattgcagctgtactgaggatgatgttattcacagcccctggcccacccactaatactactgcacagagtcaggatctcacatttcaccccaggctcaactgaggatgtggcttattaaacacggaagtgc

SEQ ID NO: 986 - protein, 103 aa, Homo sapien
MAESWSGQALQALPATVLGALGSEFLREWEAQDMRVTLFKLLLLWLVLSLLGIQLAWGFYGNTVTGLYHRPGLGGQNGSTPDGSTHFPSWEMAANEPLKTHRE

SEQ ID NO: 987 - DNA, 3185 bp, Homo sapien
gggcgccccgccggtcacttccgcgcggacaccagccttgcagagcccagggagatggaagacttcgcccgaggggcggcctccccaggcccctcccggcctggcctggttcccgtcagcatcatcggggctgaggatgaggattttgagaacgagctggagacaaactcagaagagcaaaacagccagttccagagcctggagcaggtgaagcggcgcccagcccacctcatggccctcctgcagcacgtggccctgcagtttgagccaggacccctgctttgctgtctgcatgccgacatgctgggctcactgggccccaaggaggccaagaaggccttcctggacttctaccacagcttcctggagaagacagcggttctccgggtgccggtccctcccaacgtcgcctttgaacttgaccgcactagggctgacctcatctccgaggatgtccagcggcggttcgtgcaggaggtggtgcaaagccagcaggtagccgtgggccggcagctggaggacttccgttccaagcggctcatgggcatgacgccctgggagcaggagctggcccagctggaggcttgggttgggcgggaccgagccagctacgaggcccgggagcggcacgtggcggagcggctgctcatgcacctggaggagatgcaacataccatctctaccgacgaagaaaagagtgctgccgtggtcaacgccattggcctgtacatgcgccaccttggggtgcggaccaagagtggagacaagaagtcggggaggaacttcttccggaaaaaggtgatggggaaccggcggtcggacgagcctgccaagaccaagaaggggctgagcagcatcctggatgccgcccgctggaaccggggagagccccaggttccagattttcgacacctcaaagcagaggttgatgccgagaagccaggtgctacagaccggaagggaggcgtggggatgccctctcgggaccggaatatcggggctcctgggcaggacacccctggagtctctctgcaccctctgtccctggacagcccagaccgggaaccaggtgctgacgcccccctggagctgggggactcatccccgcagggcccaatgagcctggagtccttggcgcccccagagagtaccgacgagggggccgaaaccgagagccccgagcctggagatgagggggagccggggcggtcgggactggagcttgaaccagaagagcctcccggctggcgggaactcgtccccccagacaccctgcacagcctgcccaagagccaggtgaagcggcaggaggtcatcagcgagctgctggtgacagaggcggcccacgtgcgcatgctgcgggtgctgcacgacctcttcttccagcccatggcagaatgcctgttcttccccttggaggagctgcagaacatcttccccagcctggacgagctcatcgaggtgcattccctgttcctcgatcgcctgatgaagcggaggcaggagagtggctacctcatcgaggagatcggagacgtgctgctggcccggtttgatggtgctgagggctcctggttccagaaaatctcctcccgcttctgcagccgccagtcatttgccttagagcagctcaaagccaagcaacgcaaggaccctcggttctgtgccttcgtgcaggaagctgagagccgcccgcggtgccgccgcctgcagctgaaggacatgatccccacggagatgcagcggctgaccaagtaccccctgctcctgcagagcatcgggcagaacacagaagagcccacagaacgggagaaagtggagctggcagccgagtgctgccgggaaattctacaccacgtcaaccaagccgtgcgtgacatggaggacctgctgaggctcaaggactatcagcggcgcctggacttgtcccaccttcggcagagcagcgaccctatgctgagcgagttcaagaacctggacatcaccaagaagaaattggtccacgagggcccactgacgtggcgggtgactaaggacaaggcagtggaggtgcatgtgctgctgctggacgacctgctgctgctgctccagcgccaggacgagcggctgctgctcaagtcccatagccggacactgacgcccacgcccgatggcaagaccatgctgcggcccgtgctgcggctcacctccgccatgacccgcgaggtggccaccgatcacaaagccttctacgtcctttttacctgggaccaggaggcccagatatacgagctggtggcacagactgtgtcggagcggaaaaactggtgtgctctcatcactgagactgccggatccctgaaagtccctgcccctgcctctcgccctaagccccggcccagcccgagcagcacccgagaacccctcctcagcagctctgagaacggcaatggtggccgagagacgtctccagctgatgcccggaccgagagaatcctcagtgacctcctgcccttctgcagaccaggccccgagggccagctcgctgccacggcccttcggaaagtgctgtccctgaagcagcttctgtttccggcggaggaagacaatggggcggggcctcctcgagatggggatggggtcccagggggcggccccctgagcccagcacggacccaggaaatccaggagaacctgctcagcttggaggagaccatgaagcagctggaggagttggaggaggaattttgccgcctgagacccctcctgtctcagcttggggggaactctgtcccccagcctggctgcacttgaggttcccgcccaggaaggccttttgcaagaaggagaggaatgggggagaggacgtgagggaccacccccacccacacagctgccgcagcatctcacaccccgagggcctgaggagagggagctgtgggccacgcctgggaggggcccagctggggttactggccccgcatgagcctcggccatctctccctcctgccctctgcttgggggactcagggctccattctggagggcaccacggtgacccgggccatctcagtattgcctgtgggggccacccctccacccccacccccaagtgccttcgctctgtttttataccctgaattggagggtttattttttaatatatattatctaagaagaaaaaaaaaaaaaaaaaaaaaaaaaaa

SEQ ID NO: 988 - protein, 912 aa, Homo sapien
MEDFARGAASPGPSRPGLVPVSIIGAEDEDFENELETNSEEQNSQFQSLEQVKRRPAHLMALLQHVALQFEPGPLLCCLHADMLGSLGPKEAKKAFLDFYHSFLEKTAVLRVPVPPNVAFELDRTRADLISEDVQRRFVQEVVQSQQVAVGRQLEDFRSKRLMGMTPWEQELAQLEAWVGRDRASYEARERHVAERLLMHLEEMQHTISTDEEKSAAVVNAIGLYMRHLGVRTKSGDKKSGRNFFRKKVMGNRRSDEPAKTKKGLSSILDAARWNRGEPQVPDFRHLKAEVDAEKPGATDRKGGVGMPSRDRNIGAPGQDTPGVSLHPLSLDSPDREPGADAPLELGDSSPQGPMSLESLAPPESTDEGAETESPEPGDEGEPGRSGLELEPEEPPGWRELVPPDTLHSLPKSQVKRQEVISELLVTEAAHVRMLRVLHDLFFQPMAECLFFPLEELQNIFPSLDELIEVHSLFLDRLMKRRQESGYLIEEIGDVLLARFDGAEGSWFQKISSRFCSRQSFALEQLKAKQRKDPRFCAFVQEAESRPRCRRLQLKDMIPTEMQRLTKYPLLLQSIGQNTEEPTEREKVELAAECCREILHHVNQAVRDMEDLLRLKDYQRRLDLSHLRQSSDPMLSEFKNLDITKKKLVHEGPLTWRVTKDKAVEVHVLLLDDLLLLLQRQDERLLLKSHSRTLTPTPDGKTMLRPVLRLTSAMTREVATDHKAFYVLFTWDQEAQIYELVAQTVSERKNWCALITETAGSLKVPAPASRPKPRPSPSSTREPLLSSSENGNGGRETSPADARTERILSDLLPFCRPGPEGQLAATALRKVLSLKQLLFPAEEDNGAGPPRDGDGVPGGGPLSPARTQEIQENLLSLEETMKQLEELEEEFCRLRPLLSQLGGNSVPQPGCT

SEQ ID NO: 989 - DNA, 2745 bp, Homo sapien
acctccctccgcggagcagccagacagcgagggccccggccgggggcaggggggacgccccgtccggggcaccccccccggctctgagccgcccgcggggccggcctcggcccggagcggaggaaggagtcgccgaggagcagcctgaggccccagagtctgagacgagccgccgccgcccccgccactgcggggaggagggggaggaggagcgggaggagggacgagctggtcgggagaagaggaaaaaaacttttgagacttttccgttgccgctgggagccggaggcgcggggacctcttggcgcgacgctgccccgcgaggaggcaggacttggggaccccagaccgcctccctttgccgccggggacgcttgctccctccctgccccctacacggcgtccctcaggcgcccccattccggaccagccctcgggagtcgccgacccggcctcccgcaaagacttttccccagacctcgggcgcaccccctgcacgccgccttcatccccggcctgtctcctgagcccccgcgcatcctagaccctttctcctccaggagacggatctctctccgacctgccacagatcccctattcaagaccacccaccttctggtaccagatcgcgcccatctaggttatttccgtgggatactgagacacccccggtccaagcctcccctccaccactgcgcccttctccctgaggagcctcagctttccctcgaggccctcctaccttttgccgggagacccccagcccctgcaggggcggggcctccccaccacaccagccctgttcgcgctctcggcagtgccggggggcgccgcctcccccatgccgccctccgggctgcggctgctgccgctgctgctaccgctgctgtggctactggtgctgacgcctggcccgccggccgcgggactatccacctgcaagactatcgacatggagctggtgaagcggaagcgcatcgaggccatccgcggccagatcctgtccaagctgcggctcgccagccccccgagccagggggaggtgccgcccggcccgctgcccgaggccgtgctcgccctgtacaacagcacccgcgaccgggtggccggggagagtgcagaaccggagcccgagcctgaggccgactactacgccaaggaggtcacccgcgtgctaatggtggaaacccacaacgaaatctatgacaagttcaagcagagtacacacagcatatatatgttcttcaacacatcagagctccgagaagcggtacctgaacccgtgttgctctcccgggcagagctgcgtctgctgaggaggctcaagttaaaagtggagcagcacgtggagctgtaccagaaatacagcaacaattcctggcgatacctcagcaaccggctgctggcacccagcgactcgccagagtggttatcttttgatgtcaccggagttgtgcggcagtggttgagccgtggaggggaaattgagggctttcgccttagcgcccactgctcctgtgacagcagggataacacactgcaagtggacatcaacgggttcactaccggccgccgaggtgacctggccaccattcatggcatgaaccggcctttcctgcttctcatggccaccccgctggagagggcccagcatctgcaaagctcccggcaccgccgagccctggacaccaactattgcttcagctccacggagaagaactgctgcgtgcggcagctgtacattgacttccgcaaggacctcggctggaagtggatccacgagcccaagggctaccatgccaacttctgcctcgggccctgcccctacatttggagcctggacacgcagtacagcaaggtcctggccctgtacaaccagcataacccgggcgcctcggcggcgccgtgctgcgtgccgcaggcgctggagccgctgcccatcgtgtactacgtgggccgcaagcccaaggtggagcagctgtccaacatgatcgtgcgctcctgcaagtgcagctgaggtcccgccccgccccgccccgccccggcaggcccggccccaccccgccccgcccccgctgccttgcccatgggggctgtatttaaggacaccgtgccccaagcccacctggggccccattaaagatggagagaggactgcggatctctgtgtcattgggcgcctgcctggggtctccatccctgacgttcccccactcccactccctctctctccctctctgcctcctcctgcctgtctgcactattcctttgcccggcatcaaggcacaggggaccagtggggaacactactgtagttagatctatttattgagcaccttgggcactgttgaagtgccttacattaatgaactcattcagtcaccatagcaacactctgagatggcagggactctgataacacccattttaaaggttgaggaaacaagcccagagaggttaagggaggagttcctgcccaccaggaacctgctttagtgggggatagtgaagaagacaataaaagatagtagttcaggccaggcggggtgctcacgcctgtaatcctagcacttttgggaggcagagatgggaggatacttgaatccaggcatttgagaccagcctgggtaacatagtgagaccctatctctacaaaacacttttaaaaaatgtacacctgtggtcccagctactctggaggctaaggtgggaggatcacttgatcctgggaggtcaaggctgcag

SEQ ID NO: 990 - protein, 391 aa, Homo sapien
MPPSGLRLLPLLLPLLWLLVLTPGPPAAGLSTCKTIDMELVKRKRIEAIRGQILSKLRLASPPSQGEVPPGPLPEAVLALYNSTRDRVAGESAEPEPEPEADYYAKEVTRVLMVETHNEIYDKFKQSTHSIYMFFNTSELREAVPEPVLLSRAELRLLRRLKLKVEQHVELYQKYSNNSWRYLSNRLLAPSDSPEWLSFDVTGVVRQWLSRGGEIEGFRLSAHCSCDSRDNTLQVDINGFTTGRRGDLATIHGMNRPFLLLMATPLERAQHLQSSRHRRALDTNYCFSSTEKNCCVRQLYIDFRKDLGWKWIHEPKGYHANFCLGPCPYIWSLDTQYSKVLALYNQHNPGASAAPCCVPQALEPLPIVYYVGRKPKVEQLSNMIVRSCKCS

SEQ ID NO: 991 - DNA, 2326 bp, Homo sapien
cgtggatcccgagaaagaggcgcaggacgaggaggcagaacccgactggcgcgtagagcagcagcacgagcagtaggaagcagtcacccggaagcctgggggcgagaggcgaagtggtcaggcgccgaaggccgagagcacgcggggatcggtctcttcccgccgggtctcttaccggtgcgagtcaaagagccgctccggccccggccctgagggaagctccataactgctgcttcaggagcgcccggccgtcgccgccgccgccattttcgcgcccggccgcaggggctcttgggaaggcggagtctttgggcatccgcccggggtgaggggacccgaagtcctgaggcgcgccggaagggctagcggtcccagcataccccgcggccccttgggccgtctcacaactcgcgtccggcggagaccacaattcccggcattcgtggggcagggaggagtcggcctcccggaatcctggtcccggcgtgcacttctgaaggacttcaggtaccggcgtgccccgcgtcctactgtccgcctgctcgcgtcctgggtgccgcctctgagtagggcgggcgaggaggcagccaaggcggagctgatggctgcgccgagggcggggcggggtgcaggctggagccttcgggcatggcgggctttggggggcattcgctgggggaggagaccccgtttgacccctgacctccgggccctgctgacgtcaggaacttctgacccccgggcccgagtgacttatgggacccccagtctctgggcccggttgtctgttggggtcactgaaccccgagcatgcctgacgtctgggaccccgggtccccgggcacaactgactgcggtgaccccagataccaggacccgggaggcctcagagaactctggaacccgttcgcgcgcgtggctggcggtggcgctgggcgctgggggggcagtgctgttgttgttgtggggcgggggtcggggtcctccggccgtcctcgccgccgtccctagcccgccgcccgcttctccccggagtcagtacaacttcatcgcagatgtggtggagaagacagcacctgccgtggtctatatcgagatcctggaccggcaccctttcttgggccgcgaggtccctatctcgaacggctcaggattcgtggtggctgccgatgggctcattgtcaccaacgcccatgtggtggctgatcggcgcagagtccgtgtgagactgctaagcggcgacacgtatgaggccgtggtcacagctgtggatcccgtggcagacatcgcaacgctgaggattcagactaaggagcctctccccacgctgcctctgggacgctcagctgatgtccggcaaggggagtttgttgttgccatgggaagtccctttgcactgcagaacacgatcacatccggcattgttagctctgctcagcgtccagccagagacctgggactcccccaaaccaatgtggaatacattcaaactgatgcagctattgattttggaaactctggaggtcccctggttaacctggatggggaggtgattggagtgaacaccatgaaggtcacagctggaatctcctttgccatcccttctgatcgtcttcgagagtttctgcatcgtggggaaaagaagaattcctcctccggaatcagtgggtcccagcggcgctacattggggtgatgatgctgaccctgagtcccagcatccttgctgaactacagcttcgagaaccaagctttcccgatgttcagcatggtgtactcatccataaagtcatcctgggctcccctgcacaccgggctggtctgcggcctggtgatgtgattttggccattggggagcagatggtacaaaatgctgaagatgtttatgaagctgttcgaacccaatcccagttggcagtgcagatccggcggggacgagaaacactgaccttatatgtgacccctgaggtcacagaatgaatagatcaccaagagtatgaggctcctgctctgatttcctccttgcctttctggctgaggttctgagggcaccgagacagagggttaaatgaaccagtgggggcaggtccctccaaccaccagcactgactcctgggctctgaagaatcacagaaacactttttatataaaataaaattatacctagcaacatattatagtaaaaaatgaggtgggagggctggatcttttcccccaccaaaaggctagaggtaaagctgtatccccctaaacttaggggagatactggagctgaccatcctgacctcctattaaagaaaatgagctgctgaaaaaaaaaaaaaaaa

SEQ ID NO: 992 - protein, 458 aa, Homo sapien
MAAPRAGRGAGWSLRAWRALGGIRWGRRPRLTPDLRALLTSGTSDPRARVTYGTPSLWARLSVGVTEPRACLTSGTPGPRAQLTAVTPDTRTREASENSGTRSRAWLAVALGAGGAVLLLLWGGGRGPPAVLAAVPSPPPASPRSQYNFIADVVEKTAPAVVYIEILDRHPFLGREVPISNGSGFVVAADGLIVTNAHVVADRRRVRVRLLSGDTYEAVVTAVDPVADIATLRIQTKEPLPTLPLGRSADVRQGEFVVAMGSPFALQNTITSGIVSSAQRPARDLGLPQTNVEYIQTDAAIDFGNSGGPLVNLDGEVIGVNTMKVTAGISFAIPSDRLREFLHRGEKKNSSSGISGSQRRYIGVMMLTLSPSILAELQLREPSFPDVQHGVLIHKVILGSPAHRAGLRPGDVILAIGEQMVQNAEDVYEAVRTQSQLAVQIRRGRETLTLYVTPEVTE

SEQ ID NO: 993 - DNA, 1233 bp, Homo sapien
gtgatggcggcgccggaggcggaggttctgtcctcagccgcagtccctgatttggagtggtatgagaagtccgaagaaactcacgcctcccagatagaactacttgagacaagctctacgcaggaacctctcaacgcttcggaggccttttgcccaagagactgcatggtaccagtggtgtttcctgggcctgtgagccaggaaggctgctgtcagtttacttgtgaacttctaaagcatatcatgtatcaacgccagcagctccctctgccctatgaacagcttaagcacttttaccgaaaaccttctccccaggcagaggagatgctgaagaagaaacctcgggccaccactgaggtgagcagcaggaaatgccaacaagccctggcagaactggagagtgtcctcagccacctggaggacttctttgcacggacactagtaccgcgagtgctgattctccttgggggcaatgccctaagccccaaggagttctatgaactcgacttgtctctgctggccccctacagcgtggaccagagcctgagcacagcagcttgtttgcgccgtctcttccgagccatattcatggctgatgcctttagcgagcttcaggctcctccactcatgggcaccgtcgtcatggcacagggacaccgcaactgtggagaagattggtttcgacccaagctcaactatcgagtgcccagccggggccataaactgactgtgaccctgtcatgtggcagaccttccatccgaaccacggcttgggaagactacatttggttccaggcaccagtgacatttaaaggcttccgcgagtgaatgagtgcttcttaatcctaaaaacacaatggctgaattatctttctccatgtggcgctgaatcacccatctggtttggagctagagttgcttcctggtgagagaggaagcaactctccttctggttgtctgcctcccctcagatttcctgataggctgatggcatgtggctgtgactgtgactgtaatcattgctgaacaacatctctttgaatcaaaggttgattttcccagagggtgctgggtcaggcatttctattaggagttggaaagcaaaaatgggtccatagacactctatggaggtgtccctttctgctctttgctgtgtcctttcagaatttttaccaggaacataatgtggatgtgacttatgaacttaaatataaaataaatagattcttatt

SEQ ID NO: 994 - protein, 274 aa, Homo sapien
MAAPEAEVLSSAAVPDLEWYEKSEETHASQIELLETSSTQEPLNASEAFCPRDCMVPVVFPGPVSQEGCCQFTCELLKHIMYQRQQLPLPYEQLKHFYRKPSPQAEEMLKKKPRATTEVSSRKCQQALAELESVLSHLEDFFARTLVPRVLILLGGNALSPKEFYELDLSLLAPYSVDQSLSTAACLRRLFRAIFMADAFSELQAPPLMGTVVMAQGHRNCGEDWFRPKLNYRVPSRGHKLTVTLSCGRPSIRTTAWEDYIWFQAPVTFKGFRE

SEQ ID NO: 995 - DNA, 2677 bp, Homo sapien
gggcgcggtgtgccgcggggcagttgcgggttgtcataacggtccccgccggagtgaggcgaggccgcgtcgctcagttctggccgtctagggcccctgtaaggatgagagcgcagaggacgcagggccgctggaggcgcaggtaacgaagctagggtgcggttgggaccgcggctgagctttttccgggacccgtggtgctgaatggagaggacggagacgaagccgagccgcggctcctagcggcggcgccgatgctcgagctgtagctgccaggcgaggatgtgtggagcgcaggcggcgcggggtaaatgagaggtctcgggccccaggacccccggggcccgggatgagttagcgagggcagccgcgggggccagttccgaccgtgacaggccaaggcgacggccgccgcccgcccgccccttccgtgcagaagcagctgctcctttccgcgcccgcccgcctgcgctcccggccctggagaccatgaggttccgcatctacaaacggaaggtgctaatcctgacgctcgtggtggccgcctgcggcttcgtcctctggagcagcaatgggcgacaaaggaagaacgaggccctcgccccaccgttgctggacgccgaacccgcgcggggtgccggcggccgcggtggggaccacccctctgtggctgtgggcatccgcagggtctccaacgtgtcggcggcttccctggtcccggcggtcccccagcccgaggcggacaacctgacgctgcggtaccggtccctggtgtaccagctgaactttgatcagaccctgaggaatgtagataaggctggcacctgggccccccgggagctggtgctggtggtccaggtgcataaccggcccgaatacctcagactgctgctggactcacttcgaaaagcccagggaattgacaacgtcctcgtcatctttagccatgacttctggtcgaccgagatcaatcagctgatcgccggggtgaatttctgtccggttctgcaggtgttctttcctttcagcattcagttgtaccctaacgagtttccaggtagtgaccctagagattgtcccagagacctgccgaagaatgccgctttgaaattggggtgcatcaatgctgagtatcccgactccttcggccattatagagaggccaaattctcccagaccaaacatcactggtggtggaagctgcattttgtgtgggaaagagtgaaaattcttcgagattatgctggccttatacttttcctagaagaggatcactacttagccccagacttttaccatgtcttcaaaaagatgtggaaactgaagcagcaagagtgccctgaatgtgatgttctctccctggggacctatagtgccagtcgcagtttctatggcatggctgacaaggtagatgtgaaaacttggaaatccacagagcacaatatgggtctagccttgacccggaatgcctatcagaagctgatcgagtgcacagacactttctgtacttatgatgattataactgggactggactcttcaatacttgactgtatcttgtcttccaaaattctggaaagtgctggttcctcaaattcctaggatctttcatgctggagactgtggtatgcatcacaagaaaacctgtagaccatccactcagagtgcccaaattgagtcactcttaaataataacaaacaatacatgtttccagaaactctaactatcagtgaaaagtttactgtggtagccatttccccacctagaaaaaatggagggtggggagatattagggaccatgaactctgtaaaagttatagaagactgcagtgaaaatcacagttacaaaagcgacagtcttctatttttgatatttgtccaaacaggacatacaattgaataaaagagtttaggaactggtttctgctttaatacaaaaacaaaatcttgtaaaaggtgtccaaatacatagtaatcttttccagttatgtctgattaagatttaaaactgaaggtttcattttgggagtagggttttaaagctcaatctgttatctgctaaaattgattattgttgatatgagagaagaggggaaattttatttaaattgcatttattaatctttttatctgaaactttgtacacttttccactttcaaaacctattttaagtacagcaaaatttatttaaaactgtgatagcagtaaaaagtattacgatgaaattgttagggtattaatggaacaaacccagtttcactctcttgacacacttattaggaagggattgcttcactggtttaataatttaaaagttatgtttgttaaacaccctgtcagaacagtcattttcagtattagattcctgtactattgtgttttgagtgtgttttggaaccttcatagaacacactttcttttggaatgtatttgattgataagaaagtttaaacattgttttcacctcaatgtagaaatacagtggttttgtttttttttttcttttagtgctgacaaaataaaatactcatttttgcataaaaaggttcctaatccttttgcagaataagttttgtttactctttataccaaaattcagtgaaggcattctacaagttttgagttagcattacattttaatatttactattgctacattgtataattgagtttgaa

SEQ ID NO: 996 - protein, 447 aa, Homo sapien
MRFRIYKRKVLILTLVVAACGFVLWSSNGRQRKNEALAPPLLDAEPARGAGGRGGDHPSVAVGIRRVSNVSAASLVPAVPQPEADNLTLRYRSLVYQLNFDQTLRNVDKAGTWAPRELVLVVQVHNRPEYLRLLLDSLRKAQGIDNVLVIFSHDFWSTEINQLIAGVNFCPVLQVFFPFSIQLYPNEFPGSDPRDCPRDLPKNAALKLGCINAEYPDSFGHYREAKFSQTKHHWWWKLHFVWERVKILRDYAGLILFLEEDHYLAPDFYHVFKKMWKLKQQECPECDVLSLGTYSASRSFYGMADKVDVKTWKSTEHNMGLALTRNAYQKLIECTDTFCTYDDYNWDWTLQYLTVSCLPKFWKVLVPQIPRIFHAGDCGMHHKKTCRPSTQSAQIESLLNNNKQYMFPETLTISEKFTVVAISPPRKNGGWGDIRDHELCKSYRRLQ

SEQ ID NO: 997 - DNA, 2255 bp, Homo sapien
ccctttcatcagtcttcccgcgtccgccgattcctcctccttggtcgccgcgtccttggctggcgttagagacggggtttcaacgtgttggccaggatggtctcagtctccagaccctgtgatccgcccgcctcggcctcccaaagtgttgggattacaggtgtgagccaccgtcctggccgaggctccttcttttatgaggagcgggaaggcctcctgcaccctggagaccgtgtgggaagacaagcacaagtatgaggaggccgagcggcgcttctacgaacacgaggccacacaggcggccgcctccgcccagcagctgccagccgaggggccagccatgaatgggcccggccaggacgaccctgaggacgctgatgaggcggaagcccctgacggcggcagcaggcgtgatcccaggaagagccaggacagcaggaagcccctgcagaaaaagaggaagcgctcccccaagagcgggctcggccccgcggacctggccctcctgggcctctcggccgaacgtgtgtggctggacaagtcacttttcgaccaggcagagagctcctaccgccagaagctggcagatgtggctgcccaggcagcctggcctcctgccttggccccttggggtctctgcacccatggaaaccaggtggcctgccaccacgtgacctgggggatctgggtcaacaagtcctccttcgaccaggctgagcgggccttcgtggagtggtctcaggccctgttgctggcccccgagggcagccgcaggcaggggactcccaacacaggccagcaggtggccgtccccgacctggcccaccagcccagcccaccggtcaatggccagcccccgctgggcagcctgcaggcactggttcgggaggtgtggctggagaagccccggtatgatgcagccgagaggggcttctacgaggccctgtttgacggccatcccccagggaaggtgcgcctgcaagagcgagccggcctggccgagggtgcccggcggggccgcagagaccggcggggccgcaacatcttagggaacaagcgggccgggctgcgacgggccgatggggaggccccctctgccttgccctactgttacttcctgcagaaggatgcagaggccccctggctcagcaagcctgcctacgacagcgccgagtgccgccaccacgctgccgaggccctgcgtgtggcctggtgcctcgaagctgcctccctgtctcaccgacccggtcctcggtctggcctgtccgtgtccagcctgagacccaacagaaaaatggctacaaacttcctagcacatgagaagatctggttcgacaagttcaaatatgacgacgcagaaaggagattctacgagcagatgaacgggcctgtggcaggtgcctcccgccaggagaacggcgccagcgtgatcctccgtgacattgcgagagccagagagaacatccagaaatccctggctggaagctcaggccccggggcctccagcggcaccagcggagaccacggtgagctcgtcgtccggattgccagtctggaagtggagaaccagagtctgcgtggcgtggtacaggagctgcagcaggccatctccaagctggaggcccggctgaacgtgctggagaagagctcgcctggccaccgggccacggccccacagacccagcacgtatctcccatgcgccaagtggagcccccagccaagaagccagccacaccagcagaggatgacgaggatgatgacattgacctgtttggcagtgacaatgaggaggaggacaaggaggcggcacagctgcgggaggagcggctacggcagtacgcggagaagaaggccaagaagcctgcactggtggccaagtcctccatcctgctggatgtcaagccttgggatgatgagacggacatggcccagctggaggcctgtgtgcgctctatccagctggacgggctggtctggggggcttccaagctggtgcccgtgggctacggtatccggaagctacagattcagtgtctggtggaggacgccaaggtggggacaaacttggtggaggaggagatccccaagtttgaggagcgcgtgcaaagtgtcgatatcccagctttcaacaaaatttgaagcctgagtgtgtgtacgagggggcgtgcgtgaggccctcccccgattaaataattggcccggcaaaaaaaaaaaaaaaaaaaaaaaaaaaaaaaaaaaaaaaaaaaaaaaaaaa

SEQ ID NO: 998 - protein, 647 aa, Homo sapien [sequence omitted]

SEQ ID NO: 999 - DNA, 3497 bp, Homo sapien
cactgctcctccggctcccgggaagccgcgagtttccgcagggaggcggcggcagctgcggcggggccggtctgtagcctttgctgagtcaacactactcacagtgaaagtgatgccttttctccatttgcacaacatgagtgtgacgtggttagccagaccaggagctcaacctcatgtagaatccagtccactgctctgatgccgaaggggaggcagaaagtgccacacttggatgcccccctgggcctgcccacctgcctctggctggaattagccgggctcttcttactggttccctgggtcatgggcctggcagggacaggtgggcctgatggccagggcacaggggggccgagctgggctgtgcacctggaaagcctggaaggtgacggggaggaagagactctggagcagcaggcggatgccttggcccaggcagcagggctggtgaatgctggacgcatcggagagcttcaggggcactacctctttgtccagcctgctgggcacaggccggccctggaggtggaggccatccggcagcaggtggaggctgtgttggctgggcatgaagctgtgcgctggcactcagagcagaggctgctaaggcgggccaagcgcagcgtccacttcaacgaccccaagtacccgcagcaatggcacctgaataaccgacggagcccgggcagggacatcaacgtgacgggtgtgtgggaacgcaatgtgactgggcgaggggtgacggtggtggtagtggatgacggagtggaacacaccatccaggacattgcacccaactatagccctgagggtagctatgacctcaactctaatgaccctgaccccatgccccacccggatgtggagaatggcaaccaccatggcacgcgatgtgcaggagagatcgcggctgtgcccaacaacagcttctgtgccgtgggcgtggcctacgggagccgcatcgcaggtatccgggtactggatggacctctcacagacagcatggaggcagtggcgttcaacaagcactatcagatcaatgacatctacagctgcagctggggaccagatgacgatgggaagacagtggatggcccccatcagcttggaaaggctgccttacaacatggggtgattgctggtcgccagggctttgggagcatctttgtggtagccagtggcaacggaggccaacacaacgacaactgcaactacgatggctacgccaactccatctacaccgtcaccataggagctgtggatgaggagggacgcatgcctttctatgcagaagaatgtgcctccatgctggcagtcaccttcagtggtggggacaagatgcttcggagcattgtgaccactgactgggaccttcagaagggcactggctgcactgagggccacacagggacctcagctgcagcgcctctggcagctggcatgatagccttaatgctgcaggtgcggccctgcctcacgtggcgtgacgtccagcacatcattgtcttcacagccacccggtatgaggatcgccgtgcagagtgggtcaccaacgaggcaggcttcagccatagccaccagcacggtttcggcctcctcaacgcctggaggctcgtgaatgcagccaagatctggacatctgtcccttacttagcatcctacgtcagtcccgtgttaaaagaaaacaaggcgattccgcagtccccccgttccctggaggtcctgtggaatgtcagcaggatggacctggagatgtcagggctgaagaccctggagcatgtggcagtgacagtctccatcactcacccacggcgcggcagcttggagctgaagctgttctgccccagtggcatgatgtccctcatcggcgccccccgcagcatggactcggatcccaacggcttcaatgactggaccttctccactgtgcgatgctggggggagagagcccgagggacctacaggcttgtcatcagggatgtcggggatgagtcattccaggtcggcatcctccggcaatggcagctgaccctatatggctctgtgtggagtgcagtagacatcagggacagacaaaggctgttagagagtgccatgagtggaaaatacctgcacgatgacttcgccctgccctgcccaccggggctgaaaattcctgaggaagatggttacaccatcacccccaacaccctcaagaccctggtgctggtaggctgtttcaccgtcttctggactgtttactacatgctggaagtatatttgagccagaggaatgtggcttccaatcaagtttgtaggagtggaccctgccactggccccatcggagccggaaagccaaggaggaagggacagagctagaatcagtgccactttgcagcagcaaggatccagacgaagtggaaacagagagcaggggccctcccaccacctctgacctccttgccccagacctgctggagcaaggggactggagcctgtcccagaacaagagcgccctggactgccctcatcagcacctagacgtaccgcacgggaaggaggagcagatctgctgacctcagggcctgacagtgtgggacaggctcttctttcccaaaattagggagctcttgacagaaagcagttctgatgcttacatctggaatctgaggcatcctctgactccactcaaagagggtgagggccttcttaagatacaaatggtggaggattgctgccagagaagtctggtcagagccacagggtctgcctccagccaaacgggagcttttggtgagaaggtgttggacaggggattggcgcccccctttggtttggcctccatcctcatctctcttgggccaagccagctgcctaggtcccccaagcatgggggaccccttcccacatataagttgagaaggtgcctgccatagccaggagcgcatctcaatggaaacatcactggggtcacttgggaagaggacttcggggtagaggctgggaggagcccctggacatgcctgtcctgaaagcggctgcctccattatccattcccaagatgcctgatcagaaaccaaccatgaatgaacccctggctccttcaccacccccacgattggtatgatgctgccggcacagctgggatacacacggctcccccaggcctgagctgcttcactagggaatcctgcggcaggactgcagagcagatggcagatgcacatgttggaggagagagccttgggagccactgccactccagtcctgccaccaccctgtcttcctctgcaagtgctcagggaaatggccttcccgccggaggccagctatctgcctgacaggctgtgactcttctctcaaccttggccttctcccctcttctgagctagttggttgaattttttttaatgcttaagatttgtttttctcttttcacagcaacattttcttgaatttttttctgcacagcttttccaaaataaaaaccttccaaacaaaaaaaaaaaaaaa

SEQ ID NO: 1000 - protein, 785 aa, Homo sapien
MPKGRQKVPHLDAPLGLPTCLWLELAGLFLLVPWVMGLAGTGGPDGQGTGGPSWAVHLESLEGDGEEETLEQQADALAQAAGLVNAGRIGELQGHYLFVQPAGHRPALEVEAIRQQVEAVLAGHEAVRWHSEQRLLRRAKRSVHFNDPKYPQQWHLNNRRSPGRDINVTGVWERNVTGRGVTVVVVDDGVEHTIQDIAPNYSPEGSYDLNSNDPDPMPHPDVENGNHHGTRCAGEIAAVPNNSFCAVGVAYGSRIAGIRVLDGPLTDSMEAVAFNKHYQINDIYSCSWGPDDDGKTVDGPHQLGKAALQHGVIAGRQGFGSIFVVASGNGGQHNDNCNYDGYANSIYTVTIGAVDEEGRMPFYAEECASMLAVTFSGGDKMLRSIVTTDWDLQKGTGCTEGHTGTSAAAPLAAGMIALMLQVRPCLTWRDVQHIIVFTATRYEDRRAEWVTNEAGFSHSHQHGFGLLNAWRLVNAAKIWTSVPYLASYVSPVLKENKAIPQSPRSLEVLWNVSRMDLEMSGLKTLEHVAVTVSITHPRRGSLELKLFCPSGMMSLIGAPRSMDSDPNGFNDWTFSTVRCWGERARGTYRLVIRDVGDESFQVGILRQWQLTLYGSVWSAVDIRDRQRLLESAMSGKYLHDDFALPCPPGLKIPEEDGYTITPNTLKTLVLVGCFTVFWTVYYMLEVYLSQRNVASNQVCRSGPCHWPHRSRKAKEEGTELESVPLCSSKDPDEVETESRGPPTTSDLLAPDLLEQGDWSLSQNKSALDCPHQHLDVPHGKEEQIC

SEQ ID NO: 1001 - DNA, 6814 bp, Homo sapien
ccttggccgagaccggtcctctgcggagagggccccgccctctgtgaaggcccgcccgggaattggcggcggcgctgcagccatttccggtttcggggaggtgggtggggtgcggagcgggacttggagcagccgccgccgctgccaccgcctacagagcctgccttgcgcctggtgctgccaggaagatgcggccggagcccggaggctgctgctgccgccgcacggtgcgggcgaatggctgcgtggcgaacggggaagtacggaacgggtacgtgaggagcagcgctgcagccgcagccgcagccgccgccggccagatccatcatgttacacaaaatggaggactatataaaagaccgtttaatgaagcttttgaagaaacaccaatgctggttgctgtgctcacgtatgtggggtatggcgtactcaccctctttggatatcttcgagatttcttgaggtattggagaattgaaaagtgtcaccatgcaacagaaagagaagaacaaaaggactttgtgtcattgtatcaagattttgaaaacttttatacaaggaatctgtacatgaggataagagacaactggaatcggccaatctgtagtgtgcctggagccagggtggacatcatggagagacagtctcatgattataactggtccttcaagtatacagggaatataataaagggtgttataaacatgggttcctacaactatcttggatttgcacggaatactggatcatgtcaagaagcagccgccaaagtccttgaggagtatggagctggagtgtgcagtactcggcaggaaattggaaacctggacaagcatgaagaactagaggagcttgtagcaaggttcttaggagtagaagctgctatggcgtatggcatgggatttgcaacgaattcaatgaacattcctgctcttgttggcaaaggttgcctgattctgagtgatgaactgaaccatgcatcactggttctgggagccagactgtcaggagcaaccattagaatcttcaaacacaacaatatgcaaagcctagagaagctattgaaagatgccattgtttatggtcagcctcggacacgaaggccctggaagaaaattctcatccttgtggaaggaatatatagcatggagggatctattgttcgtcttcctgaagtgattgccctcaagaagaaatacaaggcatacttgtatctggatgaggctcacagcattggcgccctgggccccacaggccggggtgtggtggagtactttggcctggatcccgaggatgtggatgttatgatgggaacgttcacaaagagttttggtgcttctggaggatatattggaggcaagaaggagctgatagactacctgcgaacacattctcatagtgcagtgtatgccacgtcattgtcacctcctgtagtggagcagatcatcacctccatgaagtgcatcatggggcaggatggcaccagccttggtaaagagtgtgtacaacagttagctgaaaacaccaggtatttcaggagacgcctgaaagagatgggcttcatcatctatggaaatgaagactctccagtagtgcctttgatgctctacatgcctgccaaaattggcgcctttggacgggagatgctgaagcggaacatcggtgtcgttgtggttggatttcctgccaccccaattattgagtccagagccaggttttgcctgtcagcagctcataccaaagaaatacttgatactgctttaaaggagatagatgaagttggggacctattgcagctgaagtattcccgtcatcggttggtacctctactggacaggccctttgacgagacgacgtatgaagaaacagaagactgagcctttttggtgctccctcagaggaactctccctcacccaggacagcctgtggcctttgtgagccagttccaggaaccacacttctgtggccatctcacgtgaaagacattgcctcagctactgaaggtggccacctccactctaaatgacattttgtaaatagtaaaaaactgcttctaatccttcctttgctaaatctcacctttaaaaacgaaggtgactcactttgctttttcagtccattaaaaaaacattttattttgcaaccattctacttgtgaaatcacgctgaccctagcctgtctctggctaaccacacaggccattcccctctcccagcaccttgcagacttgggcccatcaagagctactgctggccctggctccgcagcctggatacttacctggccctcctccctagggagcaagtgccttccacttacttcccatccaggtctcagaggtctcaaggccaaccttggaatccttatttaaccattcaagtaatcaacggaagttttcaccctttaatcttaagtttagccttttaagaaaaacagtaagcgatgactgctgaaaggctcattgtgtaatctcccaagggtttggtcttattccattttcttctggtcaccagatgatttcttcctttaccatcaaatacttcttcataatggtcacagtctgaggatgtgcgcaaattctggttcttcccaagctctaaccgtaacacgtcccaccccctttttaaagcacttactgttttcagagcacccatatcccaccctggtgagaaggccactctcacatctgagtgttgggtacaaagctgctccgtagagtgatgtgcactcctggtgggtgaggggcaggggcagtggcagtgtgcaaagaattgattactccttgcagagcctgtggcttgcatttcctactgctttctacgtttgaaaattatgacagtctctggctaggtctgggtccagattaggatttaaactgataaaggaaactgttggtaaatcctctgctcagaaagcatttatcatgttcctatttaaggattaggtttattaatttaggcctcttagaagctaacccacttaaatattactcttctgaatgctagttctcttttattcttgatgtcctaagtcaattgaatctggcatctggggctagggtctgcctgtctacatattttttatttttttctgagaaattctgaacacatagatctctttcctaaactgacattttctattttgactgttttcatactataaccaggtaaagggacttctttcagagagctttatactgcctgaccaaagaacaaatctgaaaatcaccattttaaagttattttttcagttgaaccaaagtttaagtgaagaggacttttggcatattatacccaggatcagtttgtctttttgtatccatcaagtattacaggagaaggattgggaacagaatggaaaaacagtgtatgaaagtcatgttacaggccgagtgcggtggctcacacctgtaatcctagcactttgggaggctgaggcaggtggctcacttgaggtcaggaattcaagaccagcctggccaacatggtgaaaccccgtctctactaaaaagacaaaaaattagctgggcgtggtggcgggcacctataatcccacctacttggtaggctgaggcaggagaatcgcttgaacccaggaggcggaggttgcagtgagacgagattgtgccactgcactctagcctgggtgacagagcaaaactgtgtctcaaaaaaaaaaaagtcatgttacacatttaagtttttgaaattgctccttttatcggtaaagattctcaatccaaattctcctgggtgtgttgtcatcagctgtgatatgtttgtgcacattacgtatagcagaggatgtaagcaatattattgtttgtgaagttttgtttttaatgtcttgagtatgagttatgtttagtcactgtcagcatctgagaactttaataagcccttgagatattccaaagttttattttacttttttaaagaacagaaaaagatgaatgaaagaaccaaggagagatgcagagactatatttagcatgtataggttaaagtaagaaggaggttgtggtaactaaataggagtcctataaaatcaaatacattgtcaaccttttctgcacatctagtttcctaccatagaatcccactggaataccacatagcttttgcactgcagttactatttactaatgtaaacgtagggtttgtaaaagtcacaaacttataagcaatgaacttacctgctagtctttttattttggcttgcatgaagtcactgcaaattcaaatgtcagtaccggcatttaaaatatatctatatcactttgttggtacaaagttatttcaagataagtgtaattttgttacaagtttattttgaagagacaaatctcctgtgatctatgcaggacctctgtactttctaaagaacaaaatgttatgtagacattatacatggttggttgtctcttcttgaaactgtaatgtaaatctagggtccagtcatatcctaggtatcatcatttatccaagtacttggaggaatacaagtatatataaatacagtcattgagaataagtcgatttgaggcatacaagagtagtttcttacacagtttaacacagcctgattcaagactctgataggattcaaacagataccggttaaccatgactaccaaaactgatcatctgagtcgattgatagaggtgtgactagtccttagcactttttctcattcctctttttattcagcattgctgttacctatttcaggtttataagacctctttcagcagatcacatcagaagccaggaaatgcatagctaggagatgtcaaaagcccatatgaggagtggaccaagcagcagtggcggtttctcctcgcatctttttttttttaagctttaacttagcaggggcatggactttatagcactttttcaactttttgctttgctttggataagaaatccttacctttaaaaaaagcttctagtctccataacccccaaagtactgcttatttgtttgaagaatccagccatcgtagtgctttagtcactatcgtaaacattcatgatagggcaaggattttaaaacaggattcttgcttctgtagtcatcaaggtgaacagaagcatcctacacaaccactaagggctctatgtttgtgtcatgcctcttcaaacaccaaggagttgaacatgcttccagtgatttgtctccgtaatgccttcttcctttatttggcctttctttctttctgtaccttcaagttcttgatttttaaaattccaactctagagaaaaccaatatatggtggtgctgggctttgaagatagcatatcagacgccttggttctgtttgtacacttagccttacatttcaggaggaggcttttcattaggggcttaagctagctcctttggcttttaaaaaaaattttttttcaaatttcttcattacctaagggagcctgcatctaaatttctcaactagttcagcctagctgaattttctagtgtgtaatacactttgcttccttcttattggtgaaaaccagggggatgagtggcttccatggagagatttcctgatttctcagggaggaaaaaagtgatgacatttaccactacttttatgtttttcccctttttccaaattgataaggatttctggttcctagtgatccgggattgggcaacagtgcagaactgccagtcatgccgtaggccgtgaagaaagaatgtgagtaactgttgttttgcaaggatttgtagggttatgggcagttgttgtttgaagcattgctatgacctaattcccaaggtatctttcctctcttggtgttctaggtaagccaatgagctttaatctctacttgctataaccgtgtgcttagaaaaagaggtgagagtagtggttttccttcaaactgtccacattcatgaagattatgaattgttaggacagccagggcaagatagaccctgtctctacaaaaatttttttctaaattaaccgggcatggtggtgcctgcctgtagtcccacctgtgtgggagaatcacttgagcctgggaggtcaaggctgcagtgagccatgattgcacccctgcactccagcctgggtgacagagtgagaccctggctcaataagagggggaaaaaaaattgttaggagctgggtgcggatgcagcctgcaatcccagctacttgagaggctgaggccggaggattgcttaaacccaagaatttgagcgtagcctgggcaacacagcaagaccccatctaagaaaaaaatgttttttaaatcagcttagcccaaaggggttgtgaatggggaggtataaaaagcaaagattattttttggctactaagccaagaacttacagggattttttttttcagtcccagaacctacagataccctgctacttgcttcacgtggatgctcagtgcccagcagccatcttaatacattaaaccagtttaaaaaataccttccatgtggagaaaaacatgtctttttctcgcctcaactttatccacatgaaatgtgtgcccatggctgggcgcagtggctcacctgtaatcccaacactttgggaggctgaagcaggcagattgcttgaggccaggagttcgagaacagtctggccaacatggcgaaacctcatctctactaaaattacaaaaattagccgggcatggtggcacatgcctgtaatcccagctacgtcaggaggctgaggcacaggaattgcttgaacccaagaggcagaggatgcaatgagccaagatcacaccactgcactccagccttggcgacagagggagactctgtctc

SEQ ID NO: 1002 - protein, 562 aa, Homo sapien
MRPEPGGCCCRRTVRANGCVANGEVRNGYVRSSAAAAAAAAAGQIHHVTQNGGLYKRPFNEAFEETPMLVAVLTYVGYGVLTLFGYLRDFLRYWRIEKCHHATEREEQKDFVSLYQDFENFYTRNLYMRIRDNWNRPICSVPGARVDIMERQSHDYNWSFKYTGNIIKGVINMGSYNYLGFARNTGSCQEAAAKVLEEYGAGVCSTRQEIGNLDKHEELEELVARFLGVEAAMAYGMGFATNSMNIPALVGKGCLILSDELNHASLVLGARLSGATIRIFKHNNMQSLEKLLKDAIVYGQPRTRRPWKKILILVEGIYSMEGSIVRLPEVIALKKKYKAYLYLDEAHSIGALGPTGRGVVEYFGLDPEDVDVMMGTFTKSFGASGGYIGGKKELIDYLRTHSHSAVYATSLSPPVVEQIITSMKCIMGQDGTSLGKECVQQLAENTRYFRRRLKEMGFIIYGNEDSPVVPLMLYMPAKIGAFGREMLKRNIGVVVVGFPATPIIESRARFCLSAAHTKEILDTALKEIDEVGDLLQLKYSRHRLVPLLDRPFDETTYEETED

SEQ ID NO: 1003 - DNA, 583 bp, Homo sapien
gccagctgccggtctttcgggggctccgtaactttctatccgtccgcgtcagcgccttgccaccctcatctccaatatgcctggtccgacccccagtggcactaacgtgggatcctcagggcgctctcccagcaaagcagtggccgcccgggcggcgggatccactgtccggcagaggaaaaatgccagctgtgggacaaggagtgcaggccgcacaacctcggcaggcaccggggggatgtggcgattctacacagaagattcacctgggctcaaagttggccctgttccagtattggttatgagtcttctgttcatcgcttctgtatttatgttgcacatttggggcaagtacactcgttcgtagattcagttacatccatctgtcatctgaagaaggaggaaaaaacccaacatttcttggaccaaaagtatagtgactatctgttcatgagagaaattttctgtaagcttgctgttttacaggggatttatcaataattgattttgaggaatcagtttttttctatggctaataaactttttaattcacttatactgaaaaaaaaaaaaaaaaaaaaaa

SEQ ID NO: 1004 - protein, 96 aa, Homo sapien
MPGPTPSGTNVGSSGRSPSKAVAARAAGSTVRQRKNASCGTRSAGRTTSAGTGGMWRFYTEDSPGLKVGPVPVLVMSLLFIASVFMLHIWGKYTRS

SEQ ID NO: 1005 - DNA, 1568 bp, Homo sapien
cgtccttcctcagccgcgggtgatcgtagctcggaaatggcgggatttggtgctatggagaaatttttggtagaatataagagtgcagtggagaagaaactggcagagtacaaatgtaacaccaacacagcaattgaactaaaattagttcgttttcctgaagatcttgaaaatgacattagaactttctttcctgagtatacccatcaactctttggggatgatgaaactgcttttggttacaagggtctaaagatcctgttatactatattgctggtagcctgtcaacaatgttccgtgttgaatatgcatctaaagttgatgagaactttgactgtgtagaggcagatgatgttgagggcaaaattagacaaatcattccacctggattttgcacaaacacgaatgatttcctttctttactggaaaaggaagttgatttcaagccattcggaaccttacttcatacctactcagttctcagtccaacaggaggagaaaactttacctttcagatatataaggctgacatgacatgtagaggctttcgagaatatcatgaaaggcttcagacctttttgatgtggtttattgaaactgctagctttattgacgtggatgatgaaagatggcactactttctagtatttgagaagtataataaggatggagctacgctctttgcgaccgtaggctacatgacagtctataattactatgtgtacccagacaaaacccggccacgtgtaagtcagatgctgattttgactccatttcaaggtcaaggccatggtgctcaacttcttgaaacagttcatagatactacactgaatttcctacagttcttgatattacagcggaagatccatccaaaagctatgtgaaattacgagactttgtgcttgtgaagctttgtcaagatttgccctgtttttcccgggaaaaattaatgcaaggattcaatgaagatatggcgatagaggcacaacagaagttcaaaataaataagcaacacgctagaagggtttatgaaattcttcgactactggtaactgacatgagtgatgccgaacaatacagaagctacagactggatattaaaagaagactaattagcccatataagaaaaagcagagagatcttgctaagatgagaaaatgtctcagaccagaagaactgacaaaccagatgaaccaaatagaaataagcatgcaacatgaacagctggaagagagttttcaggaactagtggaagattaccggcgtgttattgaacgacttgctcaagagtaaagattatactgctctgtacaggaagcttgcaaattttctgtacaatgtgctgtgaaaaatctgatgactttaattttaaaatcttgtgacattttgcttatactaaaagttatctatctttagttgaatattttcttttggagagattgtatattttaaaatactgtttagagtttatgagcatatattgcatttaaagaaagataaagcttctgaaatactactgcaattgcttcccttcttaaacagtataataaatgcttagttgtgat

SEQ ID NO: 1006 - protein, 419 aa, Homo sapien
MAGFGAMEKFLVEYKSAVEKKLAEYKCNTNTAIELKLVRFPEDLENDIRTFFPEYTHQLFGDDETAFGYKGLKILLYYIAGSLSTMFRVEYASKVDENFDCVEADDVEGKIRQIIPPGFCTNTNDFLSLLEKEVDFKPFGTLLHTYSVLSPTGGENFTFQIYKADMTCRGFREYHERLQTFLMWFIETASFIDVDDERWHYFLVFEKYNKDGATLFATVGYMTVYNYYVYPDKTRPRVSQMLILTPFQGQGHGAQLLETVHRYYTEFPTVLDITAEDPSKSYVKLRDFVLVKLCQDLPCFSREKLMQGFNEDMAIEAQQKFKINKQHARRVYEILRLLVTDMSDAEQYRSYRLDIKRRLISPYKKKQRDLAKMRKCLRPEELTNQMNQIEISMQHEQLEESFQELVEDYRRVIERLAQE

SEQ ID NO: 1007 - DNA, 3537 bp, Mus musculus
ggcccctcgagcctcgaaccggaacctccaaatccgagacgctctgcttatgaggacctcgaaatatgccggccagtgaaaaaatcttgtggctttgagggcttttggttggccaggggcagtaaaaatctcggagagctgacaccaagtcctcccctgccacgtagcagtggtaaagtccgaagctcaaattccgagaattgagctctgttgattcttagaactggggttcttagaagtggtgatgcaagaagtttctaggaaaggccggacaccaggttttgagcaaaattttggactgtgaagcaaggcattggtgaagacaaaatggcctcgccggctgacagctgtatccagttcacccgccatgccagtgatgttcttctcaaccttaatcgtctccggagtcgagacatcttgactgatgttgtcattgttgtgagccgtgagcagtttagagcccataaaacggtcctcatggcctgcagtggcctgttctatagcatctttacagaccagttgaaatgcaaccttagtgtgatcaatctagatcctgagatcaaccctgagggattctgcatcctcctggacttcatgtacacatctcggctcaatttgcgggagggcaacatcatggctgtgatggccacggctatgtacctgcagatggagcatgttgtggacacttgccggaagtttattaaggccagtgaagcagagatggtttctgccatcaagcctcctcgtgaagagttcctcaacagccggatgctgatgccccaagacatcatggcctatcggggtcgtgaggtggtggagaacaacctgccactgaggagcgcccctgggtgtgagagcagagcctttgcccccagcctgtacagtggcctgtccacaccgccagcctcttattccatgtacagccacctccctgtcagcagcctcctcttctccgatgaggagtttcgggatgtccggatgcctgtggccaaccccttccccaaggagcgggcactcccatgtgatagtgccaggccagtccctggtgagtacagccggccgactttggaggtgtcccccaatgtgtgccacagcaatatctattcacccaaggaaacaatcccagaagaggcacgaagtgatatgcactacagtgtggctgagggcctcaaacctgctgccccctcagcccgaaatgccccctacttcccttgtgacaaggccagcaaagaagaagagagaccctcctcggaagatgagattgccctgcatttcgagccccccaatgcacccctgaaccggaagggtctggttagtccacagagcccccagaaatctgactgccagcccaactcgcccacagagtcctgcagcagtaagaatgcctgcatcctccaggcttctggctcccctccagccaagagccccactgaccccaaagcctgcaactggaagaaatacaagttcatcgtgctcaacagcctcaaccagaatgccaaaccagaggggcctgagcaggctgagctgggccgcctttccccacgagcctacacggccccacctgcctgccagccacccatggagcctgagaaccttgacctccagtccccaaccaagctgagtgccagcggggaggactccaccatcccacaagccagccggctcaataacatcgttaacaggtccatgacgggctctccccgcagcagcagcgagagccactcaccactctacatgcaccccccgaagtgcacgtcctgcggctctcagtccccacagcatgcagagatgtgcctccacaccgctggccccacgttccctgaggagatgggagagacccagtctgagtactcagattctagctgtgagaacggggccttcttctgcaatgagtgtgactgccgcttctctgaggaggcctcactcaagaggcacacgctgcagacccacagtgacaaaccctacaagtgtgaccgctgccaggcctccttccgctacaagggcaacctcgccagccacaagaccgtccataccggtgagaaaccctatcgttgcaacatctgtggggcccagttcaaccggccagccaacctgaaaacccacactcgaattcactctggagagaagccctacaaatgcgaaacctgcggagccagatttgtacaggtggcccacctccgtgcccatgtgcttatccacactggtgagaagccctatccctgtgaaatctgtggcacccgtttccggcaccttcagactctgaagagccacctgcgaatccacacaggagagaaaccttaccattgtgagaagtgtaacctgcatttccgtcacaaaagccagctgcgacttcacttgcgccagaagcatggcgccatcaccaacaccaaggtgcaataccgcgtgtcagccactgacctgcctccggagctccccaaagcctgctgaagcatggagtgttgatgctttcgtctccagccccttctcagaatctacccaaaggatactgtaacactttacaatgttcatcccatgatgtagtgcctctttcatccactagtgcaaatcatagctgggggttgggggtggtgggggtcggggcctgggggactgggagccgcagcagctccccctcccccactgccataaaacattaagaaaatcatattgcttcttctcctatgtgtaaggtgaaccatgtcagcaaaaagcaaaatcattttatatgtcaaagcaggggagtatgcaaaagttctgacttgactttagtctgcaaaatgaggaatgtatatgttttgtgggaacagatgtttcttttgtatgtaaatgtgcattcttttaaaagacaagacttcagtatgttgtcaaagagagggctttaatttttttaaccaaaggtgaaggaatatatggcagagttgtaaatatataaatatatatatatataaaataaatatatataaacctaacaaagatatattaaaaatataaaactgcgttaaaggctcgattttgtatctgcaggcagacacggatctgagaatctttattgagaaagagcacttaagagaatattttaagtattgcatctgtataagtaagaaaatattttgtctaaaatgcctcagtgtatttgtatttttttgcaagtgaaggtttacaatttacaaagtgtgtattaaaaaaaacaaaaagaacaaaaaaatctgcagaaggaaaaatgtgtaattttgttctagttttcagtttgtatatacccgtacaacgtgtcctcacggtgccttttttcacggaagttttcaatgatgggcgagcgtgcaccatccctttttgaagtgtaggcagacacagggacttgaagttgttactaactaaactctctttgggaatgtttgtctcatcccattctgcgtcatgcttgtgttataactactccggagacagggtttggctgtgtctaaactgcattaccgcgttgtaaaatatagctgtacaaatataagaataaaatgttgaaaagtcaaactggaaaaaaaa

SEQ ID NO: 1008 - protein, 706 aa, Mus musculus
MASPADSCIQFTRHASDVLLNLNRLRSRDILTDVVIVVSREQFRAHKTVLMACSGLFYSIFTDQLKCNLSVINLDPEINPEGFCILLDFMYTSRLNLREGNIMAVMATAMYLQMEHVVDTCRKFIKASEAEMVSAIKPPREEFLNSRMLMPQDIMAYRGREVVENNLPLRSAPGCESRAFAPSLYSGLSTPPASYSMYSHLPVSSLLFSDEEFRDVRMPVANPFPKERALPCDSARPVPGEYSRPTLEVSPNVCHSNIYSPKETIPEEARSDMHYSVAEGLKPAAPSARNAPYFPCDKASKEEERPSSEDEIALHFEPPNAPLNRKGLVSPQSPQKSDCQPNSPTESCSSKNACILQASGSPPAKSPTDPKACNWKKYKFIVLNSLNQNAKPEGPEQAELGRLSPRAYTAPPACQPPMEPENLDLQSPTKLSASGEDSTIPQASRLNNIVNRSMTGSPRSSSESHSPLYMHPPKCTSCGSQSPQHAEMCLHTAGPTFPEEMGETQSEYSDSSCENGAFFCNECDCRFSEEASLKRHTLQTHSDKPYKCDRCQASFRYKGNLASHKTVHTGEKPYRCNICGAQFNRPANLKTHTRIHSGEKPYKCETCGARFVQVAHLRAHVLIHTGEKPYPCEICGTRFRHLQTLKSHLRIHTGEKPYHCEKCNLHFRHKSQLRLHLRQKHGAITNTKVQYRVSATDLPPELPKAC

SEQ ID NO: 1009 - DNA, 3791 bp, Homo sapien
acagacggcgggtgaacatggcgtcctcgacttggtctgagacgtgataggcctgccttctggttgaagatgtggcgagtgaaaaaactgagcctcagcctgtcgccttcgccccagacgggaaaaccatctatgagaactcctctccgtgaacttaccctgcagcccggtgccctcaccacctctggaaaaagatcccccgcttgctcctcgctgaccccatcactgtgcaagctggggctgcaggaaggcagcaacaactcgtctccagtggattttgtaaataacaagaggacagacttatcttcagaacatttcagtcattcctcaaagtggctagaaacttgtcagcatgaatcagatgagcagcctctagatccaattccccaaattagctctactcctaaaacgtctgaggaagcagtagacccactgggcaattatatggttaaaaccatcgtccttgtaccatctccactggggcagcaacaagacatgatatttgaggcccgtttagataccatggcagagacaaacagcatatctttaaatggacctttgagaacagacgatctggtgagagaggaggtggcaccctgcatgggagacaggttttcagaagttgctgctgtatctgagaaacctatctttcaggaatctccgtcccatctcttagaggagtctccaccaaatccctgttctgaacaactacattgctccaaggaaagcctgagcagtagaactgaggctgtgcgtgaggacttagtaccttctgaaagtaacgccttcttgccttcctctgttctctggctttccccttcaactgccttggcagcagatttccgtgtcaatcatgtggacccagaggaggaaattgtagagcatggagctatggaggaaagagaaatgaggtttcccacacatcctaaggagtctgaaacagaagatcaagcacttgtctcaagtgtggaagatattctgtccacatgcctgacaccaaatctagtagaaatggaatcccaagaagctccaggcccagcagtagaagatgttggtaggattcttggctctgatacagagtcttggatgtccccactggcctggctggaaaaaggtgtaaatacctccgtcatgctggaaaatctccgccaaagcttatcccttccctcgatgcttcgggatgctgcaattggcactacccctttctctacttgctcggtggggacttggtttactccttcagcaccacaggaaaagagtacaaacacatcccagacaggcctggttggcaccaagcacagtacttctgagacagagcagctcctgtgtggccggcctccagatctgactgccttgtctcgacatgacttggaagataacctgctgagctctcttgtcattgtggagtttctctcccgccagcttcgggactggaagagccagctggctgtccctcacccagaaacccaggacagtagcacacagactgacacatctcacagtgggataactaataaacttcagcatcttaaggagagccatgagatgggacaggccctacagcaggccagaaatgtcatgcaatcatgggtgcttatctctaaagagctgatatccttgcttcacctatccctgttgcatttagaagaagataagactactgtgaatcaggagtctcggcgtgcagaaacattggtctgttgctgttttgatttgctgaagaaattgagggcaaagctccagagcctcaaagcagaaagggaggaggcaaggcacagagaggaaatggctctcagaggcaaggatgcggcagagatagtgttggaggctttctgtgcacacgccagccagcgcatcagccagctggaacaggacctagcatccatgcgggaattcagaggccttctgaaggatgcccagacccaactggtagggcttcatgccaagcaagaagagctggttcagcagacagtgagtcttacttctaccttgcaacaagactggaggtccatgcaactggattatacaacatggacagctttgctgagtcggtcccgacaactcacagagaaactcacagtcaagagccagcaagccctgcaggaacgtgatgtggcaattgaggaaaagcaggaggtttctagggtgctggaacaagtctctgcccagttagaggagtgcaaaggccaaacagaacaactggagttggaaaacattcgtctagcaacagatctccgggctcagttgcagattctggccaacatggacagccagctaaaagagctacagagtcagcatacccattgtgcccaggacctggctatgaaggatgagttactctgccagcttacccagagcaatgaggagcaggctgctcaatgcgtaaaggaagagatggcactaaaacacatgcaggcagaactgcagcagcaacaagctgtcctggccaaagaggtgcgggacctgaaagagaccttggagtttgcagaccaggagaatcaggttgctcacctggagctgggtcaggttgagtgtcaattgaaaaccacactggaagtgctccgggagcgcagcttgcagtgtgagaacctcaaggacactgtagagaacctaacggctaaactggccagcaccatagcagataaccaggagcaagatctggagaaaacacggcagtactctcaaaagctagggctgctgactgagcaactacagagcctgactctctttctacagacaaaactaaaggagaagactgaacaagagacccttctgctgagtacagcctgtcctcccacccaggaacaccctctgcctaatgacaggaccttcctgggaagcatcttgacagcagtggcagatgaagagccagaatcaactcctgtgcccttgcttggaagtgacaagagtgctttcacccgagtagcatcaatggtttcccttcagcccgcagagaccccaggcatggaggagagcctggcagaaatgagtattatgactactgagcttcagagtctttgttccctgctacaagagtctaaagaagaagccatcaggactctgcagcgaaaaatttgtgagctgcaagctaggctgcaggcccaggaagaacagcatcaggaagtccagaaggcaaaagaagcagacatagagaagctgaaccaggccttgtgcttgcgctacaagaatgaaaaggagctccaggaagtgatacagcagaatgagaagatcctagaacagatagacaagagtggcgagctcataagccttagagaggaggtgacccaccttacccgctcacttcggcgtgcggagacagagaccaaagtgctccaggaggcctggcaggccagctggactccaactgccagcctatggccaccaattggatccaggagaaagtgtggctctctcaggaggtggacaaactgagagtgatgttcctggagatgaaaaatgagaaggaaaactcctgatcaagttccagagcccatagaaatatcctagaggagaaccttcggcgctctgacaaggagttagaaaaactagatgacattgttcagcatatttataagaccctgctctctattccagaggtggtgaggggatgcaaagaactacagggattgctggaatttctgagctaagaaactgaaagccagaatttgtttcacctctttttacctgcaatacccccttaccccaataccaagaccaactggcatagagccaactgagataaatgctatttaaataaagtgtatttaatgaaaaaaaaaaaaaaaaaaaaa

SEQ ID NO: 1010 - protein, 1120 aa, Homo sapien
MWRVKKLSLSLSPSPQTGKPSMRTPLRELTLQPGALTTSGKRSPACSSLTPSLCKLGLQEGSNNSSPVDFVNNKRTDLSSEHFSHSSKWLETCQHESDEQPLDPIPQISSTPKTSEEAVDPLGNYMVKTIVLVPSPLGQQQDMIFEARLDTMAETNSISLNGPLRTDDLVREEVAPCMGDRFSEVAAVSEKPIFQESPSHLLEESPPNPCSEQLHCSKESLSSRTEAVREDLVPSESNAFLPSSVLWLSPSTALAADFRVNHVDPEEEIVEHGAMEEREMRFPTHPKESETEDQALVSSVEDILSTCLTPNLVEMESQEAPGPAVEDVGRILGSDTESWMSPLAWLEKGVNTSVMLENLRQSLSLPSMLRDAAIGTTPFSTCSVGTWFTPSAPQEKSTNTSQTGLVGTKHSTSETEQLLCGRPPDLTALSRHDLEDNLLSSLVIVEFLSRQLRDWKSQLAVPHPETQDSSTQTDTSHSGITNKLQHLKESHEMGQALQQARNVMQSWVLISKELISLLHLSLLHLEEDKTTVNQESRRAETLVCCCFDLLKKLRAKLQSLKAEREEARHREEMALRGKDAAEIVLEAFCAHASQRISQLEQDLASMREFRGLLKDAQTQLVGLHAKQEELVQQTVSLTSTLQQDWRSMQLDYTTWTALLSRSRQLTEKLTVKSQQALQERDVAIEEKQEVSRVLEQVSAQLEECKGQTEQLELENIRLATDLRAQLQILANMDSQLKELQSQHTHCAQDLAMKDELLCQLTQSNEEQAAQCVKEEMALKHMQAELQQQQAVLAKEVRDLKETLEFADQENQVAHLELGQVECQLKTTLEVLRERSLQCENLKDTVENLTAKLASTIADNQEQDLEKTRQYSQKLGLLTEQLQSLTLFLQTKLKEKTEQETLLLSTACPPTQEHPLPNDRTFLGSILTAVADEEPESTPVPLLGSDKSAFTRVASMVSLQPAETPGMEESLAEMSIMTTELQSLCSLLQESKEEAIRTLQRKICELQARLQAQEEQHQEVQKAKEADIEKLNQALCLRYKNEKELQEVIQQNEKILEQIDKSGELISLREEVTHLTRSLRRAETETKVLQEAWQASWTPTASLWPPIGSRRKCGSLRRWTN

SEQ ID NO: 1011 - DNA, 4445 bp, Homo sapien
cgctccccgctcccgtggctgccgccgccccggggaagaagagacaggggtggggtttgggggaagcgagagaggaggggagagaccctggccaggctggagcctggattcgaggggaggagggacgggaggaggagaaaggtggaggagaagggaggggggagcggggaggagcggccgggcctggggccttgaggcccggggagagccggggagccgggcccgcgcgccgagatgttgctgctgctgttactggcgccactcttcctccgccccccgggcgcgggcggggcgcagacccccaacgccacctcagaaggttgccagatcatacacccgccctgggaagggggcatcaggtaccggggcctgactcgggaccaggtgaaggctatcaacttcctgccagtggactatgagattgagtatgtgtgccggggggagcgcgaggtggtggggcccaaggtccgcaagtgcctggccaacggctcctggacagatatggacacacccagccgctgtgtccgaatctgctccaagtcttatttgaccctggaaaatgggaaggttttcctgacgggtggggacctcccagctctggacggagcccgggtggatttccggtgtgaccccgacttccatctggtgggcagctcccggagcatctgtagtcagggccagtggagcacccccaagccccactgccaggtgaatcgaacgccacactcagaacggcgcgcagtgtacatcggggcactgtttcccatgagcgggggctggccagggggccaggcctgccagcccgcggtggagatggcgctggaggacgtgaatagccgcagggacatcctgccggactatgagctcaagctcatccaccacgacagcaagtgtgatccaggccaagccaccaagtacctatatgagctgctctacaacgaccctatcaagatcatccttatgcctggctgcagctctgtctccacgctggtggctgaggctgctaggatgtggaacctcattgtgctttcctatggctccagctcaccagccctgtcaaaccggcagcgtttccccactttcttccgaacgcacccatcagccacactccacaaccctacccgcgtgaaactctttgaaaagtggggctggaagaagattgctaccatccagcagaccactgaggtcttcacttcgactctggacgacctggaggaacgagtgaaggaggctggaattgagattactttccgccagagtttcttctcagatccagctgtgcccgtcaaaaacctgaagcgccaggatgcccgaatcatcgtgggacttttctatgagactgaagcccggaaagttttttgtgaggtgtacaaggagcgtctctttgggaagaagtacgtctggttcctcattgggtggtatgctgacaattggttcaagatctacgacccttctatcaactgcacagtggatgagatgactgaggcggtggagggccacatcacaactgagattgtcatgctgaatcctgccaatacccgcagcatttccaacatgacatcccaggaatttgtggagaaactaaccaagcgactgaaaagacaccctgaggagacaggaggcttccaggaggcaccgctggcctatgatgccatctgggccttggcactggccctgaacaagacatctggaggaggcggccgttctggtgtgcgcctggaggacttcaactacaacaaccagaccattaccgaccaaatctaccgggcaatgaactcttcgtcctttgagggtgtctctggccatgtggtgtttgatgccagcggctctcggatggcatggacgcttatcgagcagcttcagggtggcagctacaagaagattggctactatgacagcaccaaggatgatctttcctggtccaaaacagataaatggattggagggtcccccccagctgaccagaccctggtcatcaagacattccgcttcctgtcacagaaactctttatctccgtctcagttctctccagcctgggcattgtcctagctgttgtctgtctgtcctttaacatctacaactcacatgtccgttatatccagaactcacagcccaacctgaacaacctgactgctgtgggctgctcactggctttagctgctgtcttccccctggggctcgatggttaccacattgggaggaaccagtttcctttcgtctgccaggcccgcctctggctcctgggcctgggctttagtctgggctacggttccatgttcaccaagatttggtgggtccacacggtcttcacaaagaaggaagaaaagaaggagtggaggaagactctggaaccctggaagctgtatgccacagtgggcctgctggtgggcatggatgtcctcactctcgccatctggcagatcgtggaccctctgcaccggaccattgagacatttgccaaggaggaacctaaggaagatattgacgtctctattctgccccagctggagcattgcagctccaggaagatgaatacatggcttggcattttctatggttacaaggggctgctgctgctgctgggaatcttccttgcttatgagaccaagagtgtgtccactgagaagatcaatgatcaccgggctgtgggcatggctatctacaatgtggcagtcctgtgcctcatcactgctcctgtcaccatgattctgtccagccagcaggatgcagcctttgcctttgcctctcttgccatagttttctcctcctatatcactcttgttgtgctctttgtgcccaagatgcgcaggctgatcacccgaggggaatggcagtcggaggcgcaggacaccatgaagacagggtcatcgaccaacaacaacgaggaggagaagtcccggctgttggagaaggagaaccgtgaactggaaaagatcattgctgagaaagaggagcgtgtctctgaactgcgccatcaactccagtctcggcagcagctccgctcccggcgccacccaccgacacccccagaaccctctgggggcctgcccaggggaccccctgagccccccgaccggcttagctgtgatgggagtcgagtgcatttgctttataagtgagggtagggtgagggaggacaggccagtagggggagggaaagggagaggggaagggcaggggactcaggaagcagggggtccccatccccagctgggaagaacatgctatccaatctcatctcttgtaaatacatgtccccctgtgagttctgggctgatttgggtctctcatacctctgggaaacagacctttttctctcttactgcttcatgtaattttgtatcacctcttcacaatttagttcgtacctggcttgaagctgctcactgctcacacgctgcctcctcagcagcctcactgcatctttctcttcccatgcaacaccctcttctagttaccacggcaacccctgcagctcctctgcctttgtgctctgttcctgtccagcaggggtctcccaacaagtgctctttccaccccaaaggggcctctccttttctccactgtcataatctctttccatcttacttgcccttctatactttctcacatgtggctccccctgaattttgcttcctttgggagctcattcttttcgccaaggctcacatgctccttgcctctgctctgtgcactcacgctcagcacacatgcatcctcccctctcctgcgtgtgcccactgaacatgctcatgtgtacacacgcttttcccgtatgctttcttcatgttcagtcacatgtgctctcgggtgccctgcattcacagctacgtgtgcccctctcatggtcatgggtctgcccttgagcgtgtttgggtaggcatgtgcaatttgtctagcatgctgagtcatgtctttcctatttgcacacgtccatgtttatccatgtactttccctgtgtaccctccatgtaccttgtgtactttcttcccttaaatcatggtattcttctgacagagccatatgtaccctaccctgcacattgttatgcacttttccccaattcatgtttggtggggccatccacaccctctccttgtcacagaatctccatttctgctcagattccccccatctccattgcattcatgtactaccctcagtctacactcacaatcatcttctcccaagactgctcccttttgttttgtgtttttttgaggggaattaaggaaaaataagtgggggcaggtttggagagctgcttccagtggatagttgatgagaatcctgaccaaaggaaggcacccttgactgttgggatagacagatggacctatggggtgggaggtggtgtccctttcacactgtggtgtctcttggggaaggatctccccgaatctcaataaaccagtgaacagtgtgactcggcaaaaaaaaaaa

SEQ ID NO: 1012 - protein, 961 aa, Homo sapien
MLLLLLLAPLFLRPPGAGGAQTPNATSEGCQIIHPPWEGGIRYRGLTRDQVKAINFLPVDYEIEYVCRGEREVVGPKVRKCLANGSWTDMDTPSRCVRICSKSYLTLENGKVFLTGGDLPALDGARVDFRCDPDFHLVGSSRSICSQGQWSTPKPHCQVNRTPHSERRAVYIGALFPMSGGWPGGQACQPAVEMALEDVNSRRDILPDYELKLIHHDSKCDPGQATKYLYELLYNDPIKIILMPGCSSVSTLVAEAARMWNLIVLSYGSSSPALSNRQRFPTFFRTHPSATLHNPTRVKLFEKWGWKKIATIQQTTEVFTSTLDDLEERVKEAGIEITFRQSFFSDPAVPVKNLKRQDARIIVGLFYETEARKVFCEVYKERLFGKKYVWFLIGWYADNWFKIYDPSINCTVDEMTEAVEGHITTEIVMLNPANTRSISNMTSQEFVEKLTKRLKRHPEETGGFQEAPLAYDAIWALALALNKTSGGGGRSGVRLEDFNYNNQTITDQIYRAMNSSSFEGVSGHVVFDASGSRMAWTLIEQLQGGSYKKIGYYDSTKDDLSWSKTDKWIGGSPPADQTLVIKTFRFLSQKLFISVSVLSSLGIVLAVVCLSFNIYNSHVRYIQNSQPNLNNLTAVGCSLALAAVFPLGLDGYHIGRNQFPFVCQARLWLLGLGFSLGYGSMFTKIWWVHTVFTKKEEKKEWRKTLEPWKLYATVGLLVGMDVLTLAIWQIVDPLHRTIETFAKEEPKEDIDVSILPQLEHCSSRKMNTWLGIFYGYKGLLLLLGIFLAYETKSVSTEKINDHRAVGMAIYNVAVLCLITAPVTMILSSQQDAAFAFASLAIVFSSYITLVVLFVPKMRRLITRGEWQSEAQDTMKTGSSTNNNEEEKSRLLEKENRELEKIIAEKEERVSELRHQLQSRQQLRSRRHPPTPPEPSGGLPRGPPEPPDRLSCDGSRVHLLYK

SEQ ID NO: 1013 - DNA, 1642 bp, Homo sapien
ccagatctcagaggagcctggctaagcaaaaccctgcagaacggctgcctaatttacagcaaccatgagtacaaatggtgatgatcatcaggtcaaggatagtctggagcaattgagatgtcactttacatgggagttatccattgatgacgatgaaatgcctgatttagaaaacagagtcttggatcagattgaattcctagacaccaaatacagtgtgggaatacacaacctactagcctatgtgaaacacctgaaaggccagaatgaggaagccctgaagagcttaaaagaagctgaaaacttaatgcaggaagaacatgacaaccaagcaaatgtgaggagtctggtgacctggggcaactttgcctggatgtattaccacatgggcagactggcagaagcccagacttacctggacaaggtggagaacatttgcaagaagctttcaaatcccttccgctatagaatggagtgtccagaaatagactgtgaggaaggatgggccttgctgaagtgtggaggaaagaattatgaacgggccaaggcctgctttgaaaaggtgcttgaagtggaccctgaaaaccctgaatccagcgctgggtatgcgatctctgcctatcgcctggatggctttaaattagccacaaaaaatcacaagccattttctttgcttcccctaaggcaggctgtccgcttaaatccagacaatggatatattaaggttctccttgccctgaagcttcaggatgaaggacaggaagctgaaggagaaaagtacattgaagaagctctagccaacatgtcctcacagacctatgtctttcgatatgcagccaagttttaccgaagaaaaggctctgtggataaagctcttgagttattaaaaaaggccttgcaggaaacacccacttctgtcttactgcatcaccagatagggctttgctacaaggcacaaatgatccaaatcaaggaggctacaaaagggcagcctagagggcagaacagagaaaagctagacaaaatgataagatcagccatatttcattttgaatctgcagtggaaaaaaagcccacatttgaggtggctcatctagacctggcaagaatgtatatagaagcaggcaatcacagaaaagctgaagagaattttcaaaaattgttatgcatgaaaccagtggtagaagaaacaatgcaagacatacatttctactatggtcggtttcaggaatttcaaaagaaatctgacgtcaatgcaattatccattatttaaaagctataaaaatagaacaggcatcattaacaagggataaaagtatcaattctttgaagaaattggttttaaggaaacttcggagaaaggcattagatctggaaagcttgagcctccttgggttcgtctataaattggaaggaaatatgaatgaagccctggagtactatgagcgggccctgagactggctgctgactttgagaactctgtgagacaaggtccttaggcacccagatatcagccactttcacatttcatttcattttatgctaacatttactaatcatcttttctgcttactgttttcagaaacattataattcactgtaatgatgtaattcttgaataataaatctgacaaaatatt

SEQ ID NO: 1014 - protein, 478 aa, Homo sapien
MSTNGDDHQVKDSLEQLRCHFTWELSIDDDEMPDLENRVLDQIEFLDTKYSVGIHNLLAYVKHLKGQNEEALKSLKEAENLMQEEHDNQANVRSLVTWGNFAWMYYHMGRLAEAQTYLDKVENICKKLSNPFRYRMECPEIDCEEGWALLKCGGKNYERAKACFEKVLEVDPENPESSAGYAISAYRLDGFKLATKNHKPFSLLPLRQAVRLNPDNGYIKVLLALKLQDEGQEAEGEKYIEEALANMSSQTYVFRYAAKFYRRKGSVDKALELLKKALQETPTSVLLHHQIGLCYKAQMIQIKEATKGQPRGQNREKLDKMIRSAIFHFESAVEKKPTFEVAHLDLARMYIEAGNHRKAEENFQKLLCMKPVVEETMQDIHFYYGRFQEFQKKSDVNAIIHYLKAIKIEQASLTRDKSINSLKKLVLRKLRRKALDLESLSLLGFVYKLEGNMNEALEYYERALRLAADFENSVRQGP

SEQ ID NO: 1015 - DNA, 1936 bp, Homo sapien
cctcgctagtggcgggcatgataacacacgccggagggtcgcacgcgggttccagttgtgattgctggagttgtgtattgccaggaggctctccgagattggggtcgggtcactgcctcatccaccggagcgatggcgtttctccgaagcatgtggggcgtgctgagtgccctgggaaggtctggagcagagctgtgcaccggctgtggaagtcgactgcgctcccccttcagttttgtgtatttaccgaggtggttttcatctgtcttggcaagttgtccaaagaaacctgtaagttcttaccttcgattttctaaagaacaactacccatatttaaagctcagaacccagatgcaaaaactacagaactaattagaagaattgcccagcgttggagggaacttcctgattcaaagaaaaaaatatatcaagatgcttatagggcggagtggcaggtatataaagaagagataagcagatttaaagaacagctaactccaagtcagattatgtctttggaaaaagaaatcatggacaaacatttaaaaaggaaagctatgacaaaaaaaaaagagttaacactgcttggaaaaccaaaaagacctcgttcagcttataacgtttatgtagctgaaagattccaagaagctaagggtgattcaccgcaggaaaagctgaagactgtaaaggaaaactggaaaaatctgtctgactctgaaaaggaattatatattcagcatgctaaagaggacgaaactcgttatcataatgaaatgaagtcttgggaagaacaaatgattgaagttggacgaaaggatcttctacgtcgcacaataaagaaacaacgaaaatatggtgctgaggagtgttaaaagtagaagattgagatgtgttcacaatggataggcacaggaaaccagttaggtctcaatacctgaagctatcgtaaaattaagaaaggataaagttggtaaaccttttatatttagtatctttttattcagctcatggacttctgccagcataatacttgctttggaaaacccagataaaggttcatgcaaactttattttgtgtttaggaactactgaggatcagagtaatccaagcaaatgtgaatcattttacctttgacaaaggtaaatcagactatgaagttttttttatacaggatgatgactatggaaagagtactcttgtttccttatattatggaggcaggagtttcgttttcaaaattgttacaaattgtagaagccacggtgttctgtgatataagtgtgtgtttttcataaagcaggcagaactcatctaggtaaattacagttcctaggtataattcacattgtattcagagttgatggttgtacatataagtgattgctggttttagttgcaactttgtataaaagggactgagaaatttataaacttttttcttactgtcttttttctaaagtaaaaacaaagaaattatgtgccagatttatgcatattattttatgttgcatagaataaaatttttaatctttaattttacatttcctaaatatattttaagacgaaacatttgttctatagcttttccctttttttaagtaaggaattttatttttttctgaattattttctctcgtgagtatattgatccagaaagaaaacttgtattatgtgtgttttaaaatgagaaatctaaaaaacgaaaagtctccaaagtctctggaatttgaaacactttgcataacgtataaaagcctgtttaagagacagccaactatggcctgtggatcaaatccagcctgctgcctgctttttatggcctgtgagctaggaattgtgtttataattttaaatgtttttttttaaagacttttatgatacttgaaaattaacatgaatatttagtgttcataaataaagtttgttgaaacaca

SEQ ID NO: 1016 - protein, 246 aa, Homo sapien
MAFLRSMWGVLSALGRSGAELCTGCGSRLRSPFSFVYLPRWFSSVLASCPKKPVSSYLRFSKEQLPIFKAQNPDAKTTELIRRIAQRWRELPDSKKKIYQDAYRAEWQVYKEEISRFKEQLTPSQIMSLEKEIMDKHLKRKAMTKKKELTLLGKPKRPRSAYNVYVAERFQEAKGDSPQEKLKTVKENWKNLSDSEKELYIQHAKEDETRYHNEMKSWEEQMIEVGRKDLLRRTIKKQRKYGAEEC

SEQ ID NO: 1017 - DNA, 507 bp, Homo sapien
ggtgcttctgagatgtgggcttgcacacgctgttgctatagtacgtgtgatcctgactgctgtcatggcgtgccctctggagaaggccctggatgtgatggtgtccaccttccacaagtactcgggcaaagagggtgacaagttcaagctcaacaagtcagaactaaaggagctgctgacccgggagctgcccagcttcttggggaaaaggacagatgaagctgctttccagaagctgatgagcaacttggacagcaacagggacaacgaggtggacttccaagagtactgtgtcttcctgtcctgcatcgccatgatgtgtaacgaattctttgaaggcttcccagataagcagcccaggaagaaatgaaaactcctctgatgtggttggggggtctgccagctggggccctccctgtcgccagtgggcacttttttttttccaccctggctccttcagacacgtgcttgatgctgagcaagttcaataaagattcttggaagttt

SEQ ID NO: 1018 - protein, 101 aa, Homo sapien
MACPLEKALDVMVSTFHKYSGKEGDKFKLNKSELKELLTRELPSFLGKRTDEAAFQKLMSNLDSNRDNEVDFQEYCVFLSCIAMMCNEFFEGFPDKQPRKK

SEQ ID NO: 1019 - DNA, 5429 bp, Homo sapien
ggcgcggggtccgcgcccggagcgccccgccgcgcacaggagttgaccacatttggccatttcccagaagggccccaccccaagggtgagtggccaatggggagctgtttctgctgacatcaattccccaggaggtactcaccccaagtctgcccaagtgaagatggctgatacccaccctgggatggagcccagcgcctgaggcccttatcatggtgatggtcctaagtgaaagcctcagcacccggggagctgactccattgcatgtgggaccttcagccgtgaactgcacacgccaaagaagatgagtcaaggacctacacttttctcttgtggaattatggaaaatgacagatggcgagacctggacaggaaatgccctcttcagattgaccaaccgagcaccagcatctgggaatgcctgcctgaaaaggacagctcactatggcaccgggaggcagtgaccgcctgcgctgtgaccagtctgatcaaagacctcagcatcagcgaccacaacgggaacccctcagcaccccctagcaagcgccagtgccgctcactgtccttctccgatgagatgtccagttgccggacatcatggaggcccttgggctccaaagtctggactcccgtggaaaagagacgctgctacagcgggggcagcgtccagcgctattccaacggcttcagcaccatgcagaggagttccagcttcagcctcccttcccgggccaacgtgctctcctcaccctgcgaccaggcaggactccaccaccgatttggagggcagccctgccaaggggtgccaggctcagccccgtgtggacaggcaggtgacacctggagccctgacctgcaccccgtgggaggaggccggctggacctgcagcggtccctctcttgctcacatgagcagttttcctttgtggaatactgtcctccctcagccaacagcacacctgcctcaacaccagagctggcgagacgctccagcggcctttcccgcagccgctcccagccgtgtgtccttaacgacaagaaggtcggtgttaaaaggcggcgccctgaagaagtgcaagagcagaggccttctctagaccttgccaagatggcacagaactgtcagaccttcagcagcctcagctgcctgagcgcagggacagaggactgcggtccccagagccccttcgcccgccacgtcagcaacaccagggcctggaccgccctgctctcagcctccggcccagggggcaggacccccgctgggaccccggtccctgagcctcttcccccttccttcgacgaccacctcgtctgccaggaggacctgtcctgtgaggagtcagacagctgcgccctggacgaggattgtggcaggagagcggagccggctgcagcctggcgggaccgcggggcccctgggaacagcctctgctccctggacggcgagttggacattgagcagatagagaagaactgagggggtgtgggcccaggcagggctggggtgtgctggcatcgacagcccccactctgggcactaggtgggcccttgaaggggagcccaactcgtgggcctgatgaaagcttcctgagtggtgtcgggtcccagagagggagcccacctgctgcctgggggagagcctggcctggccgcgtcatacagcgggtgtgtcagcctctcaccggctccccgagcgtggcagccaccaggtccacagaactactgcagcccagaggacagctttgaagtttgcgtcttttctgcctctttccctgtgggatgttgggcagtctctgttgtccccggcagagctgggcaccgctctgtatccccctggtggtgggggctgtcagggagggcctggggtgggggccaggggccatctgctatgtcagggcccttcttggcctcactcaggttcacttctggggagtcggccccgcagcttctttcactcagttttactccgtgccttctctcccaggtctccctgcttcaggcttgggaaggttcgggagatgcttccttctgtaacaccagaaccatttggccttaattccaatgtgagagacagaatccctggggtgctggactggccctccagagggtaagccatgtccggagtctcgggcccaaggaacgatttggagggtgcttgttagggcctcccgtgttgggtagaaatttggtggatctgttggctgaaaagatggacttgcttgcctctcctacagcatggagaggctgaccccatggctctgccaccgttggggcagggttagcagatggcagcccttctctgtggctgacaggtcactgagtgataagcatggttggttccggtgagtgtagggatggcacgataccagggcagcctcttgaaaacggcctcgggagacgggagctgcgagcaggtgggcagatgagggccctatgcgcactcaggggtgaagggcgtccgctggccactctgcaggggcccctgcaggattccaggcacctcccgtttgtccttgaggactgctggctgtaaccagggcacatcacccacctcaagacaagcccacgcccttgtcagcttagggggagcccagtcctgagggctgcatctctgttgtaggcccagccaccggcacaaagctggattcatgctccctgcccctaccccaccctggctcctcaccctggggcatccgaggagcctagccccctgagggtttgctctcctctcaaggtttgtagctcctctccggctgccttgcagacaccaccacatgggctctgctctatgggaatctggcttttagcgaatgtggcgtcttctgcaaacaatagcaattgggctggcttaggagcaagtggctcattttcccataaggctaaaaataactggtgcgctcccttgtgttggctgacacgcgcgttcaaagcacttttgtagtcactttgcttttgctcgtcttcatggacgagtgaacgcctcgcttctgcaggttgagtccagatgcttctcaccttctttctcctcaagaaagatgctttttgggaaacgttgtttaaatcttatttttttactacatcaaaaggatggtggttcaagttcccaatatgtgggtggcacttcttaaaaatcagctttaaggagctggcagaaagcccccagccccacagccctgagagatggtgttgctagctcaggtggctgacacatggggtatgccgggcactgggcaggtcccagagccggggaaccagctcacctctggttgctgtagctcctgccggaggcatgtctacttgtgatcccggacagccgaacccaagagctggtggctctgagcagacagagacatcttggcctgtccctgcctgggggtcatggagaccatgtcttcttagagcaaatgtggaggcggccagggcagttgttgggtgaatgtggagagcacatggccatgtcttgcccccggagtaccactgggcgtggggggtcctggcaccacatgcccggtgtggccgagggcacacagcctctatagcaggccttcctgtggaaggcagaggcagtgagggaggtggacggtgccagctgaggctgaggcatgcagcagcccccagctacctttgcttagggctggggtgggaggcacatggtgacaggtatatgtcgtgggactggggtgtgggtgacctgccctcaaaccttgcctgccacctccccattcaggcctggtggcaggaagggacaagctgtggagctggctgagtcacagccacctccccacctccccgcaagctggtcccatcgaccagcaagcccagccccagggcgcttagggagaaatgacccagcctcctcagaccccgcctgcctgtcctgtgcccaccacgcagcagtcaggggagaaaatggtggctatcccttctgcttagagaaagaaatggcctttagctggtttcatgtttgtgttttgactggagggagtagaccctatctataaggtgccaccccatcatccaagctgccacactgcccggagcagcctgttcctgcactccaccctgctggccccaggacttctgatctcagtcctctgggagggaggttcgcctaggaggtgccccccacattggtgtccccatgggcagcaggcagacagctcacccccaccagcatgatggccccagctgggggcagtggcaggagccttacttttgtcacagccttgcccacaaaccctgcctctgaggggagactgaggaagggcagagccagaagcaagccgtgccaggccatctgcctgctcatggggtcctaaagcgcgggctaagcctgcaggaaagccggggcggtggggggggcttagtgccacatgcaccccactcattccaaagccaccaaactgccaggggctgccgtccacccgtggggcccaggggctggggccacagccttgccattttcgttgccataccctcttgccttactcgcggtggaggccggatttgcacgggcagacgtgcacctgggcccgtggggagcttgttctgaccagacgtacagattttcattctcagaaagccttacttttcaaccaaatttttgtagccagttttgtgaatttgtacactgaaagaaaatttaaataaaggggaagtccacattaaaaagaaaacaaaacaaaccctaactaacttccaaatgggtctcctggtgcgggggcgtgagtggccgtgccctgggtgtgctgcctgtctgagcaagcttccctagctgtggaaccccgggccccctgctgcgggctctgccttggtgtcatgcctgctgcacccccgtttccactgacgtgccgtctgtggctatgggggtggtcactggaatgacggtcactccagacgtcagccggcagggatgcagcaggctggccgcgcaccggggctcgggcaccctctggccccacactggcaatgatgccacaccttgccatgtccacgctgttggtcaaacccctctgtcatgcctctttaaagagaaaagaagagaaagattttttttttttttaatggcagaccgaagtggagatcttgtagcctagataggatagtctgaccttctagcatagtctttttggcaaatgatttgtgttttcagtgtgtggggaagctgtcctgggggctggggcgacagatagcacataggctgtttctggggctgcaggggcttccctgagctggatgttgtgggtgttgccgtgcttcaggaagtgtggcgaccagaaagcgtagacccggggcccagggtctgcccgcccctgcagcctggcctccccgcacaggctgtggcttgcactccagccgctctagtctctcaggaatttgcttgttacttgtactgtgtaaataaagcttcctggttcaataccc

SEQ ID NO: 1020 - protein, 422 aa, Homo sapien
MVMVLSESLSTRGADSIACGTFSRELHTPKKMSQGPTLFSCGIMENDRWRDLDRKCPLQIDQPSTSIWECLPEKDSSLWHREAVTACAVTSLIKDLSISDHNGNPSAPPSKRQCRSLSFSDEMSSCRTSWRPLGSKVWTPVEKRRCYSGGSVQRYSNGFSTMQRSSSFSLPSRANVLSSPCDQAGLHHRFGGQPCQGVPGSAPCGQAGDTWSPDLHPVGGGRLDLQRSLSCSHEQFSFVEYCPPSANSTPASTPELARRSSGLSRSRSQPCVLNDKKVGVKRRRPEEVQEQRPSLDLAKMAQNCQTFSSLSCLSAGTEDCGPQSPFARHVSNTRAWTALLSASGPGGRTPAGTPVPEPLPPSFDDHLVCQEDLSCEESDSCALDEDCGRRAEPAAAWRDRGAPGNSLCSLDGELDIEQIEKN

SEQ ID NO: 1021 - DNA, 2097 bp, Homo sapien
gtaagtgccagggtctcagggtcaggtcgcggctggtcactgtgcaggcgcttgggtgacgcgacgatctcagcggatctggtcaccttcgtctccccgccatggagacctcagcactcaagcagcaggagcagcccgcggcgaccaagatcaggaacctgccctgggttgaaaaataccggccacagaccctgaatgatctcatttctcatcaggacattctgagtaccattcagaagtttatcaatgaagaccgactgccacacttgcttctctacggtcccccagggacaggcaagacatctaccatcctagcctgtgcgaaacagctatataaagacaaagaatttggctccatggtcttggagctgaatgcttcagatgaccgaggaatagacatcattcgaggaccgatcctgagctttgctagcacaaggacaatatttaagaaaggctttaagctagtgatcttggatgaagcagacgccatgactcaggacgcccagaatgccttgagaagagtaattgagaaattcacagaaaataccagattctgcctcatctgtaactatctgtcaaagatcatccctgccttgcagtcccgctgcacgaggtttcggttcggtcccctgactcctgaactcatggttccccgcctggaacatgtcgtggaagaagagaaagttgatataagtgaagatggaatgaaagcactagtcactctttccagtggagacatgcgtagggctctgaacattttgcagagcaccaatatggcctttgggaaggtgacagaggagactgtctacacctgcaccgggcacccgctcaagtcagacattgccaacatcctggactggatgttgaatcaagatttcaccacagcctacagaaatattacagagttgaaaactctgaaggggttggcactgcatgatatcctgacagagatacacttgtttgtgcatagagttgactttccatcttcagttcgaatacatttattgaccaaaatggcagacattgagtacaggctttctgttggcaccaacgagaagatccagctgagctccctcattgctgcatttcaagtcaccagagacctgattgttgcagaggcctagatgctctgagggccattcacaattctcagggctcagcagtgatgggagaacagaggacagttccaggataaactgctgcctggggctgtgggatgaatcagtcaccccgaatcttggaaaaacccccttccaggagaggatgggcaggcatttaaaaagtaccatttttgtggttgtttggagcagggatgtacaaaataattttaatgtattaactcatactgcctgtcttttataggggaaaaaaataaccttttttattttaaagttataaggtttttaccttttagttgcttggatgacagggaattagcctaccccattttggtctggaacagaagactttcaaatttaatatggtccaagtgtcttcctactcaaggtaaacattatctccaaaattacatttatgattctaatatttggcattgtgtctgtatctaatttaaacagatgttaatggacgtctggccgaaactattatacttttataagatgagctgaatcctcttactttaaaaactggtctttttatttaccctctgtggtagaagagtcaccagcaggttccaaattgatgtgtatgataggaaaaaaaccttaattttaaatataatatagagccttaaactatgccactgggtggcagaggctgtataaaacgcacttgttttcatgcaggagcggggcaagtaaggttgagcctgactgtaaacctagaactgcggaaggactgggacttttgtacaaatttcacatttattttacagcaatcatgctgcatttgtgttagtgttctttataataaaaaacaaagcagcctcctggctggctgtgttacaagtgactcttccttagacagctagaaagatgctgactttgtcaaacttgcatttatatgaaaaccttctgtctctaatatcacagaataaactttctttagatgctgttctttaaaaaaaaaaaaaaaaaa

SEQ ID NO: 1022 - protein, 340 aa, Homo sapien
METSALKQQEQPAATKIRNLPWVEKYRPQTLNDLISHQDILSTIQKFINEDRLPHLLLYGPPGTGKTSTILACAKQLYKDKEFGSMVLELNASDDRGIDIIRGPILSFASTRTIFKKGFKLVILDEADAMTQDAQNALRRVIEKFTENTRFCLICNYLSKIIPALQSRCTRFRFGPLTPELMVPRLEHVVEEEKVDISEDGMKALVTLSSGDMRRALNILQSTNMAFGKVTEETVYTCTGHPLKSDIANILDWMLNQDFTTAYRNITELKTLKGLALHDILTEIHLFVHRVDFPSSVRIHLLTKMADIEYRLSVGTNEKIQLSSLIAAFQVTRDLIVAEA

SEQ ID NO: 1023 - DNA, 2097 bp, Homo sapien; identical to SEQ ID NO: 1021

SEQ ID NO: 1024 - protein, 340 aa, Homo sapien; identical to SEQ ID NO: 1022

SEQ ID NO: 1025 - DNA, 4681 bp, Homo sapien
ctccttccataagggtctggtccttcatccctcccgcttcaccagaccccctcaccctgggagccgccacctccctttccccaagaccagatgtcgcgcggccggacacagccagcacggagagtcgatgccggcgtctgagctgcgcagtggggtcttcccgctgcccagcagcctacaggcgcggtgcactctgggggaacatggccgcttccggtctccctcccgggccggcgctggcctgactgcggccccggtccgtagcactccgccctccgcttctcccgccctgtagccgcgaagactgcttcagcctttccctgtgctgcccctgccgcgcgatggagacgagctcgagctgcgagagtcttggctcccagccggcggcggctcggccgcccagcgtggactccttgtccagtgcctccacttctcattcagagaattcagtgcatacaaaatcagcttctgttgtatcatcagattccatttcaacttctgccgacaacttttctcctgatttgagggtcctgagggagtctaacaagttagcagaaatggaagaaccacccttgcttccaggagaaaatattaaagacatggccaaagatgtaacttatatatgtccattcactggcgctgtacgaggaactctgactgtcacgaattataggttatatttcaaaagcatggaacgggatcccccatttgttttagatgcttcccttggtgtgataaatagagtagaaaaaattggtggtgcttctagtcgaggtgaaaattcttatggactagaaactgtgtgtaaggatattaggaatttacgatttgctcataaacctgaggggcggacaagaagatccatatttgagaatctaatgaaatatgcatttcctgtctctaataacctgcctctttttgcttttgaatacaaagaagtattccctgaaaatgggtggaagctatatgaccctcttttagagtatagaaggcagggaattccaaatgaaagctggagaataacaaagataaatgaacgatatgaactttgtgatacataccctgccctcctggttgtgccagcaaatattcctgatgaagaattaaagagagtggcatccttcagatcaagaggccgtatcccagttttatcatggattcatcctgaaagtcaagccacaatcactcggtgtagccagcccatggttggagtgagtggaaagcgaagcaaagaagatgaaaaataccttcaagctatcatggattccaatgcccagtctcacaaaatctttatatttgatgcccggccaagtgttaatgctgttgccaacaaggcaaagggtggaggttatgaaagtgaagatgcctatcaaaatgctgaactagttttcctggatatccacaatattcatgttatgagagaatcattacgaaaacttaaggagattgtgtaccccaacattgaggaaactcactggttgtctaacttggaatctactcattggctagaacatattaagcttattcttgcaggggctcttaggattgctgacaaggtagagtcagggaagacgtctgtggtagtgcattgcagtgatggttgggatcgcacagctcagctcacttcccttgccatgctcatgttggatggatactatcgaaccatccgaggatttgaagtccttgtggagaaagaatggctaagttttggacatcgatttcaactaagagttggccatggagataagaaccatgcagatgcagacagatcgcctgtttttcttcaatttattgactgtgtctggcagatgacaagacagtttcctaccgcatttgaattcaatgagtattttctcattaccattttggaccacctatacagctgcttattcggaacattcctctgtaatagtgaacaacagagaggaaaagagaatcttcctaaaaggactgtgtcactgtggtcttacataaacagccagctggaagacttcactaatcctctctatgggagctattccaatcatgtcctttatccagtagccagcatgcgccacctagagctctgggtgggatattacataaggtggaatccacggatgaaaccacaggaacctattcacaacagatacaaagaacttcttgctaaacgagcagagcttcagaaaaaagtagaggaactacagagagagatttctaaccgatcaacctcatcctcagagagagccagctctcctgcacagtgtgtcactcctgtccaaactgttgtataaaggactgtaagatcaggggcatcattgctatacactcttgattacactggcagctctatgagtagaaagtcttcggaatttagaacccatctatgagagaaagttcagtcactttatttattttaaatctctctaggatgagtttagaactgtagcagtgcaggtggcttaagtgaagtaactccatatgtaattacatgattatgatactaatcttttaagtatccaaagaatattaaaatacttcaatcctggattcacagtgggaacaagtttctattaaaaggcaaatgctgttacaaatttttggcatctggtaatattaaaaccattttagaaatacactctgtgctcactgtgcagaggaacatcagttttcaaaccaacactgaaattctgtggcatcacatatattgggccttgatgtcatgacagatcaaaatcatttgatatccctttctccattctaggtttttctttttttcagtaactgatttaccttgatcacttttcaacttccatattcttcatatagtaaaaggcaaagtattgaagatactacggtgtggtagtagttgaaaattattgccgtcattatttacatacttaagacatattagcaagttgatccaaaatgggaggccttatagatgtgcttgggggaaaatgaaggggagaaagtagccatacaggagttcaaagaattccatgcccttcagattagcccaattaccagaaacatcatgaaagatattttaaaaactaattatttactacagtgtatttcacttgtcttgtgtgtctgaacacacagaagctaattagcaagtttttaagaagtatttaaaaatcttactaggattgacattttttctgaattctgtataaatagcttatagtgagaagtactgtgctcaaattttacatttttttcctttgcaaattctgtaatttcactcaacgattaagtctaccaaagaacacactgcatgtaaaagatgtattacaatctcaaagccagtaaaagaaatcttgcttcactgttcacctgctacaagtaagagtttggtgctggtagaaacatttgactctgatgtctattttattctacataagagccatatgtaatgtactgtaacaaaggagcttcttgtccccttggtcttttaattaaaagaaattccaactgacttttaaactttgttcttgtccaaagttgccatttcttttttttccccagaaatatttggaaattattggaggaatatgcaccccagatgaaaatgttcagtttgtacccatttttccttaaccaacacccaaatcaaacaattaaaatatacagtgtttttccactcactaattcactatacagagagtctgaaccttagcctccctcttggtcttgcagtgaggaaatttctattagtatatccaatttagcaaaattggtaccaaaatgatttctttggtaattgtgtgaaatataagctttttaacagggcatttaagtggctagcaaatcagtaattaaaaattaagctttctactccaagtatttcacaaatgcatctgccattttcctcatttaaaccttggttatcttggcctgataccacataaaagaatgtagaatggctgaagagatcaagaatttaaagcttctagtcttaacatacttgcatccacttcaaattcaaatcaaaagccagggaaatctaagtgcaaccctaccacttctctgctgagaaccttccagtggttcccctcaccttctgcagaagtctccaatatggagtacatgcacttgggcatttaatatataccactggtgtgtgtgggagggagggaggaggaatactagccctttttatatatttacacaagcaaaacttttaaatatttgaattgacagttacatgtttcataacttcgtatgtctattggttgtgcaggtgtaattttttccctttttgattagggttacaaaatttagagaccagtatgattaagttgaagctccttagcctccttcgacctagtctctgcatacctcaacttttacgtaccaatgctactctgctgttcacaattgcctcatgtaatctgcagattcctgcctccccactttggttcagtctgtcttgtgcacctggaacaactgttctcccttgtgactaattcctattttctagagtttaggcatcatctcttcctttgggaagttatctgattcacgactgccttctctgacatccccaccttcctctgtgcccccatagcactgtgtataccgctactaccactgcaattcacattatattggaatgaacaattcacatgtctaccacaagtctgtaaacataaccttatttgaaatgaattgcaataaagctctgttacaacgt

SEQ ID NO: 1026 - protein, 643 aa, Homo sapien
METSSSCESLGSQPAAARPPSVDSLSSASTSHSENSVHTKSASVVSSDSISTSADNFSPDLRVLRESNKLAEMEEPPLLPGENIKDMAKDVTYICPFTGAVRGTLTVTNYRLYFKSMERDPPFVLDASLGVINRVEKIGGASSRGENSYGLETVCKDIRNLRFAHKPEGRTRRSIFENLMKYAFPVSNNLPLFAFEYKEVFPENGWKLYDPLLEYRRQGIPNESWRITKINERYELCDTYPALLVVPANIPDEELKRVASFRSRGRIPVLSWIHPESQATITRCSQPMVGVSGKRSKEDEKYLQAIMDSNAQSHKIFIFDARPSVNAVANKAKGGGYESEDAYQNAELVFLDIHNIHVMRESLRKLKEIVYPNIEETHWLSNLESTHWLEHIKLILAGALRIADKVESGKTSVVVHCSDGWDRTAQLTSLAMLMLDGYYRTIRGFEVLVEKEWLSFGHRFQLRVGHGDKNHADADRSPVFLQFIDCVWQMTRQFPTAFEFNEYFLITILDHLYSCLFGTFLCNSEQQRGKENLPKRTVSLWSYINSQLEDFTNPLYGSYSNHVLYPVASMRHLELWVGYYIRWNPRMKPQEPIHNRYKELLAKRAELQKKVEELQREISNRSTSSSERASSPAQCVTPVQTVV

SEQ ID NO: 1027 - DNA, 1894 bp, Homo sapien
tcgcacttggcttcaaagctggctcttggaaattgagcggagagcgacgcggttgttgtagctgccgctgcggccgccgcggaataataagccgggatctaccatacccattgactaactatggaagattataccaaaatagagaaaattggagaaggtacctatggagttgtgtataagggtagacacaaaactacaggtcaagtggtagccatgaaaaaaatcagactagaaagtgaagaggaaggggttcctagtactgcaattcgggaaatttctctattaaaggaacttcgtcatccaaatatagtcagtcttcaggatgtgcttatgcaggattccaggttatatctcatctttgagtttctttccatggatctgaagaaatacttggattctatccctcctggtcagtacatggattcttcacttgttaagagttatttataccaaatcctacaggggattgtgttttgtcactctagaagagttcttcacagagacttaaaacctcaaaatctcttgattgatgacaaaggaacaattaaactggctgattttggccttgccagagcttttggaatacctatcagagtatatacacatgaggtagtaacactctggtacagatctccagaagtattgctggggtcagctcgttactcaactccagttgacatttggagtataggcaccatatttgctgaactagcaactaagaaaccacttttccatggggattcagaaattgatcaactcttcaggattttcagagctttgggcactcccaataatgaagtgtggccagaagtggaatctttacaggactataagaatacatttcccaaatggaaaccaggaagcctagcatcccatgtcaaaaacttggatgaaaatggcttggatttgctctcgaaaatgttaatctatgatccagccaaacgaatttctggcaaaatggcactgaatcatccatattttaatgatttggacaatcagattaagaagatgtagctttctgacaaaaagtttccatatgttatgtcaacagatagttgtgtttttattgttaactcttgtctatttttgtcttatatatatttctttgttatcaaacttcagctgtacttcgtcttctaatttcaaaaatataacttaaaaatgtaaatattctatatgaatttaaatataattctgtaaatgtgtgtaggtctcactgtaacaactatttgttactataataaaactataatattgatgtcaggaatcaggaaaaaatttgagttggcttaaatcatctcagtccttatggcagttttattttcctgtagttggaactactaaaatttaggaaaatgctaagttcaagtttcgtaatgctttgaagtatttttatgctctgaatgtttaaatgttctcatcagtttcttgccatgttgttaactatacaacctggctaaagatgaatatttttctactggtattttaatttttgacctaaatgtttaagcattcggaatgagaaaactatacagatttgagaaatgatgctaaatttataggagttttcagtaacttaaaaagctaacatgagagcatgccaaaatttgctaagtcttacaaagatcaagggctgtccgcaacagggaagaacagttttgaaaatttatgaactatcttatttttaggtaggttttgaaagctttttgtctaagtgaattcttatgccttggtcagagtaataactgaaggaggtgcttatcttggctttcgagtctgagtttaaaactacacattttgacatagtgtttattagcagccatctaaaaaggctctaatgtatatttaactaaaattactagctttgggaattaaactgtttaacaaattagga

SEQ ID NO: 1028 - protein, 337 aa, Homo sapien
ALGFKAGSWKLSGERRGCCSCRCGRRGIISRDLPYPLTNYGRLYQNREKIGEGTYGVVYKGRHKTTGQVVAMKKIRLESEEEGVPSTAIREISLLKELRHPNIVSLQDVLMQDSRLYLIFEFLSMDLKKYLDSIPPGQYMDSSLVKSYLYQILQGIVFCHSRRVLHRDLKPQNLLIDDKGTIKLADFGLARAFGIPIRVYTHEVVTLWYRSPEVLLGSARYSTPVDIWSIGTIFAELATKKPLFHGDSEIDQLFRIFRALGTPNNEVWPEVESLQDYKNTFPKWKPGSLASHVKNLDENGLDLLSKMLIYDPAKRISGKMALNHPYFNDLDNQIKKM

SEQ ID NO: 1029 - DNA, 1235 bp, Homo sapien
ggggggggggggcacttggcttcaaagctggctcttggaaattgagcggagagcgacgcggttgttgtagctgccgctgcggccgccgcggaataataagccgggatctaccatacccattgactaactatggaagattataccaaaatagagaaaattggagaaggtacctatggagttgtgtataagggtagacacaaaactacaggtcaagtggtagccatgaaaaaaatcagactagaaagtgaagaggaaggggttcctagtactgcaattcgggaaatttctctattaaaggaacttcgtcatccaaatatagtcagtcttcaggatgtgcttatgcaggattccaggttatatctcatctttgagtttctttccatggatctgaagaaatacttggattctatccctcctggtcagtacatggattcttcacttgttaagagttatttataccaaatcctacaggggattgtgttttgtcactctagaagagttcttcacagagacttaaaacctcaaaatctcttgattgatgacaaaggaacaattaaactggctgattttggccttgccagagcttttggaatacctatcagagtatatacacatgaggtagtaacactctggtacagatctccagaagtattgctggggtcagctcgttactcaactccagttgacatttggagtataggcaccatatttgctgaactagcaactaagaaaccacttttccatggggattcagaaattgatcaactcttcaggattttcagagctttgggcactcccaataatgaagtgtggccagaagtggaatctttacaggactataagaatacatttcccaaatggaaaccaggaagcctagcatcccatgtcaaaaacttggatgaaaatggcttggatttgctctcgaaaatgttaatctatgatccagccaaacgaatttctggcaaaatggcactgaatcatccatattttaatgatttggacaatcagattaagaagatgtagctttctgacaaaaagtttccatatgttatgtcaacagatagttgtgtttttattgttaactcttgtctatttttgtcttatatatatttctttgttatcaaacttcagctgtacttcgtcttctaatttcaaaaatataacttaaaaatgtaaatattctatatgaatttaaatataattctgtaaatgtgaaaaaaaaaaaaaaaaaaaaa

SEQ ID NO: 1030 - protein, 240 aa, Homo sapien
MEDYTKIEKIGEGTYGVVYKGRHKTTGQVVAMKKIRLESEEEGVPSTAIREISLLKELRHPNIVSLQDVLMQDSRLYLIFEFLSMDLKKYLDSIPPGQYMDSSLVKVVTLWYRSPEVLLGSARYSTPVDIWSIGTIFAELATKKPLFHGDSEIDQLFRIFRALGTPNNEVWPEVESLQDYKNTFPKWKPGSLASHVKNLDENGLDLLSKMLIYDPAKRISGKMALNHPYFNDLDNQIKKM

SEQ ID NO: 1031 - DNA, 3597 bp, Homo sapien
ggcgaatggagcaggggcgcgcagataattaaagatttacacacagctggaagaaatcatagagaagccgggcgtggtggctcatgcctataatcccagcacttttggaggctgaggcgggcagatcacttgagatcaggagttcgagaccagcctggtgccttggcatctcccaatggggtggctttgctctgggctcctgttccctgtgagctgcctggtcctgctgcaggtggcaagctctgggaacatgaaggtcttgcaggagcccacctgcgtctccgactacatgagcatctctacttgcgagtggaagatgaatggtcccaccaattgcagcaccgagctccgcctgttgtaccagctggtttttctgctctccgaagcccacacgtgtatccctgagaacaacggaggcgcggggtgcgtgtgccacctgctcatggatgacgtggtcagtgcggataactatacactggacctgtgggctgggcagcagctgctgtggaagggctccttcaagcccagcgagcatgtgaaacccagggccccaggaaacctgacagttcacaccaatgtctccgacactctgctgctgacctggagcaacccgtatccccctgacaattacctgtataatcatctcacctatgcagtcaacatttggagtgaaaacgacccggcagatttcagaatctataacgtgacctacctagaaccctccctccgcatcgcagccagcaccctgaagtctgggatttcctacagggcacgggtgagggcctgggctcagtgctataacaccacctggagtgagtggagccccagcaccaagtggcacaactcctacagggagcccttcgagcagcacctcctgctgggcgtcagcgtttcctgcattgtcatcctggccgtctgcctgttgtgctatgtcagcatcaccaagattaagaaagaatggtgggatcagattcccaacccagcccgcagccgcctcgtggctataataatccaggatgctcaggggtcacagtgggagaagcggtcccgaggccaggaaccagccaagtgcccacactggaagaattgtcttaccaagctcttgccctgttttctggagcacaacatgaaaagggatgaagatcctcacaaggctgccaaagagatgcctttccagggctctggaaaatcagcatggtgcccagtggagatcagcaagacagtcctctggccagagagcatcagcgtggtgcgatgtgtggagttgtttgaggccccggtggagtgtgaggaggaggaggaggtagaggaagaaaaagggagcttctgtgcatcgcctgagagcagcagggatgacttccaggagggaagggagggcattgtggcccggctaacagagagcctgttcctggacctgctcggagaggagaatgggggcttttgccagcaggacatgggggagtcatgccttcttccaccttcgggaagtacgagtgctcacatgccctgggatgagttcccaagtgcagggcccaaggaggcacctccctggggcaaggagcagcctctccacctggagccaagtcctcctgccagcccgacccagagtccagacaacctgacttgcacagagacgcccctcgtcatcgcaggcaaccctgcttaccgcagcttcagcaactccctgagccagtcaccgtgtcccagagagctgggtccagacccactgctggccagacacctggaggaagtagaacccgagatgccctgtgtcccccagctctctgagccaaccactgtgccccaacctgagccagaaacctgggagcagatcctccgccgaaatgtcctccagcatggggcagctgcagcccccgtctcggcccccaccagtggctatcaggagtttgtacatgcggtggagcagggtggcacccaggccagtgcggtggtgggcttgggtcccccaggagaggctggttacaaggccttctcaagcctgcttgccagcagtgctgtgtccccagagaaatgtgggtttggggctagcagtggggaagaggggtataagcctttccaagacctcattcctggctgccctggggaccctgccccagtccctgtccccttgttcacctttggactggacagggagccacctcgcagtccgcagagctcacatctcccaagcagctccccagagcacctgggtctggagccgggggaaaaggtagaggacatgccaaagcccccacttccccaggagcaggccacagacccccttgtggacagcctgggcagtggcattgtctactcagcccttacctgccacctgtgcggccacctgaaacagtgtcatggccaggaggatggtggccagacccctgtcatggccagtccttgctgtggctgctgctgtggagacaggtcctcgccccctacaacccccctgagggccccagacccctctccaggtggggttccactggaggccagtctgtgtccggcctccctggcaccctcgggcatctcagagaagagtaaatcctcatcatccttccatcctgcccctggcaatgctcagagctcaagccagacccccaaaatcgtgaactttgtctccgtgggacccacatacatgagggtctcttaggtgcatgtcctcttgttgctgagtctgcagatgaggactagggcttatccatgcctgggaaatgccacctcctggaaggcagccaggctggcagatttccaaaagacttgaagaaccatggtatgaaggtgattggccccactgacgttggcctaacactgggctgcagagactggaccccgcccagcattgggctgggctcgccacatcccatgagagtagagggcactgggtcgccgtgccccacggcaggcccctgcaggaaaactgaggcccttgggcacctcgacttgtgaacgagttgttggctgctccctccacagcttctgcagcagactgtccctgttgtaactgcccaaggcatgttttgcccaccagatcatggcccacgtggaggcccacctgcctctgtctcactgaactagaagccgagcctagaaactaacacagccatcaagggaatgacttgggcggccttgggaaatcgatgagaaattgaacttcagggagggtggtcattgcctagaggtgctcattcatttaacagagcttccttaggttgatgctggaggcagaatcccggctgtcaaggggtgttcagttaaggggagcaacagaggacatgaaaaattgctatgactaaagcagggacaatttgctgccaaacacccatgcccagctgtatggctgggggctcctcgtatgcatggaacccccagaataaatatgctcagccaccctgtgggccgggcaatccagacagcaggcataaggcaccagttaccctgcatgttggcccagacctcaggtgctagggaaggcgggaaccttgggttgagtaatgctcgtctgtgtgttttagtttcatcacctgttatctgtgtttgctgaggagagtggaacagaaggggtggagttttgtataaataaagtttctttgtctc

SEQ ID NO: 1032 - protein, 825 aa, Homo sapien
MGWLCSGLLFPVSCLVLLQVASSGNMKVLQEPTCVSDYMSISTCEWKMNGPTNCSTELRLLYQLVFLLSEAHTCIPENNGGAGCVCHLLMDDVVSADNYTLDLWAGQQLLWKGSFKPSEHVKPRAPGNLTVHTNVSDTLLLTWSNPYPPDNYLYNHLTYAVNIWSENDPADFRIYNVTYLEPSLRIAASTLKSGISYRARVRAWAQCYNTTWSEWSPSTKWHNSYREPFEQHLLLGVSVSCIVILAVCLLCYVSITKIKKEWWDQIPNPARSRLVAIIIQDAQGSQWEKRSRGQEPAKCPHWKNCLTKLLPCFLEHNMKRDEDPHKAAKEMPFQGSGKSAWCPVEISKTVLWPESISVVRCVELFEAPVECEEEEEVEEEKGSFCASPESSRDDFQEGREGIVARLTESLFLDLLGEENGGFCQQDMGESCLLPPSGSTSAHMPWDEFPSAGPKEAPPWGKEQPLHLEPSPPASPTQSPDNLTCTETPLVIAGNPAYRSFSNSLSQSPCPRELGPDPLLARHLEEVEPEMPCVPQLSEPTTVPQPEPETWEQILRRNVLQHGAAAAPVSAPTSGYQEFVHAVEQGGTQASAVVGLGPPGEAGYKAFSSLLASSAVSPEKCGFGASSGEEGYKPFQDLIPGCPGDPAPVPVPLFTFGLDREPPRSPQSSHLPSSSPEHLGLEPGEKVEDMPKPPLPQEQATDPLVDSLGSGIVYSALTCHLCGHLKQCHGQEDGGQTPVMASPCCGCCCGDRSSPPTTPLRAPDPSPGGVPLEASLCPASLAPSGISEKSKSSSSFHPAPGNAQSSSQTPKIVNFVSVGPTYMRVS

SEQ ID NO: 1033 - DNA, 1406 bp, Homo sapien
ggcacgagggcgcgcaaggcaccggtggcagcggcgacggcagctgcgacagcaacccctgctgggccgaaactgggcagagcggagcagacgtctgaagcagcgcgagtgaggcgcgagggtagcgcccgcgcccgggaagacccctcggcgcgaaccggcagcccagccccgggtcccggttcccaaggccccgcctctagggcctggggactaatcggattgagagcgcgccggcccgggccgcgaactcgccaattgcggagggcggtggccaccgcccaatccggagcagacaggtgcgaggtccggaaggcggaggccaatcggcggcggttgcgacctgctggggcaggtctcggccaataaggaggctcgagtgacatcttcgcgcaccaatcgggagtgagggagcattcgtgcccgctcgcccttccggccagacctctatttaccaggggcgtgcagcccgcttgccaatcagagcgcggctgagcggccccgcagccaacccccgaggagcggccggctggcgtccgccgcgcccaggagttggggatgtcctacaaacccatcgcccctgctcccagcagcacccctggctccagcacccctgggccgggcaccccggtccctacaggaagcgtcccgtcgccgtcgggctcagtgccaggagccggcgctcctttcagaccgctgtttaacgactttggaccgccttccatgggctacgtgcaggcgatgaagccacccggcgcccagggctcccagagcacctacacggacctgctgtcagtcatagaggagatgggcaaagagatccggcctacctatgctggcagcaagagcgccatggagcgcctgaagagaggtatcatccatgcccgggccctagtcagagagtgcctggcagagacagagcggaacgcccgcacgtaacaggaagcgcctcggcctcagcgtctggacctatccggccactgcagagcacccgcttctccctggccttcatcccgagttgcactaaccatcctgggcttcctgtcctgtgtcccttggtgggtcccctccaggaaccaaggagtggccctccaggtggcagcactaaggacacccccccacaacaagagttagcagcgaggtccccatgagtcccacccatgacctgccgacagtgttgcccaccggaacttttgtggcccctaccgctcagcccttcccagcacttctcccactttgtcccgagcctccttctcccccagcaggggcacaggcctggcacctccctgccttgtgtcctgagccatagtgactcttttatctgtgtgtcttttgctaaatatgccctttttatattaataaaagatgatttggagttgtgctctcaaaaaaaaaaaaaaaaaaaa

SEQ ID NO: 1034 - protein, 126 aa, Homo sapien
MSYKPIAPAPSSTPGSSTPGPGTPVPTGSVPSPSGSVPGAGAPFRPLFNDFGPPSMGYVQAMKPPGAQGSQSTYTDLLSVIEEMGKEIRPTYAGSKSAMERLKRGIIHARALVRECLAETERNART

SEQ ID NO: 1035 - DNA, 1000 bp, Homo sapien
aattcgccagcggcgcggtggacagtcatggcggcccggcgcggggctctcatagtgctggagggcgtggaccgcgccgggaagagcacgcagagccgcaagctggtggaagcgctgtcgcgcgggccaccgcccgaactgctccggttcccggaaagatcaactgaaatcggcaaacttctgagttcctacttgcaaaagaaaagtgacgtggaggatcactcggtgcacctgcttttttctgcaaatcgctgggaacaagtgccgttaattaaggaaaagttgagccagggcgtgaccctcgtcgtggacagatacgcattttctggtgtggccttcaccggtgccaaggagaatttttccctagactggtgtaaacagccagacgtgggccttcccaaacccgacctggtcctgttcctccagttacagctggcggatgctgccaagcggggagcgtttggccatgagcgctatgagaacggggctttccaggagcgggcgctccggtgtttccaccagctcatgaaagacacgactttgaactggaagatggtggatgcttccaaaagactcgaagctgtccatgaggaactccgcgtgctctctgaggacgccatccgcactgccacagagaagccgctgggggagctatggaagtgacccaaggctgcccactggagacgcctctccctgcagtcccccgagaggtgggagactcgcggaaggccccgtccccagcggagtccagaccccacaacttcaggagctctttcccggcagcagagatctgcaggctgcctcttctgccccggagctggggtgcactggggacccccgtggtggggaccttggcagtgtggacatgagcagagcgatggagcagtctcctgccctctcccctgtcctgatggcactctgttgtattttcttactgaagttcagtgataactctgagcagtttcattgtgatcactgtaaatggtaatcagttggaatt

SEQ ID NO: 1036 - protein, 211 aa, Homo sapien
MAARRGALIVLEGVDRAGKSTQSRKLVEALSRGPPPELLRFPERSTEIGKLLSSYLQKKSDVEDHSVHLLFSANRWEQVPLIKEKLSQGVTLVVDRYAFSGVAFTGAKENFSLDWCKQPDVGLPKPDLVLFLQLQLADAAKRGAFGHERYENGAFQERALRCFHQLMKDTTLNWKMVDASKRLEAVHEELRVLSEDAIRTATEKPLGELWK

SEQ ID NO: 1037 - DNA, 2509 bp, Homo sapien
atggcgactgcgacccccgtgccgccgcggatgggcagccgcgctggcggccccaccacgccgctgagccccacgcgcctgtcgcggctccaggagaaggaggagctgcgcgagctcaatgaccggctggcggtgtacatcgacaaggtgcgcagcctggagacggagaacagcgcgctgcagctgcaggtgacggagcgcgaggaggtgcgcggccgtgagctcaccggcctcaaggcgctctacgagaccgagctggccgacgcgcgacgcgcgctcgacgacacggcccgcgagcgcgccaagctgcagatcgagctgggcaagtgcaaggcggaacacgaccagctgctcctcaactatgctaagaaggaatctgatcttaatggcgcccagatcaagcttcgagaatatgaagcagcactgaattcgaaagatgcagctcttgctactgcacttggtgacaaaaaaagtttagagggagatttggaggatctgaaggatcagattgcccagttggaagcctccttagctgcagccaaaaaacagttagcagatgaaactttacttaaagtagatttggagaatcgttgtcagagccttactgaggacttggagtttcgcaaaagcatgtatgaagaggagattaacgagaccagaaggaagcatgaaacgcgcttggtagaggtggattctgggcgtcaaattgagtatgagtacaagctggcgcaagcccttcatgagatgagagagcaacatgatgcccaagtgaggctgtataaggaggagctggagcagacttaccatgccaaacttgagaatgccagactgtcatcagagatgaatacttctactgtcaacagtgccagggaagaactgatggaaagccgcatgagaattgagagcctttcatcccagctttctaatctacagaaagagtctagagcatgtttggaaaggattcaagaattagaggacttgcttgctaaagaaaaagacaactctcgtcgcatgctgacagacaaagagagagagatggcggaaataagggatcaaatgcagcaacagctgaatgactatgaacagcttcttgatgtaaagttagccctggacatggaaatcagtgcttacaggaaactcttagaaggcgaagaagagaggttgaagctgtctccaagcccttcttcccgtgtgacagtatcccgagcatcctcaagtcgtagtgtacgtacaactagaggaaagcggaagagggttgatgtggaagaatcagaggcgagtagtagtgttagcatctctcattccgcctcagccactggaaatgtttgcatcgaagaaattgatgttgatgggaaatttatccgcttgaagaacacttctgaacaggatcaaccaatgggaggctgggagatgatcagaaaaattggagacacatcagtcagttataaatatacctcaagatatgtgctgaaggcaggccagactgttacaatttgggctgcaaacgctggtgtcacagccagccccccaactgacctcatctggaagaaccagaactcgtggggcactggcgaagatgtgaaggttatattgaaaaattctcagggagaggaggttgctcaaagaagtacagtctttaaaacaaccatacctgaagaagaggaggaggaggaagaagcagctggagtggttgttgaggaagaacttttccaccagcagggaaccccaagagcatccaatagaagctgtgcaattatgtaaaattttcaactgtcttcctcaaaataaagaagtatggtaatctttacctgtatacagtgcagagccttctcagaagcacagaatatttttatatttcctttatgtgaatttttaagctgcaaatctgatggccttaatttcctttttgacactgaaagttttgtaaaagaaatcatgtccatacactttgttgcaagatgtgaattattgacactgaacttaataactgtgtactgttcggaaggggttcctcaaattttttgactttttttgtatgtgtgttttttctttttttttaagttcttatgaggaggggagggtaaataaaccactgtgcgtcttggtgtaatttgaagattgccccatctagactagcaatctcttcattattctctgctatatataaaacggtgctgtgagggaggggaaaagcatttttcaatatattgaacttttgtactgaatttttttgtaataagcaatcaaggttataattttttttaaaatagaaattttgtaagaaggcaatattaacctaatcaccatgtaagcactctggatgatggattccacaaaacttggttttatggttacttcttctcttagattcttaattcatgaggagggtgggggagggaggtggagggagggaagggtttctctattaaaatgcattcgttgtgttttttaagatagtgtaacttgcttaaatttcttatgtgacattaacaaataaaaaagctctttt

SEQ ID NO: 1038 - protein, 586 aa, Homo sapien
MATATPVPPRMGSRAGGPTTPLSPTRLSRLQEKEELRELNDRLAVYIDKVRSLETENSALQLQVTEREEVRGRELTGLKALYETELADARRALDDTARERAKLQIELGKCKAEHDQLLLNYAKKESDLNGAQIKLREYEAALNSKDAALATALGDKKSLEGDLEDLKDQIAQLEASLAAAKKQLADETLLKVDLENRCQSLTEDLEFRKSMYEEEINETRRKHETRLVEVDSGRQIEYEYKLAQALHEMREQHDAQVRLYKEELEQTYHAKLENARLSSEMNTSTVNSAREELMESRMRIESLSSQLSNLQKESRACLERIQELEDLLAKEKDNSRRMLTDKEREMAEIRDQMQQQLNDYEQLLDVKLALDMEISAYRKLLEGEEERLKLSPSPSSRVTVSRASSSRSVRTTRGKRKRVDVEESEASSSVSISHSASATGNVCIEEIDVDGKFIRLKNTSEQDQPMGGWEMIRKIGDTSVSYKYTSRYVLKAGQTVTIWAANAGVTASPPTDLIWKNQNSWGTGEDVKVILKNSQGEEVAQRSTVFKTTIPEEEEEEEEAAGVVVEEELFHQQGTPRASNRSCAIM

SEQ ID NO: 1039 - DNA, 2913 bp, Homo sapien
gtcccagctagagctccagcgcccgctcaggccccactcgaccctctcgggcctcggctacttggactgcggcggaatatggcggctccgatgactcccgcggctcggcccgaggactacgaggcggcgctcaatgccgccctggctgacgtgcccgaactggccagactcctggagatcgacccgtacttgaagccctacgccgtggacttccagcgcaggtataagcagtttagccaaattttgaagaacattggagaaaatgaaggtggtattgataagttttccagaggctatgaatcatttggcgtccacagatgtgctgatggtggtttatactccaaagaatgggccccgggagcagaaggagtttttcttactggagattttaatggttggaatccattttcgtacccatacaaaaaactggattatggaaaatgggagctgtatatcccaccaaagcagaataaatctgtactcgtgcctcatggatccaaattaaaggtagttattactagtaaaagcggagagatcttgtatcgtatttcaccgtgggcaaagtatgtggttcgtgaaggtgataatgtgaattatgattggatacactgggatccagaacactcatatgagtttaagcattccagaccaaagaagccacggagtctaagaatttatgaatctcatgtgggaatttcttcccatgaaggaaaagtagcttcttataaacattttacatgcaatgtactaccaagaatcaaaggccttggatacaactgcattcagttgatggcaatcatggagcatgcttactatgccagctttggttaccaaatcacaagcttctttgcagcttccagccgttatggaacacctgaagagctacaagaactggtagacacagctcattccatgggtatcatagtcctcttagatgtggtacacagccatgcttcaaaaaattcagcagatggattgaatatgtttgatgggacagattcctgttattttcattctggacctagagggactcatgatctttgggatagcagattgtttgcctactccagctgggaagttttaagattccttctgtcaaacataagatggtggttggaagaatatcgctttgatggatttcgttttgatggtgttacgtccatgctttatcatcaccatggagtgggtcaaggtttctcaggtgattacagtgaatatttcggactacaagtagatgaagatgccttgacttacctcatgttggcaaatcatttggttcacacgctgtgtcccgattctataacaatagctgaggatgtatcaggaatgccagctctgtgctctccaatttcccagggagggggtggttttgactatcgactagccatggcaattccagataagtggattcagctacttaaagagtttaaagatgaagactggaacatgggcgatatagtatacacgctcacaaacaggcgctaccttgaaaagtgcattgcttatgcagagagccatgatcaggcattggttggggataagtcgctggcattttggttgatggatgccgaaatgtatacaaacatgagtgtcctgactccttttactccagttattgatcgtggaatacagcttcataaaatgattcgactcattacgcatgggcttggtggagaaggctatctcaatttcatgggtaatgaatttgggcatcctgaatggttagacttcccaagaaaaggaaataatgagagttaccattatgccaggcggcagtttcatttaactgacgacgaccttcttcgctacaagttcctaaataattttgacagggatatgaatagattggaagaaagatatggttggcttgcagctccacaggcctacgtgagtgaaaaacatgaaggcaataagatcattgcttttgaaagagcaggtcttcttttcattttcaacttccatccaagcaagagctacactgactaccgagttggaacagcattgccagggaaattcaaaattgtgctagattcagatgcagcggaatatggagggcatcagagactggaccacagcactgactttttttctgaggcttttgaacataatgggcgtccctattctcttttggtgtacattccaagcagagtggccctcatccttcagaatgtggatctgccgaattgaagaggcctgatttcagctccaccagatgcagatttgtgttttgttttcttgttatcactgtcacacagcttataacatgtatgcttttcagaatacagttgtctagccaagccatcaagtgtctgaaattcaatattggtttatgcaaatacagcaaacttttatttaagtagataggagaatatgtttaaaatattaggaatcctagaccatattttcaagtcatcttagcagctaggattctcaaatggaagtgttatatataatatgttaaaaacattttgctttcctggctaattatttgatccttttaaatccaaatttgaatcatttgtcatgtatgattatttctgttaaatgtacacagtatttaagatggatatttggtggctctatttgttctgatatcttttggtctaaattatgaggtaccaagattgtttctttgtttctttttttcaaattgtgtttagaaatactgtaataaatatgcagtagtgatataaagaattatatccaaggtaatataaaagccattacgtatgaactcatccgtgtctcattttgtgttttattttgtgatctcttgtccactaagtatcttgttaaatgccagtatctcagtctttctgaagccctgaaatggtaattgtagcatttcagaaaatgtctttcatttcaatcaataaaaagcttttgtaaaaaaaaaaaaaaaaaaaaaaaaaa

SEQ ID NO: 1040 - protein, 702 aa, Homo sapien
MAAPMTPAARPEDYEAALNAALADVPELARLLEIDPYLKPYAVDFQRRYKQFSQILKNIGENEGGIDKFSRGYESFGVHRCADGGLYSKEWAPGAEGVFLTGDFNGWNPFSYPYKKLDYGKWELYIPPKQNKSVLVPHGSKLKVVITSKSGEILYRISPWAKYVVREGDNVNYDWIHWDPEHSYEFKHSRPKKPRSLRIYESHVGISSHEGKVASYKHFTCNVLPRIKGLGYNCIQLMAIMEHAYYASFGYQITSFFAASSRYGTPEELQELVDTAHSMGIIVLLDVVHSHASKNSADGLNMFDGTDSCYFHSGPRGTHDLWDSRLFAYSSWEVLRFLLSNIRWWLEEYRFDGFRFDGVTSMLYHHHGVGQGFSGDYSEYFGLQVDEDALTYLMLANHLVHTLCPDSITIAEDVSGMPALCSPISQGGGGFDYRLAMAIPDKWIQLLKEFKDEDWNMGDIVYTLTNRRYLEKCIAYAESHDQALVGDKSLAFWLMDAEMYTNMSVLTPFTPVIDRGIQLHKMIRLITHGLGGEGYLNFMGNEFGHPEWLDFPRKGNNESYHYARRQFHLTDDDLLRYKFLNNFDRDMNRLEERYGWLAAPQAYVSEKHEGNKIIAFERAGLLFIFNFHPSKSYTDYRVGTALPGKFKIVLDSDAAEYGGHQRLDHSTDFFSEAFEHNGRPYSLLVYIPSRVALILQNVDLPN

SEQ ID NO: 1041 - DNA, 6708 bp, Homo sapien
agggagggaaggaaggaagagagggaggcgggcaagcaggcgggcgcgggggtcggggactgaggcagtagagggaggcgagagcccggcagccgcttcgcgctgtttgctgcgcgggcttttggagggggcggccgtttagtcggctgaggagaagcggacaccagcggcgttggtgatagcgcctgggggagggggactggagaggcgagaaggggggtcgctgcggtggttctctcgctgtcgctctctctttgcctcgctcccggctcggcgggctcctcccggcgtctctctcgcctccggggtcccgctccccgccccccgcggtatgtcttgatcccgagcagcgggtttcatggggctcctcaggattatgatgccgcccaagttgcagctgctggcggtggtggccttcgcggtggcgatgctcttcttggaaaaccagatccagaaactggaggagtcccgctcgaagctagaaagggctattgcaagacacgaagtccgagaaattgagcagcgacatacaatggatggccctcggcaagatgccactttagatgaggaagaggacatggtgatcatttataacagagttcccaaaacggcaagcacttcatttaccaatatcgcctatgacctgtgtgcaaagaataaataccatgtccttcatatcaacactaccaaaaataatccagtgatgtcattgcaagatcaggtgcgctttgtaaagaatataacttcctggaaagagatgaaaccaggattttatcatggacacgtttcttacttggattttgcaaaatttggtgtgaagaagaaaccaatttacattaatgtcataagggatcctattgagaggctagtttcttattattactttctgagatttggagatgattatagaccagggttacggagacgaaaacaaggagacaaaaagacctttgatgaatgtgtagcagaaggtggctcagactgtgctccagagaagctctggcttcaaatcccgttcttctgtggccatagctccgaatgctggaatgtgggaagcaggtgggctatggatcaagccaagtataacctaattaatgaatattttctggtgggagttactgaagaacttgaagattttatcatgttattggaggcagcattgccccggtttttcaggggtgctactgaactctatcgcacaggaaagaaatctcatcttaggaaaaccacagagaagaaactccccactaaacaaaccattgcaaaactacagcaatctgatatttggaaaatggagaatgagttctatgaatttgcactagagcagttccaattcatcagagcccatgccgttcgagaaaaagatggagacctctacatcctcgcacaaaactttttctatgaaaagatttaccctaagtcgaactgagtataaggtgtgactattagattcttgaactaaaatttgaccctgtcttcacctttgttctcagctccacagtctggattgctgacagtaggtgtatatgacaatttgtattgagccaaattaggaaacagacagtaacgtcaaggaagtagatactggctggcattgtcagtgttctaagtttcaggcatttttatttttcctggctaaacgttggtgaaagttataacctcctgcctgggagaaaatatacatcacctaaaatgaacttatggcaggtctaatcaaaaggctaaatacaatttcagaaaaggttctgatactcttgtttttgataaagcattttttcaactaaccatgaattaagatgagtccatttgcctcttctgccttcactgagggtttgggttatacacctctactgaattgtgttaataactgtttggcagtgtgtactttgtttttgtgagtcatgtctcatgaaatttattggaatgtttaatcatatttgctaagaaatgtttctgctgtagttggatttgcccatatttatgtaggtggttttaattttttaaatggtgattagtgttaaaaatcaatttaaatcatgactaatatggtaaaaagataaagcatcaaagcagtatttctcattcctgcctcctcaatatctaatactgggaagatacttcaaagaatattgagattgtctgaagttttagttaagattttcacacattaatatcaaaaaagtaagtttagtatttgtttctccatgggttatttgtaaagctgtaaactgagatatcggtgactccgtattatgactccattagtgagctgtggtatgggtaggattttcctacttcttctgtacttttacctgtagactatttttactaaggtgctttataatgtgttttaaagcattgcatttacaaaacaaggaaaatgctgtaaatattgcatattttatgtatttggaccaaaaggttacaagtaattagacaaaagtggttttgcaccaattttatgtcaagtaaaaccatcagacctactgttcttgtatttctcatttaactttactgttaagacatcactgaaatgaacttcagtaagctttcaattttgatacacagttcattattcataacttgaggcagtaattacagtggaatgagtactggacaaggagtcaaaaaacttgatttcaggtcctagctctagcacttacagctgtgtgatcttgggcaagtcacttaacctctctttgcctcaatttcctcatcttgaaatgaggataataatacctgctgtacctacctcacagggctgttgtgaggattaaatgagatggcatgtgaaagcactttgaaaattgtaaagcgctatgtaaatgtaaggtattatagaaacatctttaacatatagtttcataccattcattttttaacaaagaaagggaaaagtctgcttgtaagctggttgaaaaagttaatcttgatataaatttgtgtttgataaatatcctctcagtgttttatcttccatgtttcaacaactattgaaatatgaaatgcctgtgaactcttaaagcttcatgagcagctgcttgagttcaggaagttcactgttagaaataggctttgttagctgactagggtcagggaaacttttctcttcaaatttgaaagctgtttctgttttcattttacattattattcagaaatggtagctattctatacctatggtttaagtaaatatttctgaataaggcttcaccatactgtaagcattttaggtagattgccttaaaggttatgggagggcatgagggaacacttcttatgagaaaacatttataaacaaaagaaacatttataaactaaagaaaaactaaaagaatgacagaacaatcatcttagcaccctttcctcacaataatataaaaatattaaaagaacataggcaggctttttttaaatttggcttttttctttccttttttcaaattgacttttataggtatttcctgaaagtgtatacaaattatttcctcgcccaaaataaagcaccacttcaaggtgtggtttgacattacatgctaatgaacaaacccagtatgcaagttattcttgcaccacatgctcaaatcttcttgaggtgcattaactcttttaggtaactagagcagtacttggtgaactagatcaggaggtcagtaaactttctgtggaagggccagagagtaaatattttaggctttgcagcccatacggtctctgtcacagctagtcaaccctgccattttaccacaaaagcagcaatagacattatgtaaacaaatgagcacagttatgttccaataaaactttatttacaaaaacagatgacatcccagatgcagaccatgggcaaccaaccattgcactggctaaatcattatttatggagaaatcctctttgtgtctctactctagatgcctaaaagagtttatatacttctaaaagctcctaacttatatccaaagaattgctttctgattcgtgtagtctctcccacagattcataaacttttatgacttatattgtttccaggtgggcatggtttatttcccagtttaacagttcagaataggggcatttattttatcatattttagggtgggttaggagtatcctttctggagactgagaaaggggtgtatttaattccatcaggtccagtacagtactaggagtcataatactttataatcaattaaataaatagaaccactgagacaataatgtatttttttaaagtggcaaatgtggttttcttttttcagcctttgcgctttttcagtattttgaccatagggagataatttttttataatacaaaagtaaccacttggaattttaaagataatgttatgtgtgtatgtgaaatatatatacatatatatatatatttcctaaaagaagaaaagatacctttctgttcaacttgtatcaactcctcttttctaattgctgtgaaatggcaactgttgataaattattgtgattgttttaaaatctaatgggaagtaaaatatattttgattttacccagcttaatctgtaaagtagcacttaaatatatctgatagcaacacttaagatattgcatggggattactttcctatcatccatatgcatttgtgcaacttcaaacatattgggtgcttctgaattcctgatgattggatttaagctattgaaaattggataatttaaacttaatgatttttataattttctgatcttaaaatttggttaatgcctataatctgttgctttttctcaatatgtgtcctattggaaattcctcaaatcgttggtgccatcagtgatttacaaacaatattttgatattgcagatgacttgcttactgtatttgcattgttagaaaacagtttgtagacaatgattcttttttaataaaatcaaataattctaaaagtgctagagaatttaactaaaagctggttcccaaatgcatagctggcattttaatttaaattcaaatctacatagagaacatccgtgtaaatcatctaactggattttcccattggtcattcccaaacacacctatggtcctagaatccttaagagaagcaccctgtaaccttttatgtggtttgcctttaagaggcccaggtgcttctcctttatgatttgagttggcctcttcataaattagtgctgtttactttcagaggaagcagagaagttgctgttatgtttttgcatccgtttaccctatgcaaagttgctgtatgatgccaactaaactgctctttaggcagccttctgaggagaaaagcaaccctgtttcaaatccactgccaattcagctcctctggagtggagctttctgatttcttggagcaggaattttagagattgaaatgaatgatcatttagtcagatttatcctgtaatttcatgcagctttgtggcctttgcagtactatttataaaatggaccctgatggtgatgaactctttagaacgcattactgttaagcctgtgttgagacattgatgctgtctatctcattttttagacagtttttgtagctttctattgagagtcaggtatgtgagcatctctgaagcagtgttgaatgtaattttcggaaacatggattgtgtattttgacttttattttataaatacacagctcaacagtgccttttttttccctcatagtcctgttggaagatgctcactactttctctcttctctctccctgccctcccccactccattcagttgattcatttatgcaaattctgtttccaacttgaaaccattttgtcacatctgttggagagataatcactccttttccttaacattctgccagctttctgatgttgaagtgtttcagttgactacctgatgcaaaagctataaaataaacagtgggaaggggaaaaattggtgtcctgttttaatattttcttttgtagccttgacactgatggacattttccaagctgactcagtgttcagtgtcaacttaactctcagatagtgttgccatcaagaaagcatgcaacatcattggtttctaatgattttatggcttgtgacaatattttatctggactgacatgcctctgctgcttttgctttgtacttcattgctggtaataaaatttcagatggaaaacttacaaaatatatacttaattagaagaaaaaaatagagaaagggctattagaattaaaaaaatttgaaagtaacttaatctaacatttatggcacagtttggacatatccataattttttttgggaacacacatttctgattttttttttcccccttaaagaagaaagtctcaattccattgattttcaattcttagccactggctcattgctttgagcaatgcttgattgattctatttatattatatgatattgggttgataaaataccagttcaatgatgagttttcttaacagaatttggtttgtacttgcagtggctgaacaaagagcatggcttgagaatcaaagggatctgcatttagcaatgtgatgtcagtaaatggacataacaggattgttgtaaaggttgggcatgatgtatgcaaagtactggccagggtagactaataactgatggcatttatatgctgtgctggaatattgttaccaagctgatgtgccgttctcaccctgcagaatactggttttgtcatttcataaatgatatttttataaat

SEQ ID NO: 1042 - protein, 356 aa, Homo sapien
MGLLRIMMPPKLQLLAVVAFAVAMLFLENQIQKLEESRSKLERAIARHEVREIEQRHTMDGPRQDATLDEEEDMVIIYNRVPKTASTSFTNIAYDLCAKNKYHVLHINTTKNNPVMSLQDQVRFVKNITSWKEMKPGFYHGHVSYLDFAKFGVKKKPIYINVIRDPIERLVSYYYFLRFGDDYRPGLRRRKQGDKKTFDECVAEGGSDCAPEKLWLQIPFFCGHSSECWNVGSRWAMDQAKYNLINEYFLVGVTEELEDFIMLLEAALPRFFRGATELYRTGKKSHLRKTTEKKLPTKQTIAKLQQSDIWKMENEFYEFALEQFQFIRAHAVREKDGDLYILAQNFFYEKIYPKSN

SEQ ID NO: 1043 - DNA, 2764 bp, Homo sapien
ctctaaagcttagagccaagatggcgggatccaggcaaaggggtctccgggccagagttcggccgctgttctgcgccttgctgctgtcactcggtcgcttcgtccggggcgacggcgtgggaggagaccccgcggtcgcgttgccacatcgccgtttcgagtacaaatacagcttcaaggggccgcacctggtgcagagcgacgggaccgtgcccttctgggcccacgcggggaatgctattccaagttcagatcaaattcgagtagcaccatctttaaaaagccaaagaggctcagtgtggacaaagacaaaagcggcctttgagaactgggaagttgaggtgacatttcgagtgactggaagaggtcgaattggagctgatggcctagcaatttggtatgcagaaaatcaaggcttggagggccctgtgtttggatcagctgatctgtggaatggtgttggaatattttttgattcttttgacaatgatggaaagaaaaataatcctgctatagtaattataggcaacaatggacaaatccattatgaccatcaaaatgacggggctagtcaagctttggcaagttgccagagggacttccgcaacaaaccctatcctgtccgagcaaagattacctattaccagaacacactgacagtaatgatcaataatggctttacaccagataaaaatgattatgaattttgtgccaaagtggaaaatatgattatccctgcacaagggcattttggaatatctgctgcaactggaggtcttgcagatgaccatgatgtcctttcttttctgactttccagttgactgaacctggaaaagagccgcccacaccagataaagaaatttcggaaaaggaaaaagaaaagtatcaggaggaatttgagcactttcaacaagaattggataaaaaaaaagaggaattccagaagggccaccccgacctccaagggcagcctgcggaggaaatatttgagagtgtaggagatcgagagctaagacaagtctttgaaggacagaatcgtattcatcttgaaatcaagcagctgaaccggcagttagatatgattcttgatgaacagagaagatatgtctcttccttaacagaggaaatctctaaaagaggagcaggaatgcctgggcagcatgggcagattactcaacaagaactggatactgttgtgaaaactcagcatgagattctgagacaagtaaatgaaatgaaaaattccatgagtgaaaccgtcagactggtcagtggaatgcagcaccctggctctgctggaggcgtctatgagacaacacagcacttcattgacatcaaagagcacctgcacatagtaaagagggacatagataacttagtgcagcgaaatatgccatcaaatgaaaagccgaaatgcccagaactaccaccatttccatcatgtttgtctacggtccacttcattatatttgttgtggtgcaaactgtattattcattggttatatcatgtataggtctcagcaagaagcagctgccaaaaaattcttttgactaccattttcctgtgtacttcatctatttgtgtacaaaatgatgtcgttttgagggaatttaagtatttaaattgcttcatagtctaaattattaattttcttaataaaataactgtttaaacattgatttgcagttaagaataaaccttaaagcaaagacaaccacattttaatttgttcacagtatgtaaatctgtctaaatttcagtgaatttctggtcagtatgatgcagcctctgagcagatattgaccagtaagagggtaaataaagtgggggcaacccctggatatgaatgttaccccctaagtctccaatattgcaggtttccctgtataacgtaaacacacttgccctcatgcctcccagaatatgaggtctaattaagaagtcccatcaggtttattttgtaaccaaagtcttttttagaggtcagacttcctaatcaaaggcctgggcctgcagtcctttcatcttaatgcaacttcctttgaaatcaaagaatattttgtctgagagctttaaggatctggtaatagacttcaaaatgttaagtgaaattttttttcctctatttatcaatgatatatttcacttttaaaggaaattttggaggaaaatatagctgctttttgcctaaaaaaccttgtgggtggaaatattcctctgagaatggcttttataggtattttgcctggtaatgtattcattcatgattgcccatattcttgaatgtttcttcattccaatggggtcaggtcaatattatgaaaataatttttatatttatatttgtaactaagaatttatttctccctttactacacgatgtaaattcacgtcaaattcgatgatctgaggatttaaattcacaaaacctgccactacattctggtttacattagttacttcatgctggctggggttagtgaccatttgcatactcttttaaatcaaggaggctgtagtagaggcagttttaagattcttgaaggcaaaatttgaaaaacagtgaatacttctaattgtttccttttagtgccagaactaagacattgtgaagcacttgttagtaaacttaaccttgaaatgtcagactggaaggagtttttatgtctttgtgcatacttctgggtattacagaaacagtctgtaaataacattttaagatgcaaatttaattctgttcacagctgatttatactgattt

SEQ ID NO: 1044 - protein, 510 aa, Homo sapien
MAGSRQRGLRARVRPLFCALLLSLGRFVRGDGVGGDPAVALPHRRFEYKYSFKGPHLVQSDGTVPFWAHAGNAIPSSDQIRVAPSLKSQRGSVWTKTKAAFENWEVEVTFRVTGRGRIGADGLAIWYAENQGLEGPVFGSADLWNGVGIFFDSFDNDGKKNNPAIVIIGNNGQIHYDHQNDGASQALASCQRDFRNKPYPVRAKITYYQNTLTVMINNGFTPDKNDYEFCAKVENMIIPAQGHFGISAATGGLADDHDVLSFLTFQLTEPGKEPPTPDKEISEKEKEKYQEEFEHFQQELDKKKEEFQKGHPDLQGQPAEEIFESVGDRELRQVFEGQNRIHLEIKQLNRQLDMILDEQRRYVSSLTEEISKRGAGMPGQHGQITQQELDTVVKTQHEILRQVNEMKNSMSETVRLVSGMQHPGSAGGVYETTQHFIDIKEHLHIVKRDIDNLVQRNMPSNEKPKCPELPPFPSCLSTVHFIIFVVVQTVLFIGYIMYRSQQEAAAKKFF

SEQ ID NO: 1045 - DNA, 2325 bp, Homo sapien
gttctgcgttttgccagtcacctctcaactgtgtgccaaagaaggactccatgaaagatgacagaagaagttattgtgatagccaagtgggactacaccgcccagcaggaccaggagctggacatcaagaagaacgagcggctgtggttgctggacgactccaagacgtggtggcgggtgaggaacgcggccaacaggacgggctatgtaccgtccaactacgtggagcggaagaacagcctgaagaagggctccctcgtgaagaacctgaaggacacactaggcctcggcaagacgcgcaggaagaccagcgcgcgggatgcgtcccccacgcccagcacggacgccgagtaccccgccaatggcagcggcgccgaccgcatctacgacctcaacatcccggccttcgtcaagttcgcctatgtggccgagcgggaggatgagttgtccctggtgaaggggtcgcgcgtcaccgtcatggagaagtgcagcgacggttggtggcggggcagctacaacgggcagatcggctggttcccctccaactacgtcttggaggaggtggacgaggcggctgcggagtccccaagcttcctgagcctgcgcaagggcgcctcgctgagcaatggccagggctcccgcgtgctgcatgtggtccagacgctgtaccccttcagctcagtcaccgaggaggagctcaacttcgagaagggggagaccatggaggtgattgagaagccggagaacgaccccgagtggtggaaatgcaaaaatgcccggggccaggtgggcctcgtccccaaaaactacgtggtggtcctcagtgacgggcctgccctgcaccctgcgcacgccccacagataagctacaccgggccctcgtccagcgggcgcttcgcgggcagagagtggtactacgggaacgtgacgcggcaccaggccgagtgcgccctcaacgagcggggcgtggagggcgacttcctcattagggacagcgagtcctcgcccagcgacttctccgtgtcccttaaagcgtcagggaagaacaaacacttcaaggtgcagctcgtggacaatgtctactgcattgggcagcggcgcttccacaccatggacgagctggtggaacactacaaaaaggcgcccatcttcaccagcgagcacggggagaagctctacctcgtcagggccctgcagtgacggcgccccggccccacactcgcctcccgggccccacggtggagctgcccgcccggccttgtggcagaggctcctcccgcggggacggccccgacggcttctctgcgagtctctctttatgttcaggtcgcttggtcggttcgtctcccatttgccatccaggcctcacacccacactcgagcccacccggccggccagctttagaggaggggaggagcagggcgagttcacattattccttttccatcggaagtggcgctcgtgcattcaactcgttcccgctcatggaacccctctttaaaaagacgcagggcacctgtgagcgcaggagcgagcctaaggccacccagcggcagcgcccgtgtcctgggcactcagcgtgctgggcagagcaggtgcgatggccccagtcctagcagccctcgcccatgtcctgtgcccttacatggctcccggactgtgcagggagccgatacgtttgctgatagcaatactggaaccaccgggtgcgatggcagtgaggagactgcccagtgcctttggggctgtgcttgcaataaagaaagaatttcctggaaaggcagtctgcaaaagagggaaccggtgactcagaaagacagatgttttggtaatttaccccaaatgtgccatccacatagtgctttttcctcttgcccttcggcttgtttgaatctcacaattatgtatttaattctcaaagaaatatgtatctgtagccgtttgttgacactaatacagatgattaaggaaaacagctgatctttggggaagggagctaccaacactttatacacacacacacgtgcacacacacacacacacacacactatatatatatatattatttacagggaaatttttcagggtttacaaaagagtatgtgattggtagtaagagacacacagaatgtttatgaagaaattgcattttctttttcctttacatttgaacttctttatagtttaaatataacgtcttgagatggcacattcctacgattgaagaaggggtcttgagatcccctaaacttgcatacccagttttttggatattgtaataaaaaaaagtattatgacaagaaaaaaaaaaaaaaaaaaaaaa

SEQ ID NO: 1046 - protein, 380 aa, Homo sapien
MTEEVIVIAKWDYTAQQDQELDIKKNERLWLLDDSKTWWRVRNAANRTGYVPSNYVERKNSLKKGSLVKNLKDTLGLGKTRRKTSARDASPTPSTDAEYPANGSGADRIYDLNIPAFVKFAYVAEREDELSLVKGSRVTVMEKCSDGWWRGSYNGQIGWFPSNYVLEEVDEAAAESPSFLSLRKGASLSNGQGSRVLHVVQTLYPFSSVTEEELNFEKGETMEVIEKPENDPEWWKCKNARGQVGLVPKNYVVVLSDGPALHPAHAPQISYTGPSSSGRFAGREWYYGNVTRHQAECALNERGVEGDFLIRDSESSPSDFSVSLKASGKNKHFKVQLVDNVYCIGQRRFHTMDELVEHYKKAPIFTSEHGEKLYLVRALQ

SEQ ID NO: 1047 - DNA, 4906 bp, Homo sapien
gttgctgtcgccgttgctgtcggccgaggccaccaagaggcaacgggcggcaggttgcagtggaggggcctccgctcccctcggtggtgtgtgggtcctgggggtgcctgccggcccagccgaggaggcccacgcccaccatggtcccctgctggaaccatggcaacatcacccgctccaaggcggaggagctgctttccaggacaggcaaggacgggagcttcctcgtgcgtgccagcgagtccatctcccgggcatacgcgctctgcgtgctgtatcggaattgcgtttacacttacagaattctgcccaatgaagatgataaattcactgttcaggcatccgaaggcgtctccatgaggttcttcaccaagctggaccagctcatcgagttttacaagaaggaaaacatggggctggtgacccatctgcaataccctgtgccgctggaggaagaggacacaggcgacgaccctgaggaggacacagaaagtgtcgtgtctccacccgagctgcccccaagaaacatcccgctgactgccagctcctgtgaggccaaggaggttcctttttcaaacgagaatccccgagcgaccgagaccagccggccgagcctctccgagacattgttccagcgactgcaaagcatggacaccagtgggcttccagaagagcatcttaaggccatccaagattatttaagcactcagctcgcccaggactctgaatttgtgaagacagggtccagcagtcttcctcacctgaagaaactgaccacactgctctgcaaggagctctatggagaagtcatccggaccctcccatccctggagtctctgcagaggttatttgaccagcagctctccccgggcctccgtccacgtcctcaggttcctggtgaggccaatcccatcaacatggtgtccaagctcagccaactgacaagcctgttgtcgtccattgaagacaaggtcaaggccttgctgcacgagggtcctgagtctccgcaccggccctcccttatccctccagtcacctttgaggtgaaggcagagtctctggggattcctcagaaaatgcagctcaaagtcgacgttgagtctgggaaactgatcattaagaagtccaaggatggttctgaggacaagttctacagccacaagaaaatcctgcagctgattaagtcacagaaatttctgaataagttggtgatcttggtggaaacggagaaggagaagatcctgcggaaggaatatgtttttgctgactccaaaaagagagaaggcttctgccagctcctgcagcagatgaagaacaagcactcagagcagccggagcccgacatgatcaccatcttcatcggcacctggaacatgggtaacgccccccctcccaagaagatcacgtcctggtttctctccaaggggcagggaaagacgcgggacgactctgcggactacatcccccatgacatttacgtgatcggcacccaagaggaccccctgagtgagaaggagtggctggagatcctcaaacactccctgcaagaaatcaccagtgtgacttttaaaacagtcgccatccacacgctctggaacatccgcatcgtggtgctggccaagcctgagcacgagaaccggatcagccacatctgtactgacaacgtgaagacaggcattgcaaacacactggggaacaagggagccgtgggggtgtcgttcatgttcaatggaacctccttagggttcgtcaacagccacttgacttcaggaagtgaaaagaaactcaggcgaaaccaaaactatatgaacattctccggttcctggccctgggcgacaagaagctgagtccctttaacatcactcaccgcttcacgcacctcttctggtttggggatcttaactaccgtgtggatctgcctacctgggaggcagaaaccatcatccagaaaatcaagcagcagcagtacgcagacctcctgtcccacgaccagctgctcacagagaggagggagcagaaggtcttcctacacttcgaggaggaagaaatcacgtttgccccaacctaccgttttgagagactgactcgggacaaatacgcctacaccaagcagaaagcgacagggatgaagtacaacttgccttcctggtgtgaccgagtcctctggaagtcttatcccctggtgcacgtggtgtgtcagtcttatggcagtaccagcgacatcatgacgagtgaccacagccctgtctttgccacatttgaggcaggagtcacttcccagtttgtctccaagaacggtcccgggactgttgacagccaaggacagattgagtttctcaggtgctatgccacattgaagaccaagtcccagaccaaattctacctggagttccactcgagctgcttggagagttttgtcaagagtcaggaaggagaaaatgaagaaggaagtgagggggagctggtggtgaagtttggtgagactcttccaaagctgaagcccattatctctgaccctgagtacctgctagaccagcacatcctcatcagcatcaagtcctctgacagcgacgaatcctatggcgagggctgcattgcccttcggttagaggccacagaaacgcagctgcccatctacacgcctctcacccaccatggggagttgacaggccacttccagggggagatcaagctgcagacctctcagggcaagacgagggagaagctctatgactttgtgaagacggagcgtgatgaatccagtgggccaaagaccctgaagagcctcaccagccacgaccccatgaagcagtgggaagtcactagcagggcccctccgtgcagtggctccagcatcactgaaatcatcaaccccaactacatgggagtggggccctttgggccaccaatgcccctgcacgtgaagcagaccttgtcccctgaccagcagcccacagcctggagctacgaccagccgcccaaggactccccgctggggccctgcaggggagaaagtcctccgacacctcccggccagccgcccatatcacccaagaagtttttaccctcaacagcaaaccggggtctccctcccaggacacaggagtcaaggcccagtgacctggggaagaacgcaggggacacgctgcctcaggaggacctgccgctgacgaagcccgagatgtttgagaaccccctgtatgggtccctgagttccttccctaagcctgctcccaggaaggaccaggaatcccccaaaatgccgcggaaggaacccccgccctgcccggaacccggcatcttgtcgcccagcatcgtgctcaccaaagcccaggaggctgatcgcggcgaggggcccggcaagcaggtgcccgcgccccggctgcgctccttcacgtgctcatcctctgccgagggcagggcggccggcggggacaagagccaagggaagcccaagaccccggtcagctcccaggccccggtgccggccaagaggcccatcaagccttccagatcggaaatcaaccagcagaccccgcccaccccgacgccgcggccgccgctgccagtcaagagcccggcggtgctgcacctccagcactccaagggccgcgactaccgcgacaacaccgagctcccgtatcacggcaagcaccggccggaggaggggccaccagggcctctaggcaggactgccatgcagtgaagccctcagtgagctgccactgagtcgggagcccagaggaacggcgtgaagccactggaccctctcccgggacctcctgctggctcctcctgcccagcttcctatgcaaggctttgtgttttcaggaaagggcctagcttctgtgtggcccacagagttcactgcctgtgagacttagcaccaagtgctgaggctggaagaaaaacgcacaccagacgggcaacaaacagtctgggtccccagctcgctcttggtacttgggaccccagtgccttgttgagggcgccattctgaagaaaggaactgcagcgccgatttgagggtggagatatagataataataatattaataataataatggccacatggatcgaacactcatggtgtgccaagtgctgtgctaagtgctttacgaacattcgtcatatcaggatgacctcgagagctgaggctctagcacctaaaaccacgtgcccaaacccaccagtttaaaacggtgtgtgttcggaggggtgaaagcattaagaagcccagtgccctcctggagtgagacaagggctcggccttaaggagctgaagagtctgggtagcttgtttagggtacaagaagcctgttctgtccagcttcagtgacacaagctgctttagctaaagtcccgcgggttccggcatggctaggctgagagcagggatctacctggcttctcagttctttggttggaaggagcaggaaatcagctcctattctccagtggagagatctggcctcagcttgggctagagatgccaaggcctgtgccaggttccctgtgccctcctcgaggtgggcagccatcaccagccacagttaagccaagccccccaacatgtattccatcgtgctggtagaagagtctttgctgttgctcccgaaagccgtgctctccagcctggctgccagggagggtgggcctcttggttccaggctcttgaaatagtgcagccttttcttcctatctctgtggctttcagctctgcttccttggttattaggagaatagatgggtgatgtctttccttatgttgctttttcaacatagcagaattaatgtagggagctaaatccagtggtgtgtgtgaatgcagaagggaatgcaccccacattcccatgatggaagtctgcgtaaccaataaattgtgcctttctcactcaaaacc

SEQ ID NO: 1048 - protein, 1188 aa, Homo sapien
MVPCWNHGNITRSKAEELLSRTGKDGSFLVRASESISRAYALCVLYRNCVYTYRILPNEDDKFTVQASEGVSMRFFTKLDQLIEFYKKENMGLVTHLQYPVPLEEEDTGDDPEEDTESVVSPPELPPRNIPLTASSCEAKEVPFSNENPRATETSRPSLSETLFQRLQSMDTSGLPEEHLKAIQDYLSTQLAQDSEFVKTGSSSLPHLKKLTTLLCKELYGEVIRTLPSLESLQRLFDQQLSPGLRPRPQVPGEANPINMVSKLSQLTSLLSSIEDKVKALLHEGPESPHRPSLIPPVTFEVKAESLGIPQKMQLKVDVESGKLIIKKSKDGSEDKFYSHKKILQLIKSQKFLNKLVILVETEKEKILRKEYVFADSKKREGFCQLLQQMKNKHSEQPEPDMITIFIGTWNMGNAPPPKKITSWFLSKGQGKTRDDSADYIPHDIYVIGTQEDPLSEKEWLEILKHSLQEITSVTFKTVAIHTLWNIRIVVLAKPEHENRISHICTDNVKTGIANTLGNKGAVGVSFMFNGTSLGFVNSHLTSGSEKKLRRNQNYMNILRFLALGDKKLSPFNITHRFTHLFWFGDLNYRVDLPTWEAETIIQKIKQQQYADLLSHDQLLTERREQKVFLHFEEEEITFAPTYRFERLTRDKYAYTKQKATGMKYNLPSWCDRVLWKSYPLVHVVCQSYGSTSDIMTSDHSPVFATFEAGVTSQFVSKNGPGTVDSQGQIEFLRCYATLKTKSQTKFYLEFHSSCLESFVKSQEGENEEGSEGELVVKFGETLPKLKPIISDPEYLLDQHILISIKSSDSDESYGEGCIALRLEATETQLPIYTPLTHHGELTGHFQGEIKLQTSQGKTREKLYDFVKTERDESSGPKTLKSLTSHDPMKQWEVTSRAPPCSGSSITEIINPNYMGVGPFGPPMPLHVKQTLSPDQQPTAWSYDQPPKDSPLGPCRGESPPTPPGQPPISPKKFLPSTANRGLPPRTQESRPSDLGKNAGDTLPQEDLPLTKPEMFENPLYGSLSSFPKPAPRKDQESPKMPRKEPPPCPEPGILSPSIVLTKAQEADRGEGPGKQVPAPRLRSFTCSSSAEGRAAGGDKSQGKPKTPVSSQAPVPAKRPIKPSRSEINQQTPPTPTPRPPLPVKSPAVLHLQHSKGRDYRDNTELPYHGKHRPEEGPPGPLGRTAMQ

SEQ ID NO: 1049 - DNA, 2997 bp, Homo sapien
caagaggtgcagagcaagcgcatgcgtcgtgacggcccggcttaggcgactctgggcgggtctgggccgctccagtgttttggggcacagaagctgtgggaggagctggaggcttcaccgtggtaaccacagcgccgctgctgccccgccttgcaggcctcaggactgtcatcgcctctgggtgtgagggtactttggccaccgtccccggaaataaccgcgcctgcctctcaagataccccatcctctccacgccgctgccgctgccgccatgcaaggggaggacgccagatacctcaaaaggaaagttaaaggagggaatatagatgtacatccatcagaaaaagcactcattgttcactatgaagtggaagctaccattcttggagaaatgggggaccccatgttgggagaacgaaaagaatgtcaaaaaatcattcgacttaagagtctcaatgccaacacagatataacttccctggcaaggaaggtggttgaagaatgtaaactcattcatccttcaaaactaaatgaggtagaacagctgttgtactatctacagaaccgccgtgattcattgtcaggaaaagagaaaaaagaaaaatcaagcaagcctaaagatccacctccttttgaaggaatggagattgatgaagttgctaacattaatgacatggatgaatatattgagttattatatgaagatattcctgacaaagttcggggttctgctttgatcctgcagcttgctcgaaatcctgataacttggaagaactactattgaatgaaactgcccttggtgcattagcaagggtcctgagagaagactggaagcaaagtgtcgagttagctacaaacataatttacatctttttttgtttctccagcttttctcaatttcatggacttattactcactataaaattggagctctgtgtatgaatattattgatcatgagttaaaaagacatgagctttggcaagaagaactctcaaagaagaagaaagctgttgatgaagaccctgaaaaccaaaccttgagaaaggattatgaaaaaacctttaaaaagtaccaggggcttgtggtaaaacaggaacagctattacgagttgctctttatttgcttctgaatcttgctgaggatactcgtaccgaactgaaaatgaggaacaagaacatagttcacatgttggtgaaagcccttgatcgggacaattttgagctgctaattttagttgtgtcattcttgaagaaactcagcatttttatggagaataaaaatgatatggtggaaatggatattgttgaaaaactggtgaaaatgataccttgtgagcatgaagacctgctgaatatcaccctccgacttttactaaacctatcctttgacacaggactgaggaataagatggtacaagttggactgcttcccaagctcactgcactcctaggcaatgacaactacaaacaaatagcaatgtgtgttctttaccacataagcatggatgaccgctttaaatcaatgtttgcatacactgactgtataccacagttaatgaagatgctgtttgaatgttcagatgaacgaattgacttggaactcatttctttctgcattaatcttgctgctaacaaaagaaatgtacagcttatctgtgaaggaaatgggctgaagatgctcatgaagagggctctgaagtttaaggatccattgctgatgaaaatgattagaaacatttctcagcatgatggaccaactaaaaatctgtttattgattatgttggggaccttgcagcccagatctctaatgatgaagaagaggagtttgtgattgaatgtttgggaactcttgcaaacttgaccattccagacttagactgggaattggttcttaaagaatataagttggttccatacctcaaggataaactaaaaccaggtgctgcagaagatgatcttgttttagaagtggttataatgattggaactgtatccatggatgactcttgtgctgcattgctagccaaatctggcataatccctgcactcattgaattgctaaatgctcaacaagaagatgatgaatttgtgtgtcagataatttatgtcttctaccagatggttttccaccaagccacaagagacgtcataatcaaggaaacacaggctccagcatatctcatagacctaatgcatgataagaataatgaaatccgaaaggtctgtgataatacattagatattatagcggaatatgatgaagaatgggctaagaaaattcagagtgaaaagtttcgctggcataactctcagtggctggagatggtagagagtcgtcagatggatgagagtgagcagtacttgtatggtgatgatcgaattgagccatacattcatgaaggagatattctcgaaagacctgaccttttctacaactcagatggattaattgcctctgaaggagccataagtcccgatttcttcaatgattaccaccttcaaaatggagatgttgttgggcagcattcatttcctggcagccttggaatggatggctttggccaaccagttggcattcttggacgccctgccacagcatatggattccgccctgatgaaccttactactatggctatggatcttgataaagtatctgtttccatgtgtaatctcagcttagaagaaatctgtgtgggttgggttaattttggatctttgcctaataatgcatgttgatgttattgtgggtctgtgtttgtttttatttttatatgttgttagctgcagattaaccccagcccctctgtcttctgttaagtacagttgatactgacattgttcactcatcaaaccacatcttgatgctaagtaacatttcccatgagcctcaaaactgaatgctgaaaagctactagactggaaaacaaacactgcattatgtatgttaagtgactaatttaatttcaattaaaaagcgtaaagtgaaaatgaa

SEQ ID NO: 1050 - protein, 792 aa, Homo sapien
MQGEDARYLKRKVKGGNIDVHPSEKALIVHYEVEATILGEMGDPMLGERKECQKIIRLKSLNANTDITSLARKVVEECKLIHPSKLNEVEQLLYYLQNRRDSLSGKEKKEKSSKPKDPPPFEGMEIDEVANINDMDEYIELLYEDIPDKVRGSALILQLARNPDNLEELLLNETALGALARVLREDWKQSVELATNIIYIFFCFSSFSQFHGLITHYKIGALCMNIIDHELKRHELWQEELSKKKKAVDEDPENQTLRKDYEKTFKKYQGLVVKQEQLLRVALYLLLNLAEDTRTELKMRNKNIVHMLVKALDRDNFELLILVVSFLKKLSIFMENKNDMVEMDIVEKLVKMIPCEHEDLLNITLRLLLNLSFDTGLRNKMVQVGLLPKLTALLGNDNYKQIAMCVLYHISMDDRFKSMFAYTDCIPQLMKMLFECSDERIDLELISFCINLAANKRNVQLICEGNGLKMLMKRALKFKDPLLMKMIRNISQHDGPTKNLFIDYVGDLAAQISNDEEEEFVIECLGTLANLTIPDLDWELVLKEYKLVPYLKDKLKPGAAEDDLVLEVVIMIGTVSMDDSCAALLAKSGIIPALIELLNAQQEDDEFVCQIIYVFYQMVFHQATRDVIIKETQAPAYLIDLMHDKNNEIRKVCDNTLDIIAEYDEEWAKKIQSEKFRWHNSQWLEMVESRQMDESEQYLYGDDRIEPYIHEGDILERPDLFYNSDGLIASEGAISPDFFNDYHLQNGDVVGQHSFPGSLGMDGFGQPVGILGRPATAYGFRPDEPYYYGYGS

SEQ ID NO: 1051 - DNA, 2964 bp, Homo sapien
gagcacagcatggcggtcaaggtgcagacaactaagcgaggggatcctcatgagttaagaaacatatttctacagtatgccagtactgaggttgatggagagcgttatatgaccccagaagactttgttcagcgctatcttggactgtataatgatccaaatagtaacccaaagatcgtgcagctcttggcaggagtagctgatcaaaccaaggatgggttgatctcctatcaagagtttttggcatttgaatctgttttatgtgctccagattccatgttcatagtggctttccagttgtttgacaagagtggaaatggagaggtgacatttgaaaatgtcaaagaaatttttggacagactattattcatcatcatatcccttttaactgggattgtgaatttatccgactgcattttgggcataaccggaagaagcatcttaactacacagaattcacgcagtttctccaggagctgcaattggaacatgcaagacaagcctttgcactcaaagacaaaagcaaaagtggcatgatttctggtctggatttcagtgacatcatggttaccattagatctcacatgcttactccttttgtggaggagaacttagtttcagcagctggaggaagtatctcacaccaggttagcttctcctacttcaatgcatttaactcgttactgaataacatggagcttgttcgtaagatatatagcactctagctggcacaaggaaagatgttgaagtcacaaaggaggaatttgcccagagtgccatacgctatggacaagtcacaccactagaaattgatattctatatcagcttgcagacttatataatgcttcagggcgcttgactttggcagatattgagagaatagccccattggctgagggggccttaccttacaacctggcagaacttcagagacagcagtctcctgggttaggcaggcctatctggctccagattgccgagtctgcttacagattcactctgggctcagttgctggagctgtgggagccactgcagtgtatcctatagatctggtgaagacccgaatgcaaaaccagcgtggctctggctctgttgttggggagctaatgtacaaaaacagctttgactgttttaagaaagtcttgcgttatgagggcttctttggactctacaggggtctgataccacaacttataggggttgctccagaaaaggccattaaactgactgttaatgattttgttcgggacaaatttaccagaagagatggctctgttccacttccagcagaagttcttgctggaggctgtgctggaggctctcaggtcatttttaccaacccattggagatagtgaagattcgtctgcaagtagctggagagatcaccacgggacccagagtcagcgccctgaatgtgctccgggacttgggaatttttggtctgtataagggtgccaaagcgtgtttcctccgagacattcccttctctgcaatctattttcctgtttatgctcattgcaaactacttctggctgatgaaaatggacacgtgggaggtttaaatcttcttgcagctggagccatggcaggtgtcccagctgcatctctggtgacccctgctgatgtcatcaagacaagactgcaggtggctgcccgcgctggccagacgacatacagtggtgtcatcgactgtttcaggaagattctccgggaagaagggccctcagcattttggaaagggactgcagctcgagtgtttcgatcctctccccagtttggtgttaccttggtcacttatgaacttctccagcggtggttttacattgattttggaggcctcaaacccgctggttcagaaccaacacctaagtcacgcattgcagaccttcctcctgccaaccctgatcacatcggtggatacagactcgccacagccacgtttgcaggcatcgaaaacaaatttggcctttatctcccgaaatttaagtctcctagtgttgctgtggttcagccaaaggcagcagtggcagccactcagtgatgagacaactgttgagtgtggcaaaatggcgccttgaagaaagaggcctaggagagcagccctgtaatgtatccagtcagctgcatggtactgactgagctgaggagtcaaactcttctttctgtatgacatatacatatacttgtttataaaataatcatttgcccagggaaaaaaccacaacgctgtttcaagctttagtcttatgtgttgaaatgtttttgtaagccttggcatgaattagtgttctagactctgctttgcacagcttgcacttacagtgattgtacatattgtacatctttgtacagagacatcttggcacctcatcccaacaaatcacatttgtagaaatgtaatgcggttctgagtggcttgaaatgtacagaatgttttgaaagtgttttattaagaatcacacaaaaataaatgtattaaaattaaattcattctcttattggtgacttatggaaataaagcatcaatattggatgtatttaattcctagtttgttttccattctggaataaaaaggtatttgctgataaaaggcataacgagacatagtgctgctaccactgaataagtgatactttggaaagatgcatgccagtggatgccagaggaccaggctaatgacttgtgtgtgctgatgtgtttccatttgtatttaatgtgtgtagaccctcctctgttcatcaatcaaaaagcatttcctaggcagctcctcgcctgtcagtgtgcatatggaaacagggacatctccatcattactggcttagttttgctttcctttgacacagtaaggcaaaggccaagctttcaaaagagtaaaggatactttcacaatttcccttcatatggatatgattccagtcaaaaataaaatgcacaccaaaatgtaaaaaaaaaaaaaaa

SEQ ID NO: 1052 - protein, 678 aa, Homo sapien
MAVKVQTTKRGDPHELRNIFLQYASTEVDGERYMTPEDFVQRYLGLYNDPNSNPKIVQLLAGVADQTKDGLISYQEFLAFESVLCAPDSMFIVAFQLFDKSGNGEVTFENVKEIFGQTIIHHHIPFNWDCEFIRLHFGHNRKKHLNYTEFTQFLQELQLEHARQAFALKDKSKSGMISGLDFSDIMVTIRSHMLTPFVEENLVSAAGGSISHQVSFSYFNAFNSLLNNMELVRKIYSTLAGTRKDVEVTKEEFAQSAIRYGQVTPLEIDILYQLADLYNASGRLTLADIERIAPLAEGALPYNLAELQRQQSPGLGRPIWLQIAESAYRFTLGSVAGAVGATAVYPIDLVKTRMQNQRGSGSVVGELMYKNSFDCFKKVLRYEGFFGLYRGLIPQLIGVAPEKAIKLTVNDFVRDKFTRRDGSVPLPAEVLAGGCAGGSQVIFTNPLEIVKIRLQVAGEITTGPRVSALNVLRDLGIFGLYKGAKACFLRDIPFSAIYFPVYAHCKLLLADENGHVGGLNLLAAGAMAGVPAASLVTPADVIKTRLQVAARAGQTTYSGVIDCFRKILREEGPSAFWKGTAARVFRSSPQFGVTLVTYELLQRWFYIDFGGLKPAGSEPTPKSRIADLPPANPDHIGGYRLATATFAGIENKFGLYLPKFKSPSVAVVQPKAAVAATQ

SEQ ID NO: 1053 - DNA, 3246 bp, Homo sapien
cgcaccataccggcgcgggcacctggggagaaatggatggagaagggacctggctggaaagctttgccccgctgctctgctccgcccataagaggacccctgaaatgtcccgtgcagtttgttcaagtcccctgtgtgatgaaatgtgcctctcgccttacccgtgtgagaatacctgtggtgtggcagcgagtattttggtatttgacctgtccaaagacgacttgatacctctataatgtaacagaaaaggtcagaaaatattaagcaagtagaagtgtggagcatattaagcaagatgaacatctcgggaagcagctgtggaagccctaactctgcagatacatctagtgactttaaggacctttggacaaaactaaaagaatgtcatgatagagaagtacaaggtttacaagtaaaagtaaccaagctaaaacaggaacgaatcttagatgcacaaagactagaagaattcttcaccaaaaatcaacagctgagggaacagcagaaagtccttcatgaaaccattaaagttttagaagatcggttaagagcaggcttatgtgatcgctgtgcagtaactgaagaacatatgcggaaaaaacagcaagagtttgaaaatatccggcagcagaatcttaaacttattacagaacttatgaatgaaaggaatactctacaggaagaaaataaaaagctttctgaacaactccagcagaaaattgagaatgatcaacagcatcaagcagctgagcttgaatgtgaggaagacgttattccagattcaccgataacagccttctcattttctggcgttaaccggctacgaagaaaggagaacccccatgtccgatacatagaacaaacacatactaaattggagcactctgtgtgtgcaaatgaaatgagaaaagtttccaagtcttcaactcatccacaacataatcctaatgaaaatgaaattctagtagctgacacttatgaccaaagtcaatctccaatggccaaagcacatggaacaagcagctatacccctgataagtcatcttttaatttagctacagttgttgctgaaacacttggacttggtgttcaagaagaatctgaaactcaaggtcccatgagcccccttggtgatgagctctaccactgtctggaaggaaatcacaagaaacagccttttgaggaatctacaagaaatactgaagatagtttaagattttcagattctacttcaaagactcctcctcaagaagaattacctactcgagtgtcatctcctgtatttggagctacctctagtatcaaaagtggtttagatttgaatacaagtttgtccccttctcttttacagcctgggaaaaaaaaacatctgaaaacactcccttttagcaacacttgtatatctagattagaaaaaactagatcaaaatctgaagatagtgcccttttcacacatcacagtcttgggtctgaagtgaacaagatcattatccagtcatctaataaacagatacttataaataaaaatataagtgaatccctaggtgaacagaataggactgagtacggtaaagattctaacactgataaacatttggagcccctgaaatcattgggaggccgaacatccaaaaggaagaaaactgaggaagaaagtgaacatgaagtaagctgcccccaagcttcttttgataaagaaaatgctttcccttttccaatggataatcagttttccatgaatggagactgtgtgatggataaacctctggatctgtctgatcgattttcagctattcagcgtcaagagaaaagccaaggaagtgagacttctaaaaacaaatttaggcaagtgactctttatgaggctttgaagaccattccaaagggcttttcctcaagccgtaaggcctcagatggcaactgcacgttgcccaaagattccccaggggagccctgttcacaggaatgcatcatccttcagcccttgaataaatgctctccagacaataaaccatcattacaaataaaagaagaaaatgctgtctttaaaattcctctacgtccacgtgaaagtttggagactgagaatgttttagatgacataaagagtgctggttctcatgagccaataaaaatacaaaccaggtcagaccatggaggatgtgaacttgcatcagttcttcagttaaatccatgtagaactggtaaaataaagtctctacaaaacaaccaagatgtatcctttgaaaatatccagtggagtatagatccgggagcagacctttctcagtataaaatggatgttactgtaatagatacaaaggatggcagtcagtcaaaattaggaggagagacagtggacatggactgtacattggttagtgaaaccgttctcttaaaaatgaagaagcaagagcagaagggagaaaaaagttcaaatgaagaaagaaaaatgaatgatagcttggaagatatgtttgatcggacaacacatgaagagtatgaatcctgtttggcagacagtttctcccaagcagcagatgaagaggaggaattgtctactgccacaaagaaactacacactcatggtgataaacaagacaaagtcaagcagaaagcgtttgtggagccgtattttaaaggtgatgaaagagagactagcttgcaaaattttcctcatattgaggtggttcggaaaaaagaggagagaagaaaactgcttgggcacacgtgtaaggaatgtgaaatttattatgcagatatgccagcagaagaaagagaaaagaaattggcttcctgctcaagacaccgattccgctacattccacccaacacaccagagaatttttgggaagttggttttccttccactcagacttgtatggaaagaggttatattaaggaagatcttgatccttgtcctcgtccaaaaagacgtcagccttacaacgcaatattttctccaaaaggcaaggagcagaagacatagacgttgaaacagaaacagaaggatgaaggacagttttttccttcttagttatttatagttaaagttggtactaaacattgatttttttgatcttctgtaaatggatttataaatcagttttctattgaaaatgtttgtgatattttgcttttgcacctttaaaacaataaggcgctttcattttgcactctaacttaagagtttttactttatgtagtgatacctaatacaattttgaaaatacaaaaaaaaaa

SEQ ID NO: 1054 - protein, 897 aa, Homo sapien
MNISGSSCGSPNSADTSSDFKDLWTKLKECHDREVQGLQVKVTKLKQERILDAQRLEEFFTKNQQLREQQKVLHETIKVLEDRLRAGLCDRCAVTEEHMRKKQQEFENIRQQNLKLITELMNERNTLQEENKKLSEQLQQKIENDQQHQAAELECEEDVIPDSPITAFSFSGVNRLRRKENPHVRYIEQTHTKLEHSVCANEMRKVSKSSTHPQHNPNENEILVADTYDQSQSPMAKAHGTSSYTPDKSSFNLATVVAETLGLGVQEESETQGPMSPLGDELYHCLEGNHKKQPFEESTRNTEDSLRFSDSTSKTPPQEELPTRVSSPVFGATSSIKSGLDLNTSLSPSLLQPGKKKHLKTLPFSNTCISRLEKTRSKSEDSALFTHHSLGSEVNKIIIQSSNKQILINKNISESLGEQNRTEYGKDSNTDKHLEPLKSLGGRTSKRKKTEEESEHEVSCPQASFDKENAFPFPMDNQFSMNGDCVMDKPLDLSDRFSAIQRQEKSQGSETSKNKFRQVTLYEALKTIPKGFSSSRKASDGNCTLPKDSPGEPCSQECIILQPLNKCSPDNKPSLQIKEENAVFKIPLRPRESLETENVLDDIKSAGSHEPIKIQTRSDHGGCELASVLQLNPCRTGKIKSLQNNQDVSFENIQWSIDPGADLSQYKMDVTVIDTKDGSQSKLGGETVDMDCTLVSETVLLKMKKQEQKGEKSSNEERKMNDSLEDMFDRTTHEEYESCLADSFSQAADEEEELSTATKKLHTHGDKQDKVKQKAFVEPYFKGDERETSLQNFPHIEVVRKKEERRKLLGHTCKECEIYYADMPAEEREKKLASCSRHRFRYIPPNTPENFWEVGFPSTQTCMERGYIKEDLDPCPRPKRRQPYNAIFSPKGKEQKT

SEQ ID NO: 1055 - DNA, 2648 bp, Homo sapien
caccgcgggaaaccaaaatggcgaggggctgtattgaagtgggctgtgtttgaggccggtgtaagaacgctcattctacccccaacccttgtctccaaggacctcggtttgtgcgtgcatatgtgccgggtacccggtggggcgggtgcccagtaagtgctcggactcgcaggggaagcgcccacggggacggattggttgttttttcctgtatgaagcggttggcaccactgaagtgaccgaatgagagactctacaggggcaggtaattcactggtccacaagcggtctcctttacgtcgaaaccaaaagaccccaacatccttgaccaagctgtctttacaggatggacataaagccaaaaagccagcatgtaaatttgaagagggtcaggatgtcctagctagatggtcagatggcttgttttatcttggcactatcaaaaagataaacatattgaaacagagctgcttcatcatatttgaagacagttctaaatcctgggttctctggaaggacattcaaacaggagccactggaagtggggaaatggtctgtacaatatgtcaagaagagtattcagaagctcccaatgaaatggttatatgtgacaagtgtggccaaggatatcatcagttgtgtcacacacctcatattgattccagtgtgattgattcagatgaaaaatggctctgtcggcagtgtgtttttgcaacaacaacaaagaggggtggtgcacttaagaaaggaccaaatgccaaagcattgcaagtcatgaagcagacattaccctatagtgtggcagaccttgaatgggatgcaggtcataaaaccaatgtccagcagtgttactgctattgtggaggccctggagactggtatttgaagatgctacagtgctgcaaatgtaagcagtggtttcatgaggcttgtgtgcaatgccttcaaaagccaatgctatttggagacagattttatacgtttatatgctctgtctgcagttctggaccagaatacctcaaacgtctaccattacagtgggtagatatagcacacctatgcctttacaacctaagtgttattcataagaagaaatactttgattctgaacttgagcttatgacatacattaatgaaaactgggatagattgcaccctggagagctggcagacacaccgaaatctgaaagatatgagcatgttctggaggcattaaatgattacaagaccatgtttatgtctgggaaagaaataaagaagaagaagcatttgtttgggttgcgaattcgtgttcctcctgtgccaccaaatgtggctttcaaagcagagaaagaacctgaaggaacatctcatgaatttaaaattaaaggcagaaaggcatccaaacctatatctgattcaagggaagtaagcaatggcatagaaaaaaaaggaaagaaaaaatctgtaggtcgtccacctggcccatatacaagaaaaatgattcaaaaaactgctgagccacttttggataaggaatcaatttcagagaatcctactttggatttaccttgttctatagggagaactgagggaactgcacattcatccaatacctcagatgtggatttcacgggtgcttccagtgcaaaagaaactacctcgtctagcatttccaggcattatggattatctgactccagaaaaagaacgcgtacaggaagatcttggcctgctgcaataccacatttgaggagaagaagaggtcgtcttccaagaagagcactccagactcagaactcagaaattgtaaaagatgatgaaggcaaagaagattatcagtttgatgaactcaacacagagattctgaataacttagcagatcaggagttacaactcaatcatctaaagaactccattaccagttattttggtgctgcaggtagaatagcatgtggcgaaaaataccgagttttggcacgtcgggtgacacttgatggaaaggtgcagtatcttgtggaatgggaaggagcaactgcatcctgactgtaggactgaacattatgttcactgcactctgattttctgtaggtacagttcaaagccctaaagggagtctggcttttactatctttcttaaaaaaaaaaaaaaagagtcaaaaaaattcaaaaaaggggatgatactagccttaacatgtacctgtcaatgttatggatattgtcataaaaaggtatcttttaaaaatcagaacagagacttaattttttaaatcttaagatttgtagaatgtttctaggataggatattaaaaatgattgaaacccatgcatggtgttagacaatttttctaattattccattgagtcagttttttgtgattagtgattatcagagcaaacatcatgtagatagcacaagtatttggagaaacgttgtttgttttgattagtgattatcagagcaaacatcatgtagatagcacaagtatttggagaaacgttgtttgttttgttaccaaaatgttggaaaaatttatttcaataccttttagatttcataaagtgcagtgtatataatgcctactgaaagactgtaaaatattgaaattttctttcaagcaaagtgtaaaaaaatatattgagcctgtaaattgcaaaaaaaaaaaaa

SEQ ID NO: 1056 - protein, 593 aa, Homo sapien
MRDSTGAGNSLVHKRSPLRRNQKTPTSLTKLSLQDGHKAKKPACKFEEGQDVLARWSDGLFYLGTIKKINILKQSCFIIFEDSSKSWVLWKDIQTGATGSGEMVCTICQEEYSEAPNEMVICDKCGQGYHQLCHTPHIDSSVIDSDEKWLCRQCVFATTTKRGGALKKGPNAKALQVMKQTLPYSVADLEWDAGHKTNVQQCYCYCGGPGDWYLKMLQCCKCKQWFHEACVQCLQKPMLFGDRFYTFICSVCSSGPEYLKRLPLQWVDIAHLCLYNLSVIHKKKYFDSELELMTYINENWDRLHPGELADTPKSERYEHVLEALNDYKTMFMSGKEIKKKKHLFGLRIRVPPVPPNVAFKAEKEPEGTSHEFKIKGRKASKPISDSREVSNGIEKKGKKKSVGRPPGPYTRKMIQKTAEPLLDKESISENPTLDLPCSIGRTEGTAHSSNTSDVDFTGASSAKETTSSSISRHYGLSDSRKRTRTGRSWPAAIPHLRRRRGRLPRRALQTQNSEIVKDDEGKEDYQFDELNTEILNNLADQELQLNHLKNSITSYFGAAGRIACGEKYRVLARRVTLDGKVQYLVEWEGATAS

SEQ ID NO: 1057 - DNA, 2813 bp, Homo sapien
gcgagggccgctggggccgcgaagtggggcggccgggtgggctacgagccgggtctgggctgaggggcgcggcttcgcggtggaccccagcccggcaacggaaggcgagctctcctccaccgtccaaagtaaactttgccgctccttccgcggcgctcccgagtcctcgccgccgccgggccgccgcagtccgcgaagagccgtcctgcgtcagggcctccttccctgccccggcgcggggccactgcgccatggacgccacagcactggagcgggacgctgtgcagttcgcccgtctggcggttcagcgcgaccacgaaggccgctactccgaggcggtgttttattacaaggaagctgcacaagccttaatttatgctgagatggcaggatcaagcctagaaaatattcaagaaaaaataactgagtatctggaaagagttcaagctctacattcagcagttcagtcaaagagtgctgatcctttgaagtcaaaacatcagttggacttagagcgtgctcatttccttgttacacaagcttttgatgaagatgaaaaagagaatgttgaagatgctatagaattgtacacagaagctgtggatctctgtctgaaaacatcttatgaaactgctgataaagtcctgcaaaataaactgaaacagttggctcgacaggcactagacagagcagaagcgctgagtgagcctttgaccaagccagttggcaaaatcagttcaacaagtgttaagccaaagccacctccagtgagagcacattttccactgggcgctaatcccttccttgaaagacctcagtcatttataagtcctcagtcatgtgatgcacaaggacagagatacacagcagaagaaatagaagtactcaggacaacatcaaaaataaatggtatagaatatgttcctttcatgaatgttgacctgagagaacgttttgcctatccaatgcctttctgtgatagatggggcaagctaccattatcacctaaacaaaaaactacattttccaagtgggtacgaccagaagacctcaccaacaatcctacaatgatatatactgtgtccagttttagcataaagcagacaatagtatcggattgctcctttgtggcatcactggccatcagtgcagcttatgaaagacgttttaataagaagttaattaccggcataatttaccctcaaaacaaggatggtgaaccagaatacaatccatgtgggaagtatatggtaaaacttcacctcaatggtgtcccaagaaaggtgataattgatgaccagttacctgttgatcacaagggagaattgctctgttcttattccaacaacaaaagtgaattatgggtttctctcatagaaaaagcatacatgaaagtcatgggaggatatgattttccaggatccaactccaatattgatcttcatgcactgactggctggataccagaaagaattgctatgcattcagatagccaaactttcagtaaggataattctttcagaatgctttatcaaagatttcacaagggagatgtcctcatcactgcgtcaactggaatgatgacagaagctgaaggagagaagtggggtctggttcccacacacgcatatgctgttttggatattagagagttcaaggggctgcgatttatccagttgaaaaatccttggagtcatttacgttggaaaggaagatacagtgaaaatgatgtaaaaaactggactccagagttgcaaaagtatttaaactttgatccccgaacagctcagaaaatagacaacggaatattttggatttcctgggatgatctctgccagtattatgatgtgatttatttgagttggaatccaggtctttttaaagaatcaacatgtattcacagtacttgggatgctaagcaaggacctgtgaaagatgcctatagcctggccaacaacccccagtacaaactggaggtgcagtgtccacaggggggtgctgcagtttgggttttgcttagtagacacataacagacaaggatgattttgcgaataatcgagaatttatcacaatggttgtatacaagactgatgggaaaaaagtttattacccagctgacccacctccatacattgatggaattcgaattaacagccctcattatttgactaagataaagctgaccacacctggcacccatacctttacattagtggtttctcaatatgaaaaacagaacacaatccattacacggttcgggtatattcagcatgcagctttactttttcaaagattccttcaccatacaccttatcaaaacggattaatggaaagtggagtggtcagagtgctggaggatgtggaaatttccaagagactcacaaaaataaccccatctaccaattccatatagaaaagactgggccgttactgattgagctacgaggaccaaggcaatatagcgttggatttgaggttgtaacagtttctactctaggagatcctggtccccatggctttctgaggaaatctagtggtgactataggtgtgggttttgctacctggaattagaaaatataccttctgggatcttcaatatcattcctagtacctttttgcctaaacaagaaggaccttttttcttggactttaatagtattatccccatcaagatcacacaacttcagtgatggagaaatctcaagttactggcttttatacttaccaaacatcagttcttcaaataaggacgcaaatcttcaggacagtaagcagaacaatcagaatggaattaaatctctaaaaacgtg

SEQ ID NO: 1058 - protein, 813 aa, Homo sapien
MDATALERDAVQFARLAVQRDHEGRYSEAVFYYKEAAQALIYAEMAGSSLENIQEKITEYLERVQALHSAVQSKSADPLKSKHQLDLERAHFLVTQAFDEDEKENVEDAIELYTEAVDLCLKTSYETADKVLQNKLKQLARQALDRAEALSEPLTKPVGKISSTSVKPKPPPVRAHFPLGANPFLERPQSFISPQSCDAQGQRYTAEEIEVLRTTSKINGIEYVPFMNVDLRERFAYPMPFCDRWGKLPLSPKQKTTFSKWVRPEDLTNNPTMIYTVSSFSIKQTIVSDCSFVASLAISAAYERRFNKKLITGIIYPQNKDGEPEYNPCGKYMVKLHLNGVPRKVIIDDQLPVDHKGELLCSYSNNKSELWVSLIEKAYMKVMGGYDFPGSNSNIDLHALTGWIPERIAMHSDSQTFSKDNSFRMLYQRFHKGDVLITASTGMMTEAEGEKWGLVPTHAYAVLDIREFKGLRFIQLKNPWSHLRWKGRYSENDVKNWTPELQKYLNFDPRTAQKIDNGIFWISWDDLCQYYDVIYLSWNPGLFKESTCIHSTWDAKQGPVKDAYSLANNPQYKLEVQCPQGGAAVWVLLSRHITDKDDFANNREFITMVVYKTDGKKVYYPADPPPYIDGIRINSPHYLTKIKLTTPGTHTFTLVVSQYEKQNTIHYTVRVYSACSFTFSKIPSPYTLSKRINGKWSGQSAGGCGNFQETHKNNPIYQFHIEKTGPLLIELRGPRQYSVGFEVVTVSTLGDPGPHGFLRKSSGDYRCGFCYLELENIPSGIFNIIPSTFLPKQEGPFFLDFNSIIPIKITQLQ

SEQ ID NO: 1059 - DNA, 2667 bp, Homo sapien
cggacgcgtgggtccggtcgcgtccgacacccggtgggactcagaaggcagtggagccccggcggcggcggcggcggcgcgcgggggcgacgcgcgggaacaacgcgagtcggcgcgcgggacgaagaataatcatgggccagactgggaagaaatctgagaagggaccagtttgttggcggaagcgtgtaaaatcagagtacatgcgactgagacagctcaagaggttcagacgagctgatgaagtaaagagtatgtttagttccaatcgtcagaaaattttggaaagaacggaaatcttaaaccaagaatggaaacagcgaaggatacagcctgtgcacatcctgacttctgtgagctcattgcgcgggactagggagtgttcggtgaccagtgacttggattttccaacacaagtcatcccattaaagactctgaatgcagttgcttcagtacccataatgtattcttggtctcccctacagcagaattttatggtggaagatgaaactgttttacataacattccttatatgggagatgaagttttagatcaggatggtactttcattgaagaactaataaaaaattatgatgggaaagtacacggggatagagaatgtgggtttataaatgatgaaatttttgtggagttggtgaatgcccttggtcaatataatgatgatgacgatgatgatgatggagacgatcctgaagaaagagaagaaaagcagaaagatctggaggatcaccgagatgataaagaaagccgcccacctcggaaatttccttctgataaaatttttgaagccatttcctcaatgtttccagataagggcacagcagaagaactaaaggaaaaatataaagaactcaccgaacagcagctcccaggcgcacttcctcctgaatgtacccccaacatagatggaccaaatgctaaatctgttcagagagagcaaagcttacactcctttcatacgcttttctgtaggcgatgttttaaatatgactgcttcctacatcgtaagtgcaattattcttttcatgcaacacccaacacttataagcggaagaacacagaaacagctctagacaacaaaccttgtggaccacagtgttaccagcatttggagggagcaaaggagtttgctgctgctctcaccgctgagcggataaagaccccaccaaaacgtccaggaggccgcagaagaggacggcttcccaataacagtagcaggcccagcacccccaccattaatgtgctggaatcaaaggatacagacagtgatagggaagcagggactgaaacggggggagagaacaatgataaagaagaagaagagaagaaagatgaaacttcgagctcctctgaagcaaattctcggtgtcaaacaccaataaagatgaagccaaatattgaacctcctgagaatgtggagtggagtggtgctgaagcctcaatgtttagagtcctcattggcacttactatgacaatttctgtgccattgctaggttaattgggaccaaaacatgtagacaggtgtatgagtttagagtcaaagaatctagcatcatagctccagctcccgctgaggatgtggatactcctccaaggaaaaagaagaggaaacaccggttgtgggctgcacactgcagaaagatacagctgaaaaaggacggctcctctaaccatgtttacaactatcaaccctgtgatcatccacggcagccttgtgacagttcgtgcccttgtgtgatagcacaaaatttttgtgaaaagttttgtcaatgtagttcagagtgtcaaaaccgctttccgggatgccgctgcaaagcacagtgcaacaccaagcagtgcccgtgctacctggctgtccgagagtgtgaccctgacctctgtcttacttgtggagccgctgaccattgggacagtaaaaatgtgtcctgcaagaactgcagtattcagcggggctccaaaaagcatctattgctggcaccatctgacgtggcaggctgggggatttttatcaaagatcctgtgcagaaaaatgaattcatctcagaatactgtggagagattatttctcaagatgaagctgacagaagagggaaagtgtatgataaatacatgtgcagctttctgttcaacttgaacaatgattttgtggtggatgcaacccgcaagggtaacaaaattcgttttgcaaatcattcggtaaatccaaactgctatgcaaaagttatgatggttaacggtgatcacaggataggtatttttgccaagagagccatccagactggcgaagagctgttttttgattacagatacagccaggctgatgccctgaagtatgtcggcatcgaaagagaaatggaaatcccttgacatctgctacctcctcccccctcctctgaaacagctgccttagcttcaggaacctcgagtactgtgggcaatttagaaaaagaacatgcagtttgaaattctgaatttgcaaagtactgtaagaataatttatagtaatgagtttaaaaatcaactttttattgccttctcaccagctgcaaagtgttttgtaccagtgaatttttgcaataatgcagtatggtacatttttcaactttgaataaagaatacttgaacttgaaaaaaaaaaaaaaaa

SEQ ID NO: 1060 - protein, 751 aa, Homo sapien
MGQTGKKSEKGPVCWRKRVKSEYMRLRQLKRFRRADEVKSMFSSNRQKILERTEILNQEWKQRRIQPVHILTSVSSLRGTRECSVTSDLDFPTQVIPLKTLNAVASVPIMYSWSPLQQNFMVEDETVLHNIPYMGDEVLDQDGTFIEELIKNYDGKVHGDRECGFINDEIFVELVNALGQYNDDDDDDDGDDPEEREEKQKDLEDHRDDKESRPPRKFPSDKIFEAISSMFPDKGTAEELKEKYKELTEQQLPGALPPECTPNIDGPNAKSVQREQSLHSFHTLFCRRCFKYDCFLHRKCNYSFHATPNTYKRKNTETALDNKPCGPQCYQHLEGAKEFAAALTAERIKTPPKRPGGRRRGRLPNNSSRPSTPTINVLESKDTDSDREAGTETGGENNDKEEEEKKDETSSSSEANSRCQTPIKMKPNIEPPENVEWSGAEASMFRVLIGTYYDNFCAIARLIGTKTCRQVYEFRVKESSIIAPAPAEDVDTPPRKKKRKHRLWAAHCRKIQLKKDGSSNHVYNYQPCDHPRQPCDSSCPCVIAQNFCEKFCQCSSECQNRFPGCRCKAQCNTKQCPCYLAVRECDPDLCLTCGAADHWDSKNVSCKNCSIQRGSKKHLLLAPSDVAGWGIFIKDPVQKNEFISEYCGEIISQDEADRRGKVYDKYMCSFLFNLNNDFVVDATRKGNKIRFANHSVNPNCYAKVMMVNGDHRIGIFAKRAIQTGEELFFDYRYSQADALKYVGIEREMEIP

SEQ ID NO: 1061 - DNA, 2070 bp, Homo sapien
  Unsure 1683: Unknown base
gaattcggggcgccagctacgccgctgccgctgtcactatggcccattacaaagccgccgactcgaagcgtgagcagttccggaggtacttggagaagtcgggggtgctggacacgctgaccaaggtgttggtagccttatatgaagaaccagagaaacctaacagtgctttggattttttaaagcatcacttaggagctgctactccagaaaatccagaaatagagctcgttcgcctagaactggccgaaatgaaagagaagtatgaagctattgtagaagaaaataaaaaactgaaagcaaagcttgctcagtatgaaccacctcaggaggagaagcgtgctgaataggattcttctcagtttgaaagacaatgaaaaatggttttgtatgacttgaatagtttgtatagtatataatcttttctgaacagatgctatagaactcttttaatatgtttaattcacctatcacactctgttaaaaacacatagaatcatcaataaaaactcaatataactttctttgggtcttaaagcaggagaatccaaagtaaatcctgaacaaaacctaaacacagccatctaactcattaccttaaaagacattctgtttattagtctgattaggaatgatggcactggttgtattttagccaagacagtttagcatggagctattccttggtgcagttcaggatatgaacacaggtacagtcattctttgaacggtgacactgttctgtatattccctataggcagctggagagatctgtgtgacacaagatgcttttgtacgggttcccatgaatcttctgctcttgtttgtgtgacatgaaacaaataacttctttgccaccactttgccttagataactgtgtgtgtgtgtgccagtttgaactctgacaccacattttccttctatgcaatcatgcctgtctgataatcttgcattgctttcctctgagctttagtgggtcctagtgcacaatggcctttctgtgctgtttttcaatttgcctaataatagcagttaccctgattgtaatttatgtaactttaaacaggatcacactgtaccccctgcctgccttatttgcttactgagcacaggacagaggcaatatacaactctgggttcacacacaagctgagatgagaagaggaatgagccatatattggggaaaatcatagtttgtaggtataattatatagtgcttttctccctcaaagtatttttctagccttgaattcattttatcttcattatccctgtgaagtaggtgggacaagtataaggggaagaggggtgctgaatttttaggccaaagactgatattaatacaaatcactcactaactgtagagccttgggcattatcagtgaactactctgagatttactgtcttcatctgtttaatgagtagaatgtccgtgatgcctacctcacagggttgttgtgagggtcaaatgagaatgtatgtgaaagatttgtaaatggtaaagcactatattcttgtttgttagtcctttttcctttctttgggtagacctacagtcagatgttttgttttatggatcacttattttccttactggtagactgtcgttttatagacatattcctatttcatatattctctccctgttgttagagaacctatctttgtttttggtcaanacacacatagaaaacaaaatgatccaatgaaaactggtttaactagcaaaagccttggcacctgttggagactatgaccaagccaataaaaagggcatttaaatcagccctgttagtaggaatgtggctatggctggtgcctcttctagtcacaagtttgtttttggagggggtccagaagatcattcccttgcatagatttctcttttaccaatttgagtgcctcctacatgggcagcagtggactaagtgctgggtgtgataaagaggaatgacttaattatgagactgtatataatcaaatacagtgtgggttaggacctgtggcagaccattataataaagcatggccccgtgagggttttgaaagagaaaaaaaaaaaaaaa

SEQ ID NO: 1062 - protein, 103 aa, Homo sapien
MAHYKAADSKREQFRRYLEKSGVLDTLTKVLVALYEEPEKPNSALDFLKHHLGAATPENPEIELVRLELAEMKEKYEAIVEENKKLKAKLAQYEPPQEEKRAE

SEQ ID NO: 1063 - DNA, 1390 bp, Homo sapien
gggaagtgctgttggagccgctgtggttgctgtccgcggagtggaagcgcgtgcttttgtttgtgtccctggccatggcgctgcagctctcccgggagcagggaatcaccctgcgcgggagcgccgaaatcgtggccgagttcttctcattcggcatcaacagcattttatatcagcgtggcatatatccatctgaaacctttactcgagtgcagaaatacggactcaccttgcttgtaactactgatcttgagctcataaaatacctaaataatgtggtggaacaactgaaagattggttatacaagtgttcagttcagaaactggttgtagttatctcaaatattgaaagtggtgaggtcctggaaagatggcagtttgatattgagtgtgacaagactgcaaaagatgacagtgcacccagagaaaagtctcagaaagctatccaggatgaaatccgttcagtgatcagacagatcacagctacggtgacatttctgccactgttggaagtttcttgttcatttgatctgctgatttatacagacaaagatttggttgtacctgaaaaatgggaagagtcgggaccacagtttattaccaattctgaggaagtccgccttcgttcatttactactacaatccacaaagtaaatagcatggtggcctacaaaattcctgtcaatgactgaggatgacatgaggaaaataatgtaattgtaattttgaaatgtggttttcctgaaatcaggtcatctatagttgatatgttttatttcattggttaatttttacatggagaaaaccaaaatgatacttactgaactgtgtgtaattgttcctttatttttttggtacctatttgacttaccatggagttaacatcatgaatttattgcacattgttcaaaaggaaccaggaggtttttttgtcaacattgtgatgtatattcctttgaagatagtaactgtagatggaaaaacttgtgctataaagctagatgctttcctaaatcagatgttttggtcaagtagtttgactcagtataggtagggagatatttaagtataaaatacaacaaaggaagtctaaatattcagaatctttgttaaggtcctgaaagtaactcataatctataaacaatgaaatattgctgtatagctccttttgaccttcatttcatgtatagttttccctattgaatcagtttccaattatttgactttaatttatgtaacttgaacctatgaagcaatggatatttgtactgtttaatgttctgtgatacagaactcttaaaaatgttttttcatgtgttttataaaatcaagttttaagtgaaagtgaggaaataaagttaagtttgttttaaaaaaaaaaaaaaaaaa

SEQ ID NO: 1064 - protein, 205 aa, Homo sapien
MALQLSREQGITLRGSAEIVAEFFSFGINSILYQRGIYPSETFTRVQKYGLTLLVTTDLELIKYLNNVVEQLKDWLYKCSVQKLVVVISNIESGEVLERWQFDIECDKTAKDDSAPREKSQKAIQDEIRSVIRQITATVTFLPLLEVSCSFDLLIYTDKDLVVPEKWEESGPQFITNSEEVRLRSFTTTIHKVNSMVAYKIPVND

SEQ ID NO: 1065 - DNA, 2210 bp, Homo sapien
agccgcggcctcaactaaaagtggccattgacctttcaagctttcgagcagtgatgcaatagaatagtatttcaaagaaaaatgcttatcgaaattttggatccggttttcccgtgattgttaagggtttcttttaaaaagtaggtcacatttcaagtaggtcatatttcgggggcgggtgcgcagacaaggagatgagtttccactaaggccagggggcctccaacggggttggaggtgagaatcccaggtagggtagaggtgccgagatccttccgaatcccagccctggggcgtcagccctgcagggaatggcagagacactctccggactgagggaaccgaggccagtcaccaagccccttccgggcgcgcaggcgatcagtgggtgaccgcggctgcgagggactttgtcatccgtcctccaggatctggggagaaagagccccatcccttctctctctgccaccatttcggacaccccgcagggactcgttttgggattcgcactgacttcaaggaaggacgcgaacccttctctgaccccagctcgggcggccacctgtctttgccgcggtgacccttctctcatgaccctgcggtgccttgagccctccgggaatggcggggaagggacgcggagccagtgggggaccgcggggtcggcggaggagccatccccgcaggcggcgcgtctggcgaaggccctgcgggagctcggtcagacaggatggtactggggaagtatgactgttaatgaagccaaagagaaattaaaagaggcaccagaaggaactttcttgattagagatagctcgcattcagactacctactaacaatatctgttaaaacatcagctggaccaactaatcttcgaatcgaataccaagacggaaaattcagattggactctatcatatgtgtcaaatccaagcttaaacaatttgacagtgtggttcatctgatcgactactatgttcagatgtgcaaggataagcggacaggtccagaagccccccggaacggcactgttcacctttatctgaccaaaccgctctacacgtcagcaccatctctgcagcatctctgtaggctcaccattaacaaatgtaccggtgccatctggggactgcctttaccaacaagactaaaagattacttggaagaatataaattccaggtataaatgtttctctttttttaaacatgtctcacatagagtatctccgaatgcagctatgtaaaagagaaccaaaacttgagtgctctggataactatatggaatgctttctaagaacagctgaagctaatctaatttaaatttaacagcttgaagaggtagctaggtgtttaaagttcctccagatacttttacctgagtgatgcttcccttcctaaggctgaccaagacctgttgatccttttagattaaaaataaaatgtcgcatgtaaaggctgaagtcgcgttttatcagaatgccttgccttcttaggttcttttccattatgtcaaaggtccaggctccagtaggagagaaagaactcctcataggaatactgaagaagtgggaaggaaccaagctgacacaggcctcactgcaatttgatatgcctgctgatcagagtctcttgggcattttatattttgcattctgatgtacctaggagttttgttaaacagatgatgtatgtgagtatttatcccattttatgcaattaaccaaatcaaccaaaaaaagtgaccatgaagtcctgtatttgtctttttactacatgtaggaactctcatgtgaatgagtactgtagtaatccattctatgggagccttatttcagaaatatttcaaactggtgcaaatggaaaagactttctcttttcctttaaagctaaagacaagaatatcatgctatacaggtgcaactcaatccccgttaataaaaaccaatgtaggtataggcattctaccctttgaaatagctgtgtcccaacctgttgccattgattttttggaaatggctttagaaatatccaagttgtccttgaattgtctaaccatggacataaacagttgtctcccttctactgtgtagaatactttgacttaattttcttccagatacagggggatacctgcctgtttttcaaagtgtttatttactgctgttactatttgattagaatgtattaaataaaaaaaacctgatttct

SEQ ID NO: 1066 - protein, 198 aa, Homo sapien
MTLRCLEPSGNGGEGTRSQWGTAGSAEEPSPQAARLAKALRELGQTGWYWGSMTVNEAKEKLKEAPEGTFLIRDSSHSDYLLTISVKTSAGPTNLRIEYQDGKFRLDSIICVKSKLKQFDSVVHLIDYYVQMCKDKRTGPEAPRNGTVHLYLTKPLYTSAPSLQHLCRLTINKCTGAIWGLPLPTRLKDYLEEYKFQV

SEQ ID NO: 1067 - DNA, 2210 bp, Homo sapien; identical to SEQ ID NO: 1065

SEQ ID NO: 1068 - protein, 198 aa, Homo sapien; identical to SEQ ID NO: 1066

SEQ ID NO: 1069 - DNA, 1865 bp, Homo sapien
gcgtggaggtcgacgactccgtcgcagactacggacctgtctgggtctcagccgccaaagaccccgtccggtaggtgagtggctcactttgagggcaagccttctcggatcgaggcttcttcatggccgctcagatcgtgagcggccggggctgctctctttgcggaggatggcgtctaatgagcgcagttgattcgaggaagtactagccggacatcatgagtggctgtcgggtattcatcgggagactaaatccagcggccagggagaaggacgtggaaagattcttcaagggatatggacggataagagatattgatctgaaaagaggctttggttttgtggaatttgaggatccaagggatgcagatgatgctgtgtatgagcttgatggaaaagaactctgtagtgaaagggttactattgaacatgctagggctcggtcacgaggtggaagaggtagaggacgatactctgaccgttttagtagtcgcagacctcgaaatgatagacggtatgtgaagggtggatggctgcattgaacaattattgtaggggtagcatttaagattcaggagtcattagcagtgatgattttgggacctgccgtataatctgttcttctattcccacgttagccaattgttcttgatgaatctatatgagtcatagaacacaaatctattgacggaagtcattagaatggcttgtgatatctgatggcttgaacttgcccacagttgaacacaagtgctgtcattgcatttcttccattgtgaatacgaattttcttcctcagaaatgctccacctgtaagaacagaaaatcgtcttatagttgagaatttatcctcaagagtcagctggcaggatctcaaagatttcatgagacaagctggggaagtaacgtttgcggatgcacaccgacctaaattaaatgaaggggtggttgagtttgcctcttatggtgacttaaagaatgctattgaaaaactttctggaaaggaaataaatgggagaaaaataaaattaattgaaggcagcaaaaggcacaggtcaagaagcaggtctcgatcccggaccagaagttcctctaggtctcgtagccgatcccgttcccgtagtcgcaaatcttacagccggtcaagaagcaggagcaggagccggagccggagcaagtcccgttctgttagtaggtctcccgtgcctgagaagagccagaaacgtggttcttcaagtagatctaagtctccagcatctgtggatcgccagaggtcccggtcccgatcaaggtccagatcagttgacagtggcaattaaactgtaaataacttgccctgggggcctttttttttaaaaaacaaaaaccacaaaaattcccaaaccatacttgctaaaaattctggtaagtatgtgcttttctgtgggggtgggatttggaaggggggttgggttgggctggatatctttgtagatgtggaccaccaaggggttgttgaaaactaattgtattaaatgtcttttgataagccttctgctcacatttttgtgaatgtctgaagtatatagtttgtgtatattgacagagctcttttataactaaagcaaatttaatttttttgtactagaaaaaaatttgaacattttagttcttggttataaaaatgttaattcagaattagtttaatgccttaattaaactaattaatagctttggacacttaaaagagctctaaatttgcttgtacataaaggcttaatttgttttccttgttagggtcaagggtgtcctccactctttaacagctgctggacagacacattagagcagctgtttgttattgataataaaatattataaaacta

SEQ ID NO: 1070 - protein, 107 aa, Homo sapien
MSGCRVFIGRLNPAAREKDVERFFKGYGRIRDIDLKRGFGFVEFEDPRDADDAVYELDGKELCSERVTIEHARARSRGGRGRGRYSDRFSSRRPRNDRRYVKGGWLH

SEQ ID NO: 1071 - DNA, 2564 bp, Homo sapien
ggggcggtcgcagctgaagcaggcctaccctctgaagaggtccaagcaacggaagtactactacgaagctgcctttctggccatccttgagaaaaatagacagatggccaaggagaggggcctaataagccccagtgattttgcccagctgcaaaaatacatggaatactccaccaaaaaggtcagtgatgtcctaaagctcttcgaggatggcgagatggctaaatatgtccaaggagatgccattgggtacgagggattccagcaattcctgaaaatctatctcgaagtggataatgttcccagacacctaagcctggcactgtttcaatcctttgagactggtcactgcttaaatgagacaaatgtgacaaaagatgtggtgtgtctcaatgatgtttcctgctacttttcccttctggagggtggtcggccagaagacaagttagaattcaccttcaagctgtacgacacggacagaaatgggatcctggacagctcagaagtggacaaaattatcctacagatgatgcgagtggctgaatacctggattgggatgtgtctgagctgaggccgattcttcaggagatgatgaaagagattgactatgatggcagtggctctgtctctcaagctgagtgggtccgggctggggccaccaccgtgccactgctagtgctgctgggtctggagatgactctgaaggacgacggacagcacatgtggaggcccaagaggttccccagaccagtctactgcaatctgtgcgagtcaagcattggtcttggcaaacagggactgagctgtaacctctgtaagtacactgttcacgaccagtgtgccatgaaagccctgccttgtgaagtcagcacctatgccaagtctcggaaggacattggtgtccaatcacatgtgtgggtgcgaggaggctgtgagtccgggcgctgcgaccgctgtcagaaaaagatccggatctaccacagtctgaccgggctgcattgtgtatggtgccacctagagatccacgatgactgcctgcaagcggtgggccatgagtgtgactgtgggctgctccgggatcacatcctgcctccatcttccatctatcccagtgtcctggcctctggaccggatcgtaaaaatagcaaaacaagccagaagaccatggatgatttaaatttgagcacctctgaggctctgcggattgaccctgttcctaacacccacccacttctcgtctttgtcaatcctaagagtggcgggaagcaggggcagagggtgctctggaagttccagtatatattaaaccctcgacaggtgttcaacctcctaaaggatggtcctgagatagggctccgattattcaaggatgttcctgatagccggattttggtgtgtggtggagacggcacagtaggctggattctagagaccattgacaaagctaacttgccagttttgcctcctgttgctgtgttgcccctgggtactggaaatgatctggctcgatgcctaagatggggaggaggttatgaaggacagaatctggcaaagatcctcaaggatttagagatgagtaaagtggtacatatggatcgatggtctgtggaggtgatacctcaacaaactgaagaaaaaagtgacccagtcccctttcaaatcatcaataactacttctctattggcgtggatgcctctattgctcatcgattccacatcatgcgagagaaatatccggagaagttcaacagcagaatgaagaacaagctatggtacttcgaatttgccacatctgaatccatcttctcaacatgcaaaaagctggaggagtctttgacagttgagatctgtgggaaaccgctggatctgagcaacctgtccctagaaggcatcgcagtgctaaacatccctagcatgcatggtggctccaacctctggggtgataccaggagaccccatggggatatctatgggatcaaccaggccttaggtgctacagctaaagtcatcaccgaccctgatatcctgaaaacctgtgtaccagacctaagtgacaagagactggaagtggttgggctggagggtgcaattgagatgggccaaatctataccaagctcaagaatgctggacgtcggctggccaagtgctctgagatcaccttccacaccacaaaaacccttcccatgcaaattgacgtagaaccctggatgcagacgccctgtacaatcaagatcacccacaagaaccagatgcccatgctcatgggcccacccccccgctccaccaatttctttggcttcttgagctaagggggacacccttggcctccaagccagccttgaacccacctccctgtccctggactctactcccgaggctctgtacattgctgccacatactcctgccagcttgggggagtgttccttcaccctcacagtatttattatcctgcaccacctcactgttccccatgcgcacacacatacacacaccccaaaacacatacattgaaagtgcctcatctgaataaaatgacttgtgtttccctttgggatctgctg

SEQ ID NO: 1072 - protein, 735 aa, Homo sapien
MAKERGLISPSDFAQLQKYMEYSTKKVSDVLKLFEDGEMAKYVQGDAIGYEGFQQFLKIYLEVDNVPRHLSLALFQSFETGHCLNETNVTKDVVCLNDVSCYFSLLEGGRPEDKLEFTFKLYDTDRNGILDSSEVDKIILQMMRVAEYLDWDVSELRPILQEMMKEIDYDGSGSVSQAEWVRAGATTVPLLVLLGLEMTLKDDGQHMWRPKRFPRPVYCNLCESSIGLGKQGLSCNLCKYTVHDQCAMKALPCEVSTYAKSRKDIGVQSHVWVRGGCESGRCDRCQKKIRIYHSLTGLHCVWCHLEIHDDCLQAVGHECDCGLLRDHILPPSSIYPSVLASGPDRKNSKTSQKTMDDLNLSTSEALRIDPVPNTHPLLVFVNPKSGGKQGQRVLWKFQYILNPRQVFNLLKDGPEIGLRLFKDVPDSRILVCGGDGTVGWILETIDKANLPVLPPVAVLPLGTGNDLARCLRWGGGYEGQNLAKILKDLEMSKVVHMDRWSVEVIPQQTEEKSDPVPFQIINNYFSIGVDASIAHRFHIMREKYPEKFNSRMKNKLWYFEFATSESIFSTCKKLEESLTVEICGKPLDLSNLSLEGIAVLNIPSMHGGSNLWGDTRRPHGDIYGINQALGATAKVITDPDILKTCVPDLSDKRLEVVGLEGAIEMGQIYTKLKNAGRRLAKCSEITFHTTKTLPMQIDVEPWMQTPCTIKITHKNQMPMLMGPPPRSTNFFGFLS

SEQ ID NO: 1073 - DNA, 1189 bp, Homo sapien
gcgcatgcgcgggggccatattagcagcggttattcggtgagcggtggtggtttattcttccgtggagttaagggctccgtggacatctcaggtcttcagggtcttccatctggaactatataaagttcagaaaacatgtctcgaagatatgactccaggaccactatattttctccagaaggtcgcttataccaagttgaatatgccatggaagctattggacatgcaggcacctgtttgggaattttagcaaatgatggtgttttgcttgcagcagagagacgcaacatccacaagcttcttgatgaagtctttttttctgaaaaaatttataaactcaatgaggacatggcttgcagtgtggcaggcataacttctgatgctaatgttctgactaatgaactaaggctcattgctcaaaggtatttattacagtatcaggagccaataccttgtgagcagttggttacagcgctgtgtgatatcaaacaagcttatacacaatttggaggaaaacgtccctttggtgtttcattgctgtacattggctgggataagcactatggctttcagctctatcagagtgaccctagtggaaattacgggggatggaaggccacatgcattggaaataatagcgctgcagctgtgtcaatgttgaaacaagactataaagaaggagaaatgaccttgaagtcagcacttgctttagctatcaaagtactaaataagaccatggatgttagtaaactctctgctgaaaaagtggaaattgcaacactaacaagagagaatggaaagacagtaatcagagttctcaaacaaaaagaagtggagcagttgatcaaaaaacatgaggaagaagaagccaaagctgagcgtgagaagaaagaaaaagaacagaaagaaaaggataaatagaatcagagattttattactcatttggggcaccatttcagtgtaaaagcagtcctactcttccacactaggaaggctttactttttttaactggtgcagtgggaaaataggacattacatactgaattgggtccttgtcatttctgtccaattgaatactttattgtaacgatgatggttacccttcatggacgtcttaatcttccacacacatcccctttttttggaataaaatttggaaaatggaaatgaaaaaaaaaaaaaaaaa

SEQ ID NO: 1074 - protein, 261 aa, Homo sapien
MSRRYDSRTTIFSPEGRLYQVEYAMEAIGHAGTCLGILANDGVLLAAERRNIHKLLDEVFFSEKIYKLNEDMACSVAGITSDANVLTNELRLIAQRYLLQYQEPIPCEQLVTALCDIKQAYTQFGGKRPFGVSLLYIGWDKHYGFQLYQSDPSGNYGGWKATCIGNNSAAAVSMLKQDYKEGEMTLKSALALAIKVLNKTMDVSKLSAEKVEIATLTRENGKTVIRVLKQKEVEQLIKKHEEEEAKAEREKKEKEQKEKDK

SEQ ID NO: 1075 - DNA, 1080 bp, Homo sapien
ctcgcgcaagcggcgtgcggtcccgcggcgctgcagttgtgtccagccggtcacggggcggctatggcggccacgttcttcggagaggtggtgaaggcgccgtgccgagctgggactgaggacgaagaggaggaggaggaggggcggagggagacgcccgaggacagggaggtgcgtctgcagctggcgcggaagagggaagtgcggctccttcgaagacaaacaaaaacatctttggaagtttctttgctagaaaaatatccgtgctccaagtttataattgctataggaaataatgcagtagcatttctgtcatcatttgttatgaattcaggagtctgggaggaagttggttgtgccaaactctggaatgaatggtgtagaacaacagacactacacatctgtcctccacagaggctttttgtgtgttttatcatctaaaatccaatccctcggtttttctctgtcagtgcagttgctatgttgcagaagatcaacagtatcagtggctggaaaaggtttttggctcttgtccaaggaagaacatgcagataactattctcacatgtcgacatgttaccgattataaaacctcagaatccaccggcagccttccttctcctttcctgagagccctaaaaacacagaatttcaaagactcggcgtgttgtccattgctagaacaaccgaatatagtacacgaccttcctgcagcagttctaagctactgtcaagtatggaaaatcccagcaattctgtacttgtgttatactgatgtgatgaaattagacctaatcacagtggaagcttttaagcctatactttctaccagaagcttgaagggtttggttaagaatattccccaaagcactgagatactaaagaaattgatgacaacaaatgagattcagagtaacatttatacatgatcttaaacattgttttgtagtgtatattacttgtccattcctttaaggggagcagcctgcactcttttgtagattacttttgggggatatattttgagaatgatgaaacggaataaaattgtaaaaaactaaaaaaaaaaaaaaaaaaaa

SEQ ID NO: 1076 - protein, 288 aa, Homo sapien
MAATFFGEVVKAPCRAGTEDEEEEEEGRRETPEDREVRLQLARKREVRLLRRQTKTSLEVSLLEKYPCSKFIIAIGNNAVAFLSSFVMNSGVWEEVGCAKLWNEWCRTTDTTHLSSTEAFCVFYHLKSNPSVFLCQCSCYVAEDQQYQWLEKVFGSCPRKNMQITILTCRHVTDYKTSESTGSLPSPFLRALKTQNFKDSACCPLLEQPNIVHDLPAAVLSYCQVWKIPAILYLCYTDVMKLDLITVEAFKPILSTRSLKGLVKNIPQSTEILKKLMTTNEIQSNIYT

SEQ ID NO: 1077 - DNA, 1955 bp, Homo sapien
  Unsure 1903: Unknown base
ggtcgcgcagctgtgttcgcggactcaggtggaaggaatttcttctcttcgttgacgttgctggtgttcactgtttggaattagtcaagtttcgggaatcaccgtcgctgccatcaacatgtcggtcccaagcgctctcatgaagcaaccgcccattcagtctacggctggggccgtcccagttcgcaatgagaaaggtgagatttcaatggaaaaagtgaaggtaaagcgttatgtgtccggaaaaaggccagactatgcccctatggagtcctcagatgaggaggatgaagaatttcagttcattaagaaagccaaagaacaagaagcagagcctgaggaacaggaggaggattcatccagtgacccccggctacggcgtttacagaaccgtattagtgaagatgtggaagagagattggctcgacatcgaaaaatagtggaacctgaagtggtaggagagagtgactcagaagtagaaggagatgcttggcgcatggaacgagaagacagcagtgaagaagaggaggaggaaattgatgatgaggaaatagagcggcggcgtggcatgatgcgtcagcgagcacaggagagaaaaaatgaagagatggaagtcatggaagtggaagatgagggtcgttctggagaggagtcagaatcagagtctgagtatgaagagtacacagacagtgaagatgagatggagcctcgccttaagccagtcttcattcgaaagaaggaccgagtgacagttcaagaacgtgaagccgaagcattgaaacagaaggagctggagcaggaagccaaacgcatggctgaggaaaggcgccagtacacactccagattgtcggagaggaaaccccaaaagagctggaagagaacaagcgatccctggctgcattggatgcactcaatactgatgatgaaaatgatgaggaggaatatgaggcatggaaagttcgagagctaaaaagaatcaagagggacagagaagatcgagaagcgcttgagaaggagaaagcagaaattgaacgcatgcgaaacctgactgaggaagagaggagagctgaacttcgggcaaacggcaaagtcattaccaacaaagctgttaagggcaaatacaagttcttacagaagtattatcaccggggtgccttcttcatggatgaggatgaagaagtatacaagagagatttcagcgctcctaccctggaggatcatttcaataaaaccattcttcctaaagtcatgcaggtcaagaactttggacgctcaggtcgcaccaaatacactcaccttgtggatcaagataccacctcctttgactcagcttggggccaagagagtgcccagaacacaaagttcttcaaacaaaaggcagctggggtacgagatgtatttgagcggccatctgccaagaagcggaaaactacctagggtccaactgcttattcttccaactgtggaacacaaggggagtctcagcatctggtccttgattgggttttttcattgtttccttggcccctgtatccagatattggacttactgctatacttgtgatactgggtagcccagactttgaaggtgctttgtgaggtttggactcatgctgagaaacccacaggaaagcactgtccaggtaggattagaggcttcccacttaaaactatttctgagaaatcttaggttttatcactgctatggtttcccatatttacttgggactgttctgactttctttttccagcccttagcttgggttagaaaagtggacatgtaagtgaacaatgcattacttctaccttaggtttaggagtaatatacccggaaatctaagctcatggaaacatgttttccatttggggttggagtccgtttttctagttgtacatacttgnggatccatatatgtgtgcatgtcawgaaataaaagaatcacacaacaaaaaa

SEQ ID NO: 1078 - protein, 439 aa, Homo sapien
MSVPSALMKQPPIQSTAGAVPVRNEKGEISMEKVKVKRYVSGKRPDYAPMESSDEEDEEFQFIKKAKEQEAEPEEQEEDSSSDPRLRRLQNRISEDVEERLARHRKIVEPEVVGESDSEVEGDAWRMEREDSSEEEEEEIDDEEIERRRGMMRQRAQERKNEEMEVMEVEDEGRSGEESESESEYEEYTDSEDEMEPRLKPVFIRKKDRVTVQEREAEALKQKELEQEAKRMAEERRQYTLQIVGEETPKELEENKRSLAALDALNTDDENDEEEYEAWKVRELKRIKRDREDREALEKEKAEIERMRNLTEEERRAELRANGKVITNKAVKGKYKFLQKYYHRGAFFMDEDEEVYKRDFSAPTLEDHFNKTILPKVMQVKNFGRSGRTKYTHLVDQDTTSFDSAWGQESAQNTKFFKQKAAGVRDVFERPSAKKRKTT

SEQ ID NO: 1079 - DNA, 1820 bp, Homo sapien
gagctccaagctggtttgaacaagccctgggcatgtttggcgggaagttggcttagctcggctacctgtggccccgcagttttgtagtccccgccttgtttctccccagaggcctctcaatcctccctccatgatcttcgcatagagcacagtaccccttcacacggaggacgcgatggctcccaagaaacgcccagaaacccagaagacctccgagattgtattacgccccaggaacaagaggagcaggagtcccctggagctggagcccgaggccaagaagctctgtgcgaagggctccggtcctagcagaagatgtgactcagactgcctctgggtggggctggctggcccacagatcctgccaccatgccgcagcatcgtcaggaccctccaccagcataagctgggcagagcttcctggccatctgtccagcaggggctccagcagtcctttttgcacactctggattcttaccggatattacaaaaggctgccccctttgacaggagggctacatccttggcgtggcacccaactcaccccagcaccgtggctgtgggttccaaagggggagatatcatgctctggaattttggcatcaaggacaaacccaccttcatcaaagggattggagctggagggagcatcactgggctgaagtttaaccctctcaataccaaccagttttacgcctcctcaatggagggaacaactaggctgcaagactttaaaggcaacattctacgagtttttgccagctcagacaccatcaacatctggttttgtagcctggatgtgtctgctagtagccgaatggtggtcacaggagacaacgtggggaacgtgatcctgctgaacatggacggcaaagagctttggaatctcagaatgcacaaaaagaaagtgacgcatgtggccctgaacccatgctgtgattggttcctggccacagcctccgtagatcaaacagtgaaaatttgggacctgcgccaggttagagggaaagccagcttcctctactcgctgccgcacaggcatcctgtcaacgcagcttgtttcagtcccgatggagcccggctcctgaccacggaccagaagagcgagatccgagtttactctgcttcccagtgggactgccccctgggcctgatcccgcaccctcaccgtcacttccagcacctcacacccatcaaggcagcctggcatcctcgctacaacctcattgttgtgggccgatacccagatcctaatttcaaaagttgtaccccttatgaattgaggacgatcgacgtgttcgatggaaactcagggaagatgatgtgtcagctctatgacccagaatcttctggcatcagttcgcttaatgaattcaatcccatgggggacacgctggcctctgcaatgggttaccacattctcatctggagccaggaggaagccaggacacggaagtgagagacactaaagaaggtgtgggccagacaaggccttggagcccacacatgggatcaagtcctgcaagcagaggtggtgatttgttaaagggccaaaagtatccaaggttagggttggagcaggggtgctgggacctggggcactgtgggactgggacacttttatgttaatgctctggacttgcctccagagactgctccagagttggtgacacagctgtcccaagggcccctctgtatctagcctggaaccaaggttatcttggaactaaatgacttttctcctctcagtgggtggtagcagagggatcaagcagttatttgatttgtgctcttttgatatggccaataaaaccataccg

SEQ ID NO: 1080 - protein, 427 aa, Homo sapien
MAPKKRPETQKTSEIVLRPRNKRSRSPLELEPEAKKLCAKGSGPSRRCDSDCLWVGLAGPQILPPCRSIVRTLHQHKLGRASWPSVQQGLQQSFLHTLDSYRILQKAAPFDRRATSLAWHPTHPSTVAVGSKGGDIMLWNFGIKDKPTFIKGIGAGGSITGLKFNPLNTNQFYASSMEGTTRLQDFKGNILRVFASSDTINIWFCSLDVSASSRMVVTGDNVGNVILLNMDGKELWNLRMHKKKVTHVALNPCCDWFLATASVDQTVKIWDLRQVRGKASFLYSLPHRHPVNAACFSPDGARLLTTDQKSEIRVYSASQWDCPLGLIPHPHRHFQHLTPIKAAWHPRYNLIVVGRYPDPNFKSCTPYELRTIDVFDGNSGKMMCQLYDPESSGISSLNEFNPMGDTLASAMGYHILIWSQEEARTRK

SEQ ID NO: 1081 - DNA, 3198 bp, Homo sapien
ttgggaggagcagtctctccgctcgtctcccggagctttctccattgtctctgcctttacaacagagggagacgatggactgagctgatccgcaccatggagtctcgggtcttactgagaacattctgtttgatcttcggtctcggagcagtttgggggcttggtgtggacccttccctacagattgacgtcttaacagagttagaacttggggagtccacgaccggagtgcgtcaggtcccggggctgcataatgggacgaaagcctttctctttcaagatactcccagaagcataaaagcatccactgctacagctgaacagttttttcagaagctgagaaataaacatgaatttactattttggtgaccctaaaacagacccacttaaattcaggagttattctctcaattcaccacttggatcacaggtacctggaactggaaagtagtggccatcggaatgaagtcagactgcattaccgctcaggcagtcaccgccctcacacagaagtgtttccttacattttggctgatgacaagtggcacaagctctccttagccatcagtgcttcccatttgattttacacattgactgcaataaaatttatgaaagggtagtagaaaagccctccacagacttgcctctaggcacaacattttggctaggacagagaaataatgcgcatggatattttaagggtataatgcaagatgtccaattacttgtcatgccccagggatttattgctcagtgcccagatcttaatcgcacctgtccaacttgcaatgacttccatggacttgtgcagaaaatcatggagctacaggatattttagccaaaacatcagccaagctgtctcgagctgaacagcgaatgaatagattggatcagtgctattgtgaaaggacttgcaccatgaagggaaccacctaccgagaatttgagtcctggatagacggctgtaagaactgcacatgcctgaatggaaccatccagtgtgaaactctaatctgcccaaatcctgactgcccacttaagtcggctcttgcgtatgtggatggcaaatgctgtaaggaatgcaaatcgatatgccaatttcaaggacgaacctactttgaaggagaaagaaatacagtctattcctcttctggagtatgtgttctctatgagtgcaaggaccagaccatgaaacttgttgagagttcaggctgtccagctttggattgtccagagtctcatcagataaccttgtctcacagctgttgcaaagtttgtaaaggttatgacttttgttctgaaaggcataactgcatggagaattccatctgcagaaatctgaatgacagggctgtttgtagctgtcgagatggttttagggctcttcgagaggataatgcctactgtgaagacatcgatgagtgtgctgaagggcgccattactgtcgtgaaaatacaatgtgtgtcaacaccccgggttcttttatgtgcatctgcaaaactggatacatcagaattgatgattattcatgtacagaacatgatgagtgtatcacaaatcagcacaactgtgatgaaaatgctttatgcttcaacactgttggaggacacaactgtgtttgcaagccgggctatacagggaatggaacgacatgcaaagcattttgcaaagatggctgtaggaatggaggagcctgtattgccgctaatgtgtgtgcctgcccacaaggcttcactggacccagctgtgaaacggacattgatgaatgctctgatggttttgttcaatgtgacagtcgtgctaattgcattaacctgcctggatggtaccactgtgagtgcagagatggctaccatgacaatgggatgttttcaccaagtggagaatcgtgtgaagatattgatgagtgtgggaccgggaggcacagctgtgccaatgataccatttgcttcaatttggatggcggatatgattgtcgatgtcctcatggaaagaattgcacaggggactgcatccatgatggaaaagttaagcacaatggtcagatttgggtgttggaaaatgacaggtgctctgtgtgctcatgtcagaatggattcgttatgtgtcgacggatggtctgtgactgtgagaatcccacagttgatcttttttgctgccctgaatgtgacccaaggcttagtagtcagtgcctccatcaaaatggggaaactttgtataacagtggtgacacctgggtccagaattgtcaacagtgccgctgcttgcaaggggaagttgattgttggcccctgccttgcccagatgtggagtgtgaattcagcattctcccagagaatgagtgctgcccgcgctgtgtcacagacccttgccaggctgacaccatccgcaatgacatcaccaagacttgcctggacgaaatgaatgtggttcgcttcaccgggtcctcttggatcaaacatggcactgagtgtactctctgccagtgcaagaatggccacatctgttgctcagtggatccacagtgccttcaggaactgtgaagttaactgtctcatgggagatttctgttaaaagaatgttctttcattaaaagaccaaaaagaagttaaaacttaaattgggtgatttgtgggcagctaaatgcagctttgttaatagctgagtgaactttcaattatgaaatttgtggagcttgacaaaatcacaaaaggaaaattactggggcaaaattagacctcaagtctgcctctactgtgtctcacatcaccatgtagaagaatgggcgtacagtatataccgtgacatcctgaaccctggatagaaagcctgagcccattggatctgtgaaagcctctagcttcactggtgcagaaaattttcctctagatcagaatcttcagaatcagttaggttcctcactgcaagaaataaaatgtcaggcagtgaatgaattatattttcagaagtaaagcaaagaagctataacatgttatgtacagtacactctgaaaagaaatctgaaacaagttattgtaatgataaaaataatgcacaggcatggttacttaatattttctaacaggaaaagtcatccctatttccttgttttactgcacttaatattatttggttgaatttgttcagtataagctcgttcttgtgcaaaattaaataaatatttctcttacctt

SEQ ID NO: 1082 - protein, 816 aa, Homo sapien
MESRVLLRTFCLIFGLGAVWGLGVDPSLQIDVLTELELGESTTGVRQVPGLHNGTKAFLFQDTPRSIKASTATAEQFFQKLRNKHEFTILVTLKQTHLNSGVILSIHHLDHRYLELESSGHRNEVRLHYRSGSHRPHTEVFPYILADDKWHKLSLAISASHLILHIDCNKIYERVVEKPSTDLPLGTTFWLGQRNNAHGYFKGIMQDVQLLVMPQGFIAQCPDLNRTCPTCNDFHGLVQKIMELQDILAKTSAKLSRAEQRMNRLDQCYCERTCTMKGTTYREFESWIDGCKNCTCLNGTIQCETLICPNPDCPLKSALAYVDGKCCKECKSICQFQGRTYFEGERNTVYSSSGVCVLYECKDQTMKLVESSGCPALDCPESHQITLSHSCCKVCKGYDFCSERHNCMENSICRNLNDRAVCSCRDGFRALREDNAYCEDIDECAEGRHYCRENTMCVNTPGSFMCICKTGYIRIDDYSCTEHDECITNQHNCDENALCFNTVGGHNCVCKPGYTGNGTTCKAFCKDGCRNGGACIAANVCACPQGFTGPSCETDIDECSDGFVQCDSRANCINLPGWYHCECRDGYHDNGMFSPSGESCEDIDECGTGRHSCANDTICFNLDGGYDCRCPHGKNCTGDCIHDGKVKHNGQIWVLENDRCSVCSCQNGFVMCRRMVCDCENPTVDLFCCPECDPRLSSQCLHQNGETLYNSGDTWVQNCQQCRCLQGEVDCWPLPCPDVECEFSILPENECCPRCVTDPCQADTIRNDITKTCLDEMNVVRFTGSSWIKHGTECTLCQCKNGHICCSVDPQCLQEL

SEQ ID NO: 1083 - DNA, 1682 bp, Homo sapien
cggcagccagcctattctttggccgggtcggtgcgagtggtcggctgggcagagtgcacgctgcttggcgccgcaggctgatcccgccgtccactcccgggagcagtgatgttgggcaactctgcgccggggcctgcgacccgcgaggcgggctcggcgctgctagcattgcagcagacggcgctccaagaggaccaggagaatatcaacccggaaaaggcagcgcccgtccaacaaccgcggacccgggccgcgctggcggtactgaagtccgggaacccgcggggtctagcgcagcagcagaggccgaagacgagacgggttgcaccccttaaggatcttcctgtaaatgatgagcatgtcaccgttcctccttggaaagcaaacagtaaacagcctgcgttcaccattcatgtggatgaagcagaaaaagaagctcagaagaagccagctgaatctcaaaaaatagagcgtgaagatgccctggcttttaattcagccattagtttacctggacccagaaaaccattggtccctcttgattatccaatggatggtagttttgagtcaccacatactatggacatgtcaattgtattagaagatgaaaagccagtgagtgttaatgaagtaccagactaccatgaggatattcacacataccttagggaaatggaggttaaatgtaaacctaaagtgggttacatgaagaaacagccagacatcactaacagtatgagagctatcctcgtggactggttagttgaagtaggagaagaatataaactacagaatgagaccctgcatttggctgtgaactacattgataggttcctgtcttccatgtcagtgctgagaggaaaacttcagcttgtgggcactgctgctatgctgttagcctcaaagtttgaagaaatataccccccagaagtagcagagtttgtgtacattacagatgatacctacaccaagaaacaagttctgagaatggagcatctagttttgaaagtccttacttttgacttagctgctccaacagtaaatcagtttcttacccaatactttctgcatcagcagcctgcaaactgcaaagttgaaagtttagcaatgtttttgggagaattaagtttgatagatgctgacccatacctcaagtatttgccatcagttattgctggagctgcctttcatttagcactctacacagtcacgggacaaagctggcctgaatcattaatacgaaagactggatataccctggaaagtcttaagccttgtctcatggaccttcaccagacctacctcaaagcaccacagcatgcacaacagtcaataagagaaaagtacaaaaattcaaagtatcatggtgtttctctcctcaacccaccagagacactaaatctgtaacaatgaaagactgcctttgttttctaagatgtaaatcactcaaagtatatggtgtacagtttttaacttaggttttaattttacaatcatttctgaatacagaagttgtggccaagtacaaattatggtatctattactttttaaatggttttaatttgtatatcttttgtatatgtatctgtcttagatatttggctaattttaagtggttttgttaaagtattaatgatgccagctgtcaggataataaattgatttggaaaacttaaaaaaa

SEQ ID NO: 1084 - protein, 432 aa, Homo sapien
MLGNSAPGPATREAGSALLALQQTALQEDQENINPEKAAPVQQPRTRAALAVLKSGNPRGLAQQQRPKTRRVAPLKDLPVNDEHVTVPPWKANSKQPAFTIHVDEAEKEAQKKPAESQKIEREDALAFNSAISLPGPRKPLVPLDYPMDGSFESPHTMDMSIVLEDEKPVSVNEVPDYHEDIHTYLREMEVKCKPKVGYMKKQPDITNSMRAILVDWLVEVGEEYKLQNETLHLAVNYIDRFLSSMSVLRGKLQLVGTAAMLLASKFEEIYPPEVAEFVYITDDTYTKKQVLRMEHLVLKVLTFDLAAPTVNQFLTQYFLHQQPANCKVESLAMFLGELSLIDADPYLKYLPSVIAGAAFHLALYTVTGQSWPESLIRKTGYTLESLKPCLMDLHQTYLKAPQHAQQSIREKYKNSKYHGVSLLNPPETLNL

SEQ ID NO: 1085 - DNA, 4695 bp, Homo sapien
gggggagggaaacggagcagtaacaagtatcccagagggtgctgctgaggcgacgatggccgaggggcccgaggaagcccgaggccaccctcccgggcaggacgatggcgggggggaccacgagcccgtcccttccctgagaggccctcctaccaccgccgtcccatgcccccgcgacgacccccaggccgaaccccaggccccgggccggcccacagccccgggcctcgcggctgccgccgcagccgacaaattggagccgccgcgcgagctcaggaagcgcggggaggcggcctccggctccggtgcagagctgcaggagcaggcgggctgcgaggcgcccgaagccgcggcgccacgagagagaccagctcggctgagcgcccgcgagtactcccggcaagtgcacgagtggctgtggcagtcctactgcggctacctcacctggcacagcggcctggccgccttcccagcctactgcagcccccagccctccccgcaaagcttcccttcgggcggcgctgcagtcccccaggccgcggcgccgccgcccccgcagctgggctattacaaccccttctacttcctgagccccggggccgcggggcctgacccgcggacagctgccggcatcagcacccctgctccagtcgcgggcctgggaccccgggctcctcacgtgcaggcgtcggtccgggccactccagtgacgagggtaggatccgcagccccttcgcgaagcccgagcgagaccgggcgacaggcaggcagagaatatgttattccatccttggcccacagatttatggcagagatggtggatttctttattctcttctttataaaagcaaccattgtcttaagcattatgcacctcagtgggataaaggatatctctaagtttgctatgcattatataatagaagaaatagatgaagacacatcaatggaagacttgcagaaaatgatggttgtggcacttatatacagattattagtttgtttctatgagataatttgcatttggggagcaggtggagctaccccagggaagttcctgctggggcttcgagttgtgacatgtgatacatcagtgcttattgcaccaagtcgggttttagtgattccttcctcaaatgttagcattacaacgtccactatccgagctttgatcaagaatttttcaattgcttcttttttccctgctttcatcacactgctgttttttcagcataatcgaacagcttatgacattgtagcaggaaccattgtggtaaaaagaaatggggtcagatgatgccccccaaaaccctgatttccacacactaagactaaattatgtatcaaggccatcagtatccctgggttacactaattgatgatttagaaattaaagcagtcactccagtgtgatgcaggtgactactctgaaagtattgattatacttgaatgccaaagaacttgtccagaagaaaaacctgttaaattcaagtattaaaatttttagatcaaaaaggcaaatgattttataaacaatggacaatatatactttcttaagatctaaggtactttcttaagatctaagaatttgctgaaagcattttcagctttgaaatctccaaatgaaactttaaaatttattttggtttatcccaaaataatggaaaatgtccagttgtgttttgtaaacacctatgtaactcatcttttagtttacacttcctggggaaattgtctttggtgtttagaggagggaatgagaacacaaattggataatccactgtctcccatcccaggaggtggtgagttggctacaagagaaagggacaagtgaggcaggcctagcagttcccttacctgaagttttcaaatccatactgcagttccctctcgtaatgatgtaactttacaactattcttaatgcttgaacatgtatttaggggcaagtttctcatgatgatgaaaaagtatcaagtcatattgctatgttaattggtttttttttttaaaaggtaagttagtgattactgttaatggtgggggagtaagttttcactgtaaattgaacttataatttatgtgcaagtgttttcagtgccctgaatcaaactataaatgtggggagaaatcacctccatcaaacagttgcatatttactgtaaaagtattcccagtatgtgtgcagcatgaagaaagtattagtgcttctcagtgttctcagtgtaaattctatttatatacagcatattcacatactactttccttatattttatatagttctatgactgttgaaacatcaaggagttaaaaaaatcttaatatttcatgattaactctaagtactattaatagcttgcgaaatattagcaattttcccattatggactatctctctaaagcaagagagactagcattcccagacatcattctagggtctttaagctcattttgggtctgctaaagtttggggggaaatgttacgcaaagtgatactgtgtatgttgccattttgctttattcttctgttgaagcaaaattgtggggttttattatgtgtgtgtgcttttcctagatgtcccagttagctgtgctgagatatacctgtactatttatggtttaagttttgattcttaggtattttctccagctctgacattgttttccaaagacacactaaactgcattgcacagttcaaaatttgattacttaagggatcaatctaggtggtgttcttggtcttaaatttaacagcaaacacagcacatatctattatcactatattaattttcaaaggtttttctgtgacgtttaaaactgtgacaacagatattcacatttgattatagaaacttaatgtctattaataattttagtacaaaatttcataaaccgtgtttttcaaaataagtttatgtcaaatccagcttcccagaaacactaataattaagtacatcaatgtactaaataaatcattcagttgcacccatggggaagattgtgttactgcccttcacagtgaaaaaaagaaaaatctttcatttttaaaattaggagatgttacgtaacttggcactttagtagtgtatacactagcattagtttatacaccacttttgccgctggggattcaagttgaaatgtccctcaatcatataggtctggaatacatctttcattcataatttctgctcagataattgaatagtttgccatcgagattattttcatttatactataaaacaaaagcaaactagtccagtttaattttttgtacttagaatattgcacattttctatatatgagttattcagattagtatctatgtaggttcagtcagatccaaccatggattcgaggtattatactgtataaccctacaaaatacatagaagtattatttgccttcataatagaacccaagagtctgtttcaatttatgaattcagtatttgcaccgagattttgattcccaaagtttggaaaaaaatgacaaaacaacgagggaagaaggaaccagaccttagtgccacatatttttctcttggggttgtaaggtagtctcctgctttccagaacactttattatatttcacttatagacctgattttctgtgtcaaagtataattctcatgctgaagctgtagcctaaaaagccaaaagaaagttgtcttcattgtacaaacatattcatcactttaacaataagggaacaaaatttagtattcaagctgagtgagaatactggttcaatggacatgtccctaagataaaccagaattggcagttaatttaggcgtctagaaaatctcagttcccaccagtaaaattatcctgagtagctaatgcaccttgagaaaaatctggcatactgaataagtaacattaacttgggagccaagagctgggtaagccttacctttagactactctgtgactacagaaataaagccagcacttttggaactaataagccttcacttgtcagtatcataaagagtattgcccaactgaactttgctcccactggtttaatagttacttatttctgcctaagcactcaccttccgattttacccaagtatatatataggatagaaaaaaatgcattatatttgagagctcacttcgcccgaattacaaaatgagtgtttttagattcaagtgacggtaaaaggatttgttcccttcagtgacttgagtgttttagttatgcataagtatttctagcaaaggaagggtagaaaggaattgaaaattaatttacactagttgctacttgggaataaagggctttttgaggggggtatggatattaaatgttttcgttatatacttatccctattaaaacaggcagttgtttctttgaatatgcctaaataacagtattcttaaaatctgacagacaagtaacatgtcaattacttgatattccttgtctccagtaccacaggccactcttgacatcccatgtttgcctggataaagttcctcatttcaaacagtatacatacttctttgcagttcattatagtaaggcttaacctgtaaacagtatctgatggcccacctataaataaaattcagcattctatttttaataatttgtatgccaccaatttgtattatttgtctcaataaatacttagtcatcgatgcaaaaaaaaaaaaaaaaaaaaaaaa

SEQ ID NO: 1086 - protein, 413 aa, Homo sapien
MAEGPEEARGHPPGQDDGGGDHEPVPSLRGPPTTAVPCPRDDPQAEPQAPGRPTAPGLAAAAAADKLEPPRELRKRGEAASGSGAELQEQAGCEAPEAAAPRERPARLSAREYSRQVHEWLWQSYCGYLTWHSGLAAFPAYCSPQPSPQSFPSGGAAVPQAAAPPPPQLGYYNPFYFLSPGAAGPDPRTAAGISTPAPVAGLGPRAPHVQASVRATPVTRVGSAAPSRSPSETGRQAGREYVIPSLAHRFMAEMVDFFILFFIKATIVLSIMHLSGIKDISKFAMHYIIEEIDEDTSMEDLQKMMVVALIYRLLVCFYEIICIWGAGGATPGKFLLGLRVVTCDTSVLIAPSRVLVIPSSNVSITTSTIRALIKNFSIASFFPAFITLLFFQHNRTAYDIVAGTIVVKRNGVR

SEQ ID NO: 1087 - DNA, 3443 bp, Homo sapien
agtcaggggtcacggcggcgtaggctgtggcgggaaacgctgtttgaagcgggatggatggcaagcggcggccaggcccagggcccggggtgcccccaaagcgggcccgtgggggcctctgggatgatgatgatgcaccttggccatcccaattcgaggaggacctggcactgatggaggagatggaggcagaacacaggctgcaggagcaggaggaggaggagctgcagtcagtcctggagggggttgcagacgggcaggtcccaccatcagccatagatcctcgctggcttcggcccacaccaccagcgctggacccccagacagagcccctcatcttccaacagttggagattgaccattatgtgggcccagcgcagcctgtgcctggggggcccccaccatcccgcggctccgtgcctgtgctccgcgccttcggggtcaccgatgaggggttctctgtctgctgccacatccacggcttcgctccctacttctacaccccagcgccccctggtttcgggcccgagcacatgggtgacctgcaacgggagctgaacttggccatcagccgggacagtcgcggggggagggagctgactgggccggccgtgctggctgtggaactgtgctcccgagagagcatgtttgggtaccacgggcacggcccctccccgttcctgcgcatcaccgtggcgctgccgcgcctcgtggccccggcccgccgtctcctggaacagggcatccgtgtggcaggcctgggcacgcccagcttcgcgccctacgaggccaacgtcgactttgagatccggttcatggtggacacggacatcgtcggctgcaactggctggagctcccagctgggaaatacgccctgaggctgaaggagaaggctacgcagtgccagctggaggcggacgtgctgtggtctgacgtggtcagtcacccaccggaagggccatggcagcgcattgcgcccttgcgcgtgctcagcttcgatatcgagtgcgccggccgcaaaggcatcttccctgagcctgagcgggaccctgtcatccagatctgctcgctgggcctgcgctggggggagccggagcccttcctacgcctggcgctcaccctgcggccctgtgcccccatcctgggtgccaaggtgcagagctacgagaaggaggaggacctgctgcaggcctggtccaccttcatccgtatcatggaccccgacgtgatcaccggttacaacatccagaacttcgaccttccgtacctcatctctcgggcccagaccctcaaggtacaaacattccctttcctgggccgtgtggccggcctttgctccaacatccgggactcttcattccagtccaagcagacgggccggcgggacaccaaggttgtcagcatggtgggccgcgtgcagatggacatgctgcaggtgctgctgcgggagtacaagctccgctcccacacgctcaatgccgtgagcttccacttcctgggcgagcagaaggaggacgtgcagcacagcatcatcaccgacctgcagaatgggaacgaccagacccgccgccgcctggctgtgtactgcctgaaggatgcctacctgccactgcggctgctggagcggctcatggtgctggtgaacgccgtggagatggcgagggtcactggcgtgcccctcagctacctgctcagtcgtggccagcaggtcaaagtcgtatcccagctgttgcggcaggccatgcacgaggggctgctgatgcccgtggtgaagtcagagggcggcgaggactacacgggagccactgtcatcgagcccctcaaagggtactacgacgtccccatcgccaccctggacttctcctcgctgtacccgtccatcatgatggcccacaacctgtgttacaccacgctccttcggcccgggactgcacagaaactgggcctgactgaggatcagttcatcaggacccccaccggggacgagtttgtgaagacctcagtgcggaaggggctgctgccccagatcctggagaacctgctcagtgcccggaagagggccaaggccgagctggccaaggagacagaccccctccggcgccaggtcctggatggacggcagctggcgctgaaggtgagcgccaactccgtatacggcttcactggcgcccaggtgggcaagttgccgtgcctggagatctcacagagcgtcacggggttcggacgtcagatgatcgagaaaaccaagcagctggtggagtctaagtacacagtggagaatggctacagcaccagtgccaaggtggtgtatggtgacactgactccgtcatgtgccgattcggcgtgtcctcggtggctgaggcgatggccctggggcgggaggccgcggactgggtgtcaggtcacttcccgtcgcccatccggctggagtttgagaaggtctacttcccatacctgcttatcagcaagaagcgctacgcgggcctgctcttctcctcccggcccgacgcccacgaccgcatggactgcaagggcctggaggccgtgcgcagggacaactgccccctcgtggccaacctggtcactgcctcactgcgccgcctgctcatcgaccgagaccctgagggcgcggtggctcacgcacaggacgtcatctcggacctgctgtgcaaccgcatcgatatctcccagctggtcatcaccaaggagctgacccgcgcggcctccgactatgccggcaagcaggcccacgtggagctggccgagaggatgaggaagcgggaccccgggagtgcgcccagcctgggcgaccgcgtcccctacgtgatcatcagtgccgccaagggtgtggccgcctacatgaagtcggaggacccgctgttcgtgctggagcacagcctgcccattgacacgcagtactacctggagcagcagctggccaagcccctcctgcgcatcttcgagcccatcctgggcgagggccgtgccgaggctgtgctactgcggggggaccacacgcgctgcaagacggtgctcacgggcaaggtgggcggcctcctggccttcgccaaacgccgcaactgctgcattggctgccgcacagtgctcagccaccagggagccgtgtgtgagttctgccagccccgggagtctgagctgtatcagaaggaggtatcccatctgaatgccctggaggagcgcttctcgcgcctctggacgcagtgccagcgctgccagggcagcctgcacgaggacgtcatctgcaccagccgggactgccccatcttctacatgcgcaagaaggtgcggaaggacctggaagaccaggagcagctcctgcggcgcttcggaccccctggacctgaggcctggtgaccttgcaagcatcccatggggcgggggcgggaccagggagaattaataaagttctggacttttgct

SEQ ID NO: 1088 - protein, 1107 aa, Homo sapien
MDGKRRPGPGPGVPPKRARGGLWDDDDAPWPSQFEEDLALMEEMEAEHRLQEQEEEELQSVLEGVADGQVPPSAIDPRWLRPTPPALDPQTEPLIFQQLEIDHYVGPAQPVPGGPPPSRGSVPVLRAFGVTDEGFSVCCHIHGFAPYFYTPAPPGFGPEHMGDLQRELNLAISRDSRGGRELTGPAVLAVELCSRESMFGYHGHGPSPFLRITVALPRLVAPARRLLEQGIRVAGLGTPSFAPYEANVDFEIRFMVDTDIVGCNWLELPAGKYALRLKEKATQCQLEADVLWSDVVSHPPEGPWQRIAPLRVLSFDIECAGRKGIFPEPERDPVIQICSLGLRWGEPEPFLRLALTLRPCAPILGAKVQSYEKEEDLLQAWSTFIRIMDPDVITGYNIQNFDLPYLISRAQTLKVQTFPFLGRVAGLCSNIRDSSFQSKQTGRRDTKVVSMVGRVQMDMLQVLLREYKLRSHTLNAVSFHFLGEQKEDVQHSIITDLQNGNDQTRRRLAVYCLKDAYLPLRLLERLMVLVNAVEMARVTGVPLSYLLSRGQQVKVVSQLLRQAMHEGLLMPVVKSEGGEDYTGATVIEPLKGYYDVPIATLDFSSLYPSIMMAHNLCYTTLLRPGTAQKLGLTEDQFIRTPTGDEFVKTSVRKGLLPQILENLLSARKRAKAELAKETDPLRRQVLDGRQLALKVSANSVYGFTGAQVGKLPCLEISQSVTGFGRQMIEKTKQLVESKYTVENGYSTSAKVVYGDTDSVMCRFGVSSVAEAMALGREAADWVSGHFPSPIRLEFEKVYFPYLLISKKRYAGLLFSSRPDAHDRMDCKGLEAVRRDNCPLVANLVTASLRRLLIDRDPEGAVAHAQDVISDLLCNRIDISQLVITKELTRAASDYAGKQAHVELAERMRKRDPGSAPSLGDRVPYVIISAAKGVAAYMKSEDPLFVLEHSLPIDTQYYLEQQLAKPLLRIFEPILGEGRAEAVLLRGDHTRCKTVLTGKVGGLLAFAKRRNCCIGCRTVLSHQGAVCEFCQPRESELYQKEVSHLNALEERFSRLWTQCQRCQGSLHEDVICTSRDCPIFYMRKKVRKDLEDQEQLLRRFGPPGPEAW

SEQ ID NO: 1089 - DNA, 2367 bp, Homo sapien
aataggaaagctgcaaaacactgtggagtgctcccgtgtaaataaaaagaggaaaaaagtttctcaagtcgccgctgcacgacgtctggccggcgctggagcgggggtctgcgctctcccgagcggccgcgcgctggactttattgtgccgcaaccagccccagttcccattgtttgtgtttttttcaaaatatggcaaaggttcaggtgaacaatgtagtggtgctggataacccttctcctttctacaacccgttccagttcgagatcaccttcgagtgcatcgaggacctgtctgaagacttggaatggaaaattatctatgtgggctctgcagaaagtgaagaatacgatcaagttttagactctgttttagtgggtcctgttcccgcaggaaggcatatgtttgtatttcaggctgatgcacctaatccaggactcattccagatgcagatgcagtaggcgtaactgttgtgctaattacttgtacctatcgaggacaagaatttattagagttggctattatgtaaataatgaatatactgagacagaattaagggaaaatccaccagtaaaaccagacttttctaagcttcaaaggaatattttggcatctaatcccagggtcacaagattccacattaattgggaagataacacagaaaaactggaagatgcagagagcagtaatccaaatctacagtcacttctttcaacagatgcattaccttcagcatcaaagggatggtccacatcagaaaactcactaaatgtcatgttagaatcccacatggactgcatgtgaccacctaccatccctttagtacaaattaagctattaaaaatacacagaactatttccctgaattccgtaagtacatagtcaaaacacaatgtgaagaatttgtttaaaaacatcctgtagaaagtttataagaaaaccagtatttgaacaaattgtggaatataaatacaactatttttaagtaatttttttctctaatgtgttattttatttgttctgaaactaatctgattaaagcatatatattattttcttctcctttatatgtaatgaaagcacttataaagaaacaggaatcattagaccaggttgtaaagatgtcttggcctcccagacagtctttggaccactattttactggcctttgaaagaacaaagtttacttcaactaaaatgtttcttcctgtgaagacatatggtatcattttaatttaaggggcagatttccattcttttttggcatgtccttaaaaagaggatttgaaatcaactatatgctaccaagaactttaggatccaattttccaagccaccgtgaagcctcttatggctactattatagttcatgagatgttggacagcatttggtttgtttggtaagagaagaacaaatatggctaattgttaataaggtcccctggctatggtttttgttcttataacagagtttagaatatcagagcatttcttgaatcatacatcattattgtccagtgaattcaagaccgaatacaatatcgggagaaaatacaaactccctgtgtttaagaataggggattataatggctcaaattggttcatttgatttctaaaaataccatgacctttaaaaattcttttaatagatcatgttattggcagtatttatataaaaaccatggatttagaaaggtatatttagctttattataatagatacgttactattttggaaatatatatattttcacacctgtagtactcttccccatttcctctgacactcatgcagaatgagatcaggcatatttgtggttgacatactctagatagcttttccaacaaatctttgaaaagcaatcttggaaaggaattcattaactaaatggggtaaaaggtttctttttctttgagagttaagtccttcctcaaaaaattttcttatgctccataaaattgaggtagaatactttcattattcttgcagctaagcaagacagccatatgatgcaggttatgcagtgccttcatatctaaaacttttatactgcactttttaaagcttttatgttgaggaaaggaaaagggcatttgtctaaacatggattctgagttgtatatatttcctatcattctaaaaaagtgaatttgtgaagcaaagttttgccagatgttaaactttgaatttaatataccagattattaaaatattgtccattaactagttcatagattttaaaagtaaaatacttctgactgttaaaactatataaagaaaatctcatttgtctaattgcaattaaaagaaaaatgttaaaatattaaaatgaaaataaaagcattactttccaaaaaaaaaa

SEQ ID NO: 1090 - protein, 204 aa, Homo sapien
MAKVQVNNVVVLDNPSPFYNPFQFEITFECIEDLSEDLEWKIIYVGSAESEEYDQVLDSVLVGPVPAGRHMFVFQADAPNPGLIPDADAVGVTVVLITCTYRGQEFIRVGYYVNNEYTETELRENPPVKPDFSKLQRNILASNPRVTRFHINWEDNTEKLEDAESSNPNLQSLLSTDALPSASKGWSTSENSLNVMLESHMDCM

SEQ ID NO: 1091 - DNA, 6905 bp, Homo sapien
ggtaatgcttaaacttcctgcctcttttgcctctacaggaaagaagaaagaacacaagaaagtgaagtccactagggatattgttcctttttctgaacttggaactactccctctggtggtggattttttcagggtatttcttttcctgaaatctccacccgtcctcctttgggcagtaccgaactacaggcagctaagaaagtacatacttctaagggagacctacctagggagcctcttgttgccacaaacttgcctggcaggggacagttgcagaagttagcctctgaaaggaatttgtttatttcatgcaagtctagccatgataggtgtttagagaaaagttcttcgtcatcttctcagcctgaacacagtgccatgttggtctctactgcagcttctccttcactgattaaagaaaccaccactggttactataaagacatagtagaaaatatttgcggtagagagaaaagtggaattcaaccattatgtcctgagaggtcccatatttcagatcaatcgcctctctccagtaaaaggaaagcactagaagagtctgagagctcacaactaatttctccgccacttgcccaggcaatcagagattatgtcaattctctgttggtccagggtggggtaggtagtttgcctggaacttctaactctatgcccccactggatgtagaaaacatacagaagagaattgatcagtctaagtttcaagaaactgaattcctgtctcctccaagaaaagtccctagactgagtgagaagtcagtggaggaaagggattcaggttcctttgtggcatttcagaacatacctggatccgaactgatgtcttcttttgccaaaactgttgtctctcattcactcactaccttaggtctagaagtggctaagcaatcacagcatgataaaatagatgcctcagaactatcttttcccttccatgaatctattttaaaagtaattgaagaagaatggcagcaagttgacaggcagctgccttcactggcatgcaaatatccagtttcttccagggaggcaacacagatattatcagttccaaaagtagatgatgaaatcctagggtttatttctgaagccactccactaggaggtattcaagcagcctccactgagtcttgcaatcagcagttggacttagcactctgtagagcatatgaagctgcagcatcagcattgcagattgcaactcacactgcctttgtagctaaggctatgcaggcagacattagtgaagctgcacagattcttagctcagatcctagtcgtacccaccaagcgcttgggattctgagcaaaacatatgatgcagcctcatatatttgtgaagctgcatttgatgaagtgaagatggctgcccataccatgggaaatgccactgtaggtcgtcgatacctctggctgaaggattgcaaaattaatttagcttctaagaataagctggcttccactccctttaaaggtggaacattatttggaggagaagtatgcaaagtaattaaaaagcgtggaaataaacactagtaaaattaaggacaaaaagacatctatcttatctttcaggtactttatgccaacattttcttttctgttaaggttgttttagtttccagatagggctaattacaaaatgttaagcttctacccatcaaattacagtataaaagtaattgcctgtgtagaactacttgtcttttctaaagatttgcgtagataggaagcctggtacaaacaatttaacgctttctagatcacatattagtctctaagttgttttctgtttcctgctttacttatgtttttacaattctccaaaactaagaaaattctaattaggatataaggagtatttactgttcaatagaataatatgcatcctcctttatacctaggacagaattaaacatttgttacacattcagaacagtgatgttgttctttttgatacttttatctcagtatcttttcacgttccataacttgtccatatttttgctcatattttcttacttttctttgttatttattcatgtctgcaacatcaatcatagtagtctagatcaatgcaactcaaagcaccagtctacaaactgttacttatccacaggcaagataagcatgcacaagaatttaaatctagagatactttttaggtcaatgacaggatttgattttttagcaaaattttattaatagctaaagcaatgtattgatttacactctgatgcaagtaatttatctcttcattgactggtagcaaccaattcatggaccagtaccatggaccacactttgagaaacacttctttggataataatagatatcctgggatagtgcatgttcaccatctattttgtcagataatggggccttttaaaaaataatactttgctttcatgatatattgtattttgtggaaagttaagtttagcaatatagactctaaaagcaaattaaatttttttaagccataagaaattatactatatcccagtatctgtatgtctgtataaagcagtgtattatcatgttttcatttctgtgattgtaagttaagagtcttaactgcagaggtattgtggaaagtagtagccttaagcataataaaatatggtctcttgggtactccctctggccattaccacattcttagattatatgtgtccatctttgcagctttctgagagtaattttatttgttgtcttctgaaatgtacatgtatacatgtacctactgagtgctatgtgatttttaaaaatgtattactgtagaatgcttctgcaaattcaataaagttgttaaatttgaacagtgttgtgtggtctccagaaacatgttgttctgtgtgctttattcttggagttgcaacaagttaaatatttgtatatgaacaccccttttccatttcatcattgaaactcactttgacatttcagtggtataattgaaaatattctgattatggtatggtttttcttctgtttgaggaccatgtttttattgactgttggaatctaaatttataagaggaattaatctgtaaccagataccttattcgtttaaccgatttctattccactactaatggttttttttactttgtgctttctagttcttagattctgagttaacaaagcataaaatagattttatattgctgggggttgtaccaaacatagatacattgacagatccattgatagaagtgttgggagatggacttgaaatcttagtcctaaataaagactgaactgtttaaactaacttgataaaaatcactgttcgtttttgggaacctgcaagtattaaatagattctgtactaactagtattaacactggaaagttagcaagacacatatagatgtcttgaccactttttcacacaagttcagagttcatgtaaaactttagaattgacttcctttctgtctcttcagtaagaaagtaatctaacttaaatttttggtagtagaagttttagaaataacaactgactaattttgctataccatgataaatgtctacaaaaagggatttttttttttttgaaatgaagtttcgctcttgtccccaaagctggagtgcaatggtgtgatctcagctcgctgcaacctccgcctcccaggttcaagcaattctcctgccttagcctcctgagtagctgggattacaggtgtctgccaccaaccctggctaatgtttgtatttttagtagagacggggtttcaccatgttggccaggatggtcttaagctgacctcaggtgatccgcccacctcggccttccaaagtgctgggattacaagcgtgagccaccatgccctgccagggatgttaactaaaatcagtcttttcaaaacctagatcttcaaatgatgatgaatttaagactaggagactggaatattgaagcctattaaaaaatacatatccttgcgttgttaggttaataactatcatggtgacaagtgtataagtattggcttcttttcaaagaaatgttatttttattataaggactgggacgagaagtgacctgtgattggtcgtatttttctgtgaacaagattccttctttacctgagttgtacctaggttttttataactacatcaaaaaagcttttatattgtacttattaatgttatggcagttacttatagaagcttggtactatatggatttttttcatttttaaactttcccttctatgttccaaattttaatttagtaagtcaacctttgctgtacagtagtagtatactgtatggacaaaacaatggtaacaattgtgttattttaaatggcctttttccacatctaaattgttcttactgaaaagctttcgtgggagcattttgaactcacttcatgttcaaagctatgagtcccagataaaggaaaggagaataggtaggaagaagtggttgtcagatgaaagggtaagggagataagcaaaaatgggataaataatgaaacagttttcaagacaaattgcagttaaacaattttggactagtgaggtattaccagtagacttgtttttcaccttttaatgtgcctaaaaccagggttcccgattaatattaggataacatcatcatttattgagtgtttcagagagtaatggtttctccaatgttatttccagactctaaaatagagctcaagcttgagaagagagaaccactaaagggcagagcaaagactccagtaacactcaagcaaagaagagttgagcacaatcaggtatctttagttttattaccaccgtgtacaggtataaataacctcctgacaacactaatccatgttttagcctttaatggttgacacccagattccagcacgctcaataaacttaattctgttgttaaatgatactaaaaatctaaactttgtgggttttgtcagtagtgtagcctgtgattacagcaaaagcaaatttttaatgtctcatttgtgtttgagtctgtgctagatgtagttcaaagccagttatatggtgttttgaaagaaatattttaaaaggtggaaatatctagacacttttgatacaatttctttaaaaggcaatggaagggttttatatttgtgtctttgtctctagatttctgactttgattttatgtttgcctgtcttgtcttctgcgattctttcctaaactcagaagctagtctggtcctaagactacagttttctttccttatttcagatgaaaatttaccttttctattgtgggagaggcgtttcagtttttcaaaagggaaatgtaggaaactaaggagaaaataagcataggtataaatgaacagagaacaaattattgactaacctagtattgtttacagagaacaaattattgactaacctagtattgtttacagagaacaaattattgactaacctagtattgtttacagagaacaaattattgactaatgcagcattgatttggctgatgctttataagacagctattcctagagtcattttccttacccctgctatgtctagctggatgatttgtctagttggttatcttttccatctcctatttgtcactttgtgtgtttgtttgtgacggagttttgctcttgtcacccgggctggagtgcagtggcgtgatcccatctcattgcaacctccaccctgctgggctcaagcgattctcctgcctcagcctcccaagtagctgggattacaggcacatgccaccacgctcagctaatttttgtatttttagtagagacggggtttcaccgtgttggccaggctggtctcaaactcctgacctcaggtgatccacctgcattggcctccgaaagtgctgggattacaggtgtgagccaccgcgcccagcctgtttgtcgttttaaaatcaaatccttagaggaattattcttgattccttaaggcaagtcagtctctctcttcatttgatgtagttgataagttgaatttcagaacgatttgttagaaatgagctttgtgacaagaacatacagagcattgaatgaatgaagactttgttaacatagaaccaaatactggaatacatgttttattgcccttttatgtagtagtcctaacaaatagcttcaggagcatgctgaagaataaggaaataggccgggcgcagtggctcacgcctgtaatcccagcactttgggaggccgaggcgggcggatcacctgaggtccggagttcgagacgagcctgaccaacatggagaaaccctgtctctactaaaaatacaaaattagccaggcatggtggtgcatgcctgtaatcctagctactccggaggctgaggcaggagaatcgcttgaaccttggaggcggaggttgctgtgagccgagatcgcgccattgcactctagcctgggcaacaagagcgaaactctgtctcaaaaataaataaataaataaataaataataaagatggtctaagggataattgagttggaggaatctaaactgaggagcagaataaatagtcaaaggagtgtaggtttagatgacaggcagaattagacagtggctttattgcagaaaatttaaaacatgtagaagagtggagggaagagtttaatgaccctccagtcatagatgtgccacagttgtcagtgttttaccagtttggtttcatcaccccacaccctccagctttttaaattactttttttttttttttttttttgagacagaatctcactctgtcgcccaggttggagtgcagtggcacaatctcggctcacttgcaacctccgcctcctgggttcaagcagttctcctgcttcagcctcctgagtagctgggattacaggttcccgccaccatgcccagctagtttttgaattc

SEQ ID NO: 1092 - DNA, 4833 bp, Homo sapien
gccatttcctcctcttgttttcactccggattctccatgttggacccaaactgaggagcccggagctgccgctgggggatcggggccgggggcacccgggggagccgctgcccgggccgcccgccctttgtacaggccgcctcccttcccggtccggggaggaaacgagaggggggatgtgaacagctgtggaagtcggagtctcgggagccggagcgggcccccgcccaggccccccagcccagcccagcccgcgcgcccgcccgtcctcccgtccagccagcccgggcccgcgggattgttagatggaacacggctccatcatcacccaggcgcggagggaagacgccctggtgctcaccaagcaaggcctggtctccaagtcctctcctaagaagcctcgtggacgtaacatcttcaaggcccttttctgctgttttcgcgcccagcatgttggccagtcaagttcctccactgagctcgctgcgtataaggaggaagcaaacaccattgctaagtcggatctgctccagtgtctccagtaccagttctaccagatcccagggacctgcctgctcccagaggtgacagaggaagatcaaggaaggatctgtgtggtcattgacctcgatgaaacccttgtgcatagctcctttaagccaatcaacaatgctgacttcatagtgcctatagagattgaggggaccactcaccaggtgtatgtgctcaagaggccttatgtggatgagttcctgagacgcatgggggaactctttgaatgtgttctcttcactgccagcctggccaagtatgccgaccctgtgacagacctgctggaccggtgtggggtgttccgggcccgcctattccgtgagtcttgcgtgttccaccagggctgctacgtcaaggacctcagccgcctggggagggacctgagaaagaccctcatcctggacaactcgcctgcttcttacatattccaccccgagaatgcagtgcctgtgcagtcctggtttgatgacatggcagacactgagttgctgaacctgatcccaatctttgaggagctgagcggagcagaggacgtctacaccagccttggggcagctgcgggccccttagcctgccctgcttccaagcgacggccatcccagtaggggactttcccacactgtgcctttacgatcagcgtgacagagtagaagctggagtgcctcaccacacggcccggaaacagcgggaagtaactggaaagagctttaggacagcttagatgccgagtgggcgaatgccagaccaatgatacccagagctacctgccgccaacttgttgagatgtgtgtttgactgtgagagagtgtgtgtttgtgtgtgtgttttgccatgaactgtggccccagtgtatagtgtttcagtgggggagaagctgaaagaccaagactcttcccaagttagcttgtctcctctcctgtcaccctaagagccactgagttgtgtagggatgaaractattgaagactccattgccaaaccatggcctttcctcagtgttgtaaggcctatgccaaggataaaggaagggtatgcctttgggtactccaggcatacacctttctgaaatccttctccagccagctgctgcagacaaaagatcacatttctgggaagatgagaacttgtttccagaccagcatccagtggccatcaggtcttgtggcccaaaggctatgcttgcctccggctgagtgcctgggataggccttttctatgtctccccaaggctggggtgctgagcctgccttcctcaccacctagccatagtctcaaacctgtggggaaggaggttttctccctgcccgggaagaggacagataactgatttccgttcttttgactgtgttttaaaattctctttctaaacacagagtgttgggcctggtttgtttctgacaaagttacagtcctgggcctgtaatgaatgtcggcggcgctggggttgcagggaaaagacaaatcctcaaagcgtggacgtgtgtccccatggcttgtggatcagctaagctcgggatcatttccataagtctgcttttcagggattctctgctggtgctggtgcaaggacttctgttccaaaggctgggaaaaactaagctgtcccagcccctcccatttcttgggcagggctcttttcctgttgtgtcttcccccagggcctgtcctgtaccgagctctgtctgttccagcctacatccttcctgggtgttgcttttcctcttaagggcctcagaactcttgctcttcctggggtgagggggaatgagtgttcttgacatgtgacagcctaatgcgcatgctttctgcctctggtaacaggagtgagtgagcccctcagacctgcactctgggtgtctcctgcttacaaaggttcttaatagtgaatgctttaaaattaaagtcatcacgaaatggaagttttcccagggtggaaaataagaggaagtgctgctgtaattgggagcacaaggggcctcccaaaaaggagccccacctcagcatcactgccttaatcgtggcctccctggggtgggtggggttctctcctccctccctccctcctcctggggtgggagggcgctcctgttcccatctctgtgttccctggaggcaggtatcacaaagcatttgtgaattgctttaggtgcagggacaccacccactcaggactcttccccatcatcccttccattgccacaccctagatccagcctcaggaactaacaagttktgagaaaagcaggtggtagagcagcagcttcgtgctctcagcggtggctggctggcatttttctctagcgttgtggtgccaccttcccttcttgtcccaaggttataaggccttgtctttctctttggaatcataaagtggaacagagtccccagaactcatgtgghcatttccgacagcatcactccccggtgcctatggggtcccggtgtacctaaagggagaaggaccccatgtgctagccagaaatatactgtctcttgaaggaaagcaggagctcagactcttagagccagctgtggcttcggacccaaggcctgacctaggctgctatcctaatattggaggaggggcctctcttccaagccccaccctaagggttagcccttggacaaatcttgtgccgtctaggcccagccaggcttttctgactaaataagcaataagaggctctaagctgactgagttgcaaggaccctttccgccctcccttggatctccatgtttctccagatggcggaagagcatgtgccaccccctttcctaacagacttgtccaagtgcttggcgtgggacccatgaccaaagcccaggatggcttggtgggagtgtccctgctgcatctgcatgaagcccctgctttttaggcctcactcccatcagaaccctgcctgcccacctgcaactcccccccaacaatgccattcccacttgccccagagaagctactcggccaaacctagccagggtctgttcttgtggaccagagccagcctagtcattatttgctgtcgggtttccagtttcaccgtgtgttagggtgagggatgattgtaaaatttgctcctcaaaggaatcaggccagactcaattttgggagggcaagacagggaggaggccgcttcatcccagactctcttctagggcttcccaccatcagcccctcccacttgagactggtctttgggaggcaataggccaccatgcctggtcagcaccaattcaagccatgccaggaatctgcctacctgccaggttcagttcttttaaggtgcctcttcagggacacagtgtgtctctctgattgggcttctaaatcaaaagcctgatgttcgtgtccctctcatagggggagctttggacacaggaccagtttggaaaagggtcaggtaagggtttccactctgcacattgtagagggaacactctgtaggcccatgggtcccttactagagaggttgagtgaatttgccttcagttaacatgggaccttctgtttagcttcctcttgcttcccaaagattttaagcattttgtaaatgtataaactcacctctggtaacagtggcccagacgctgctttgtgctaaaagcatgggaaatgtaaaggcagtctttctctgggaaatggatgctattctattctgctgcccctacctgttcctgaggcctcatttagaaagaaaatcccctcagaaggctgtctggcacccagtgtcctagccaggccaagtatatgagaaaggtaagtccattttccccttcaggtcctcagtggattacttaaccactgctgtccctcggtccctttttcctaaacgggtttagttctgtcttttttctccttttttctaaatgctggtaaatatttacattcagccagggaagaggaggccagaggtcgggccagctgccccattcttttaacgttgtagggcctgcccatggagcggaccctcctctttgggcctcgtgagcttttttgcttatcatgttccatttcgtgccgctttcccccttcaagatgccatttggagggtaggggatctgcttcccactgtgactgggctatgggattctgactaccttgcttacagattcatggtttgataaatttgttgtattccaaaacttgaaatgcaggacgccattaagtgtctgtttatatttttggaatatttgtattacttacaattaattaataaaagtgggtttaaaaaacctttccaggaaaaaaaaaaaaaaaaaaaaaaaaaaaaaaaaaaaaa

SEQ ID NO: 1093 - protein, 283 aa, Homo sapien
MEHGSIITQARREDALVLTKQGLVSKSSPKKPRGRNIFKALFCCFRAQHVGQSSSSTELAAYKEEANTIAKSDLLQCLQYQFYQIPGTCLLPEVTEEDQGRICVVIDLDETLVHSSFKPINNADFIVPIEIEGTTHQVYVLKRPYVDEFLRRMGELFECVLFTASLAKYADPVTDLLDRCGVFRARLFRESCVFHQGCYVKDLSRLGRDLRKTLILDNSPASYIFHPENAVPVQSWFDDMADTELLNLIPIFEELSGAEDVYTSLGAAAGPLACPASKRRPSQ

SEQ ID NO: 1094 - DNA, 502 bp, Homo sapien
ctgtcgccctgcacggtgacccgcgtgtgcgaggccttcatggccaggatccgggtggagaggcgctgctgacaccgccgccacaccgccgccacaccgccgctgcctcagtcatgccgaagcacgagttctctgtggacatgacctgtggaggctgtgctgaagctgtctctcgggtcctcaataagcttggaggagttaagtatgacattgacctgcccaacaagaaggtctgcattgaatctgagcacagcatggacactctgcttgcaaccctgaagaaaacaggaaagactgtttcctaccttggccttgagtagcaggggcctggtccccacagcccacaggatggaccaaagggggcaggatgctgatcctcccgctggcttccagacagacctgggacttggcagtcatgccgggtgatcgtgttcctgcggagaccctcagttgtcctattccttcctagcttccctgcaataaatcaagctgcttttgttgg

SEQ ID NO: 1095 - protein, 68 aa, Homo sapien
MPKHEFSVDMTCGGCAEAVSRVLNKLGGVKYDIDLPNKKVCIESEHSMDTLLATLKKTGKTVSYLGLE

SEQ ID NO: 1096 - DNA, 1347 bp, Homo sapien
gtcttgacgtgagctagctggcatggcggcctgcattgcagcggggcactgggctgcaatgggcctaggccggagtttccaagccgccaggactctgctccccccgccggcctctatcgcctgcagggtccacgcggggcctgtccggcagcagagcactgggccttccgagcccggtgcgttccaaccgccgccgaaaccggtcatcgtggacaagcaccgccccgtggaaccggaacgcaggttcttgagtcctgaattcattcctcgaaggggaagaacagatcctctgaaatttcaaatagaaagaaaagatatgttagaaaggagaaaagtactccacattccagagttctatgttggaagtattcttcgtgttactacagctgacccatatgccagtggaaaaatcagccagtttctggggatttgcattcagagatcaggaagaggacttggagctactttcatccttaggaatgttatcgaaggacaaggtgtcgagatttgctttgaactttataatcctcgggtccaggagattcaggtggtcaaattagagaaacggctggatgatagcttgctatacttacgagatgcccttcctgaatatagcacttttgatgtgaatatgaagccagtagtacaagagcctaaccaaaaagttcctgttaatgagctgaaagtaaaaatgaagcctaagccctggtctaaacgctgggaacgtccaaattttaatattaaaggaatcagatttgatctttgtttaactgaacagcaaatgaaagaagctcagaagtggaatcagccatggcttgaatttgatatgatgagggaatatgatacttcaaaaattgaagctgcaatatggaaggaaattgaagcgtcgaaaaggtcttgattctgagaatgaatttggttagttgcagaagatacattggctctaagaggatatattttgagaccaatttaatttcatttataagaacatagtaattaagtgaactaagcattcattgttttattaatactttttttctaaaataaaacttgtacaccagtttattactctaaaaagagaattacacatgccaaatggaccaatgtccatttgcttattggaggcaaagctacaatagaagtcagagcatcaccagaatggtctttaatgagcatggaacctgagcaaagggaataggtgggatgaattttttttttaattgtgaaacaattcataagcacaatatgatttacagaataataaacattcatgtacccactatcaggttaagaaatagaacatttattaatatgtaggaatgttaagaaataaaacatttaataaga

SEQ ID NO: 1097 - protein, 280 aa, Homo sapien
MGLGRSFQAARTLLPPPASIACRVHAGPVRQQSTGPSEPGAFQPPPKPVIVDKHRPVEPERRFLSPEFIPRRGRTDPLKFQIERKDMLERRKVLHIPEFYVGSILRVTTADPYASGKISQFLGICIQRSGRGLGATFILRNVIEGQGVEICFELYNPRVQEIQVVKLEKRLDDSLLYLRDALPEYSTFDVNMKPVVQEPNQKVPVNELKVKMKPKPWSKRWERPNFNIKGIRFDLCLTEQQMKEAQKWNQPWLEFDMMREYDTSKIEAAIWKEIEASKRS

SEQ ID NO: 1098 - DNA, 10412 bp, Homo sapien
gtaattgcgagcgagagtgagtggggccgggacccgcagagccgagccgacccttctctcccgggctgcggcagggcagggcggggagctccgcgcaccaacagagccggttctcagggcgctttgctccttgttttttccccggttctgttttctccccttctccggaaggcttgtcaaggggtaggagaaagagacgcaaacacaaaagtggaaaacagttaatgaccagccacggcgtccctgctgtgagctctggccgctgccttccagggctcccgagccacacgctgggggtgctggctgagggaacatggcttgttggcctcagctgaggttgctgctgtggaagaacctcactttcagaagaagacaaacatgtcagctgctgctggaagtggcctggcctctatttatcttcctgatcctgatctctgttcggctgagctacccaccctatgaacaacatgaatgccattttccaaataaagccatgccctctgcaggaacacttccttgggttcaggggattatctgtaatgccaacaacccctgtttccgttacccgactcctggggaggctcccggagttgttggaaactttaacaaatccattgtggctcgcctgttctcagatgctcggaggcttcttttatacagccagaaagacaccagcatgaaggacatgcgcaaagttctgagaacattacagcagatcaagaaatccagctcaaacttgaagcttcaagatttcctggtggacaatgaaaccttctctgggttcctgtatcacaacctctctctcccaaagtctactgtggacaagatgctgagggctgatgtcattctccacaaggtatttttgcaaggctaccagttacatttgacaagtctgtgcaatggatcaaaatcagaagagatgattcaacttggtgaccaagaagtttctgagctttgtggcctaccaagggagaaactggctgcagcagagcgagtacttcgttccaacatggacatcctgaagccaatcctgagaacactaaactctacatctcccttcccgagcaaggagctggctgaagccacaaaaacattgctgcatagtcttgggactctggcccaggagctgttcagcatgagaagctggagtgacatgcgacaggaggtgatgtttctgaccaatgtgaacagctccagctcctccacccaaatctaccaggctgtgtctcgtattgtctgcgggcatcccgagggaggggggctgaagatcaagtctctcaactggtatgaggacaacaactacaaagccctctttggaggcaatggcactgaggaagatgctgaaaccttctatgacaactctacaactccttactgcaatgatttgatgaagaatttggagtctagtcctctttcccgcattatctggaaagctctgaagccgctgctcgttgggaagatcctgtatacacctgacactccagccacaaggcaggtcatggctgaggtgaacaagaccttccaggaactggctgtgttccatgatctggaaggcatgtgggaggaactcagccccaagatctggaccttcatggagaacagccaagaaatggaccttgtccggatgctgttggacagcagggacaatgaccacttttgggaacagcagttggatggcttagattggacagcccaagacatcgtggcgtttttggccaagcacccagaggatgtccagtccagtaatggttctgtgtacacctggagagaagctttcaacgagactaaccaggcaatccggaccatatctcgcttcatggagtgtgtcaacctgaacaagctagaacccatagcaacagaagtctggctcatcaacaagtccatggagctgctggatgagaggaagttctgggctggtattgtgttcactggaattactccaggcagcattgagctgccccatcatgtcaagtacaagatccgaatggacattgacaatgtggagaggacaaataaaatcaaggatgggtactgggaccctggtcctcgagctgacccctttgaggacatgcggtacgtctgggggggcttcgcctacttgcaggatgtggtggagcaggcaatcatcagggtgctgacgggcaccgagaagaaaactggtgtctatatgcaacagatgccctatccctgttacgttgatgacatctttctgcgggtgatgagccggtcaatgcccctcttcatgacgctggcctggatttactcagtggctgtgatcatcaagggcatcgtgtatgagaaggaggcacggctgaaagagaccatgcggatcatgggcctggacaacagcatcctctggtttagctggttcattagtagcctcattcctcttcttgtgagcgctggcctgctagtggtcatcctgaagttaggaaacctgctgccctacagtgatcccagcgtggtgtttgtcttcctgtccgtgtttgctgtggtgacaatcctgcagtgcttcctgattagcacactcttctccagagccaacctggcagcagcctgtgggggcatcatctacttcacgctgtacctgccctacgtcctgtgtgtggcatggcaggactacgtgggcttcacactcaagatcttcgctagcctgctgtctcctgtggcttttgggtttggctgtgagtactttgccctttttgaggagcagggcattggagtgcagtgggacaacctgtttgagagtcctgtggaggaagatggcttcaatctcaccacttcggtctccatgatgctgtttgacaccttcctctatggggtgatgacctggtacattgaggctgtctttccaggccagtacggaattcccaggccctggtattttccttgcaccaagtcctactggtttggcgaggaaagtgatgagaagagccaccctggttccaaccagaagagaatatcagaaatctgcatggaggaggaacccacccacttgaagctgggcgtgtccattcagaacctggtaaaagtctaccgagatgggatgaaggtggctgtcgatggcctggcactgaatttttatgagggccagatcacctccttcctgggccacaatggagcggggaagacgaccaccatgtcaatcctgaccgggttgttccccccgacctcgggcaccgcctacatcctgggaaaagacattcgctctgagatgagcaccatccggcagaacctgggggtctgtccccagcataacgtgctgtttgacatgctgactgtcgaagaacacatctggttctatgcccgcttgaaagggctctctgagaagcacgtgaaggcggagatggagcagatggccctggatgttggtttgccatcaagcaagctgaaaagcaaaacaagccagctgtcaggtggaatgcagagaaagctatctgtggccttggcctttgtcgggggatctaaggttgtcattctggatgaacccacagctggtgtggacccttactcccgcaggggaatatgggagctgctgctgaaataccgacaaggccgcaccattattctctctacacaccacatggatgaagcggacgtcctgggggacaggattgccatcatctcccatgggaagctgtgctgtgtgggctcctccctgtttctgaagaaccagctgggaacaggctactacctgaccttggtcaagaaagatgtggaatcctccctcagttcctgcagaaacagtagtagcactgtgtcatacctgaaaaaggaggacagtgtttctcagagcagttctgatgctggcctgggcagcgaccatgagagtgacacgctgaccatcgatgtctctgctatctccaacctcatcaggaagcatgtgtctgaagcccggctggtggaagacatagggcatgagctgacctatgtgctgccatatgaagctgctaaggagggagcctttgtggaactctttcatgagattgatgaccggctctcagacctgggcatttctagttatggcatctcagagacgaccctggaagaaatattcctcaaggtggccgaagagagtggggtggatgctgagacctcagatggtaccttgccagcaagacgaaacaggcgggccttcggggacaagcagagctgtcttcgcccgttcactgaagatgatgctgctgatccaaatgattctgacatagacccagaatccagagagacagacttgctcagtgggatggatggcaaagggtcctaccaggtgaaaggctggaaacttacacagcaacagtttgtggcccttttgtggaagagactgctaattgccagacggagtcggaaaggattttttgctcagattgtcttgccagctgtgtttgtctgcattgcccttgtgttcagcctgatcgtgccaccctttggcaagtaccccagcctggaacttcagccctggatgtacaacgaacagtacacatttgtcagcaatgatgctcctgaggacacgggaaccctggaactcttaaacgccctcaccaaagaccctggcttcgggacccgctgtatggaaggaaacccaatcccagacacgccctgccaggcaggggaggaagagtggaccactgccccagttccccagaccatcatggacctcttccagaatgggaactggacaatgcagaacccttcacctgcatgccagtgtagcagcgacaaaatcaagaagatgctgcctgtgtgtcccccaggggcaggggggctgcctcctccacaaagaaaacaaaacactgcagatatccttcaggacctgacaggaagaaacatttcggattatctggtgaagacgtatgtgcagatcatagccaaaagcttaaagaacaagatctgggtgaatgagtttaggtatggcggcttttccctgggtgtcagtaatactcaagcacttcctccgagtcaagaagttaatgatgccatcaaacaaatgaagaaacacctaaagctggccaaggacagttctgcagatcgatttctcaacagcttgggaagatttatgacaggactggacaccaaaaataatgtcaaggtgtggttcaataacaagggctggcatgcaatcagctctttcctgaatgtcatcaacaatgccattctccgggccaacctgcaaaagggagagaaccctagccattatggaattactgctttcaatcatcccctgaatctcaccaagcagcagctctcagaggtggctctgatgaccacatcagtggatgtccttgtgtccatctgtgtcatctttgcaatgtccttcgtcccagccagctttgtcgtattcctgatccaggagcgggtcagcaaagcaaaacacctgcagttcatcagtggagtgaagcctgtcatctactggctctctaattttgtctgggatatgtgcaattacgttgtccctgccacactggtcattatcatcttcatctgcttccagcagaagtcctatgtgtcctccaccaatctgcctgtgctagcccttctacttttgctgtatgggtggtcaatcacacctctcatgtacccagcctcctttgtgttcaagatccccagcacagcctatgtggtgctcaccagcgtgaacctcttcattggcattaatggcagcgtggccacctttgtgctggagctgttcaccgacaataagctgaataatatcaatgatatcctgaagtccgtgttcttgatcttcccacatttttgcctgggacgagggctcatcgacatggtgaaaaaccaggcaatggctgatgccctggaaaggtttggggagaatcgctttgtgtcaccattatcttgggacttggtgggacgaaacctcttcgccatggccgtggaaggggtggtgttcttcctcattactgttctgatccagtacagattcttcatcaggcccagacctgtaaatgcaaagctatctcctctgaatgatgaagatgaagatgtgaggcgggaaagacagagaattcttgatggtggaggccagaatgacatcttagaaatcaaggagttgacgaagatatatagaaggaagcggaagcctgctgttgacaggatttgcgtgggcattcctcctggtgagtgctttgggctcctgggagttaatggggctggaaaatcatcaactttcaagatgttaacaggagataccactgttaccagaggagatgctttccttaacaaaaatagtatcttatcaaacatccatgaagtacatcagaacatgggctactgccctcagtttgatgccatcacagagctgttgactgggagagaacacgtggagttctttgcccttttgagaggagtcccagagaaagaagttggcaaggttggtgagtgggcgattcggaaactgggcctcgtgaagtatggagaaaaatatgctggtaactatagtggaggcaacaaacgcaagctctctacagccatggctttgatcggcgggcctcctgtggtgtttctggatgaacccaccacaggcatggatcccaaagcccggcggttcttgtggaattgtgccctaagtgttgtcaaggaggggagatcagtagtgcttacatctcatagtatggaagaatgtgaagctctttgcactaggatggcaatcatggtcaatggaaggttcaggtgccttggcagtgtccagcatctaaaaaataggtttggagatggttatacaatagttgtacgaatagcagggtccaacccggacctgaagcctgtccaggatttctttggacttgcatttcctggaagtgttctaaaagagaaacaccggaacatgctacaataccagcttccatcttcattatcttctctggccaggatattcagcatcctctcccagagcaaaaagcgactccacatagaagactactctgtttctcagacaacacttgaccaagtatttgtgaactttgccaaggaccaaagtgatgatgaccacttaaaagacctctcattacacaaaaaccagacagtagtggacgttgcagttctcacatcttttctacaggatgagaaagtgaaagaaagctatgtatgaagaatcctgttcatacggggtggctgaaagtaaagaggaactagactttcctttgcaccatgtgaagtgttgtggagaaaagagccagaagttgatgtgggaagaagtaaactggatactgtactgatactattcaatgcaatgcaattcaatgcaatgaaaacaaaattccattacaggggcagtgcctttgtagcctatgtcttgtatggctctcaagtgaaagacttgaatttagttttttacctatacctatgtgaaactctattatggaacccaatggacatatgggtttgaactcacacttttttttttttttttgttcctgtgtattctcattggggttgcaacaataattcatcaagtaatcatggccagcgattattgatcaaaatcaaaaggtaatgcacatcctcattcactaagccatgccatgcccaggagactggtttcccggtgacacatccattgctggcaatgagtgtgccagagttattagtgccaagtttttcagaaagtttgaagcaccatggtgtgtcatgctcacttttgtgaaagctgctctgctcagagtctatcaacattgaatatcagttgacagaatggtgccatgcgtggctaacatcctgctttgattccctctgataagctgttctggtggcagtaacatgcaacaaaaatgtgggtgtctccaggcacgggaaacttggttccattgttatattgtcctatgcttcgagccatgggtctacagggtcatccttatgagactcttaaatatacttagatcctggtaagaggcaaagaatcaacagccaaactgctggggctgcaagctgctgaagccagggcatgggattaaagagattgtgcgttcaaacctagggaagcctgtgcccatttgtcctgactgtctgctaacatggtacactgcatctcaagatgtttatctgacacaagtgtattatttctggctttttgaattaatctagaaaatgaaaagatggagttgtattttgacaaaaatgtttgtactttttaatgttatttggaattttaagttctatcagtgacttctgaatccttagaatggcctctttgtagaaccctgtggtatagaggagtatggccactgccccactatttttattttcttatgtaagtttgcatatcagtcatgactagtgcctagaaagcaatgtgatggtcaggatctcatgacattatatttgagtttctttcagatcatttaggatactcttaatctcacttcatcaatcaaatattttttgagtgtatgctgtagctgaaagagtatgtacgtacgtataagactagagagatattaagtctcagtacacttcctgtgccatgttattcagctcactggtttacaaatataggttgtcttgtggttgtaggagcccactgtaacaatactgggcagcctttttttttttttttttaattgcaacaatgcaaaagccaagaaagtataagggtcacaagtctaaacaatgaattcttcaacagggaaaacagctagcttgaaaacttgctgaaaaacacaacttgtgtttatggcatttagtaccttcaaataattggctttgcagatattggataccccattaaatctgacagtctcaaatttttcatctcttcaatcactagtcaagaaaaatataaaaacaacaaatacttccatatggagcatttttcagagttttctaacccagtcttatttttctagtcagtaaacatttgtaaaaatactgtttcactaatacttactgttaactgtcttgagagaaaagaaaaatatgagagaactattgtttggggaagttcaagtgatctttcaatatcattactaacttcttccactttttccagaatttgaatattaacgctaaaggtgtaagacttcagatttcaaattaatctttctatattttttaaatttacagaatattatataacccactgctgaaaaagaaaaaaatgattgttttagaagttaaagtcaatattgattttaaatataagtaatgaaggcatatttccaataactagtgatatggcatcgttgcattttacagtatcttcaaaaatacagaatttatagaataatttctcctcatttaatatttttcaaaatcaaagttatggtttcctcattttactaaaatcgtattctaattcttcattatagtaaatctatgagcaactccttacttcggttcctctgatttcaaggccatattttaaaaaatcaaaaggcactgtgaactattttgaagaaaacacaacattttaatacagattgaaaggacctcttctgaagctagaaacaatctatagttatacatcttcattaatactgtgttaccttttaaaatagtaattttttacattttcctgtgtaaacctaattgtggtagaaatttttaccaactctatactcaatcaagcaaaatttctgtatattccctgtggaatgtacctatgtgagtttcagaaattctcaaaatacgtgttcaaaaatttctgcttttgcatctttgggacacctcagaaaacttattaacaactgtgaatatgagaaatacagaagaaaataataagccctctatacataaatgcccagcacaattcattgttaaaaaacaaccaaacctcacactactgtatttcattatctgtactgaaagcaaatgctttgtgactattaaatgttgcacatcattcattcactgtatagtaatcattgactaaagccatttgtctgtgttttcttcttgtggttgtatatatcaggtaaaatattttccaaagagccatgtgtcatgtaatactgaaccactttgatattgagacattaatttgtacccttgttattatctactagtaataatgtaatactgtagaaatattgctctaattcttttcaaaattgttgcatcccccttagaatgtttctatttccataaggatttaggtatgctattatcccttcttataccctaagatgaagctgtttttgtgctctttgttcatcattggccctcattccaagcactttacgctgtctgtaatgggatctatttttgcactggaatatctgagaattgcaaaactagacaaaagtttcacaacagatttctaagttaaatcattttcattaaaaggaaaaaagaaaaaaaattttgtatgtcaataactttatatgaagtattaaaatgcatatttctatgttgtaatataatgagtcacaaaataaagctgtgacagttctgttggtctacagaaa

SEQ ID NO: 1099 - protein, 2000 aa, Homo sapien
MACWPQLRLLLWKNLTFRRRQTCQLLLEVAWPLFIFLILISVRLSYPPYEQHECHFPNKAMPSAGTLPWVQGIICNANNPCFRYPTPGEAPGVVGNFNKSIVARLFSDARRLLLYSQKDTSMKDMRKVLRTLQQIKKSSSNLKLQDFLVDNETFSGFLYHNLSLPKSTVDKMLRADVILHKVFLQGYQLHLTSLCNGSKSEEMIQLGDQEVSELCGLPREKLAAAERVLRSNMDILKPILRTLNSTSPFPSKELAEATKTLLHSLGTLAQELFSMRSWSDMRQEVMFLTNVNSSSSSTQIYQAVSRIVCGHPEGGGLKIKSLNWYEDNNYKALFGGNGTEEDAETFYDNSTTPYCNDLMKNLESSPLSRIIWKALKPLLVGKILYTPDTPATRQVMAEVNKTFQELAVFHDLEGMWEELSPKIWTFMENSQEMDLVRMLLDSRDNDHFWEQQLDGLDWTAQDIVAFLAKHPEDVQSSNGSVYTWREAFNETNQAIRTISRFMECVNLNKLEPIATEVWLINKSMELLDERKFWAGIVFTGITPGSIELPHHVKYKIRMDIDNVERTNKIKDGYWDPGPRADPFEDMRYVWGGFAYLQDVVEQAIIRVLTGTEKKTGVYMQQMPYPCYVDDIFLRVMSRSMPLFMTLAWIYSVAVIIKGIVYEKEARLKETMRIMGLDNSILWFSWFISSLIPLLVSAGLLVVILKLGNLLPYSDPSVVFVFLSVFAVVTILQCFLISTLFSRANLAAACGGIIYFTLYLPYVLCVAWQDYVGFTLKIFASLLSPVAFGFGCEYFALFEEQGIGVQWDNLFESPVEEDGFNLTTSVSMMLFDTFLYGVMTWYIEAVFPGQYGIPRPWYFPCTKSYWFGEESDEKSHPGSNQKRISEICMEEEPTHLKLGVSIQNLVKVYRDGMKVAVDGLALNFYEGQITSFLGHNGAGKTTTMSILTGLFPPTSGTAYILGKDIRSEMSTIRQNLGVCPQHNVLFDMLTVEEHIWFYARLKGLSEKHVKAEMEQMALDVGLPSSKLKSKTSQLSGGMQRKLSVALAFVGGSKVVILDEPTAGVDPYSRRGIWELLLKYRQGRTIILSTHHMDEADVLGDRIAIISHGKLCCVGSSLFLKNQLGTGYYLTLVKKDVESSLSSCRNSSSTVSYLKKEDSVSQSSSDAGLGSDHESDTLTIDVSAISNLIRKHVSEARLVEDIGHELTYVLPYEAAKEGAFVELFHEIDDRLSDLGISSYGISETTLEEIFLKVAEESGVDAETSDGTLPARRNRRAFGDKQSCLRPFTEDDAADPNDSDIDPESRETDLLSGMDGKGSYQVKGWKLTQQQFVALLWKRLLIARRSRKGFFAQIVLPAVFVCIALVFSLIVPPFGKYPSLELQPWMYNEQYTFVSNDAPEDTGTLELLNALTKDPGFGTRCMEGNPIPDTPCQAGEEEWTTAPVPQTIMDLFQNGNWTMQNPSPACQCSSDKIKKMLPVCPPGAGGLPPPQRKQNTADILQDLTGRNISDYLVKTYVQIIAKSLKNKIWVNEFRYGGFSLGVSNTQALPPSQEVNDAIKQMKKHLKLAKDSSADRFLNSLGRFMTGLDTKNNVKVWFNNKGWHAISSFLNVINNAILRANLQKGENPSHYGITAFNHPLNLTKQQLSEVALMTTSVDVLVSICVIFAMSFVPASFVVFLIQERVSKAKHLQFISGVKPVIYWLSNFVWDMCNYVVPATLVIIIFICFQQKSYVSSTNLPVLALLLLLYGWSITPLMYPASFVFKIPSTAYVVLTSVNLFIGINGSVATFVLELFTDNKLNNINDILKSVFLIFPHFCLGRGLIDMVKNQAMADALERFGENRFVSPLSWDLVGRNLFAMAVEGVVFFLITVLIQYRFFIRPRPVNAKLSPLNDEDEDVRRERQRILDGGGQNDILEIKELTKIYRRKRKPAVDRICVGIPPGECFGLLGVNGAGKSSTFKMLTGDTTVTRGDAFLNKNSILSNIHEVHQNMGYCPQFDAITEL

SEQ ID NO: 1100 - DNA, 6906 bp, Homo sapien
ggcgcgggcggcctggagccccgggagcggcgcgcgcggtcccggcccagccggctctcctggcctcgcgctgcacattctctcctggcggcggcgccacctgcagtagcgttcgcccgaacatggcgacacggagcagcaggagggagtcgcgactcccgttcctattcaccctggtcgcactgctgccgcccggagctctctgcgaagtctggacgcagaggctgcacggcggcagcgcgcccttgccccaggaccggggcttcctcgtggtgcagggcgacccgcgcgagctgcggctgtgggcgcgcggggatgccaggggggcgagccgcgcggacgagaagccgctccggaggaaacggagcgctgccctgcagcccgagcccatcaaggtgtacggacaggttagtctgaatgattcccacaatcagatggtggtgcactgggctggagagaaaagcaacgtgatcgtggccttggcccgagatagcctggcattggcgaggcccaagagcagtgatgtgtacgtgtcttacgactatggaaaatcattcaagaaaatttcagacaagttaaactttggcttgggaaataggagtgaagctgttatcgcccagttctaccacagccctgcggacaacaagcggtacatctttgcagacgcttatgcccagtacctctggatcacgtttgacttctgcaacactcttcaaggcttttccatcccatttcgggcagctgatctcctcctacacagtaaggcctccaaccttctcttgggctttgacaggtcccaccccaacaagcagctgtggaagtcagatgactttggccagacctggatcatgattcaggaacatgtcaagtccttttcttggggaattgatccctatgacaaaccaaataccatctacattgaacgacacgaaccctctggctactccactgtcttccgaagtacagatttcttccagtcccgggaaaaccaggaagtgatccttgaggaagtgagagattttcagcttcgggacaagtacatgtttgctacaaaggtggtgcatctcttgggcagtgaacagcagtcttctgtccagctctgggtctcctttggccggaagcccatgagagcagcccagtttgtcacaagacatcctattaatgaatattacatcgcagatgcctccgaggaccaggtgtttgtgtgtgtcagccacagtaacaaccgcaccaatttatacatctcagaggcagaggggctgaagttctccctgtccttggagaacgtgctctattacagcccaggaggggccggcagtgacaccttggtgaggtattttgcaaatgaaccatttgctgacttccaccgagtggaaggattgcaaggagtctacattgctactctgattaatggttctatgaatgaggagaacatgagatcggtcatcacctttgacaaagggggaacctgggagtttcttcaggctccagccttcacgggatatggagagaaaatcaattgtgagctttcccagggctgttcccttcatctggctcagcgcctcagtcagctcctcaacctccagctccggagaatgcccatcctgtccaaggagtcggctccaggcctcatcatcgccactggctcagtgggaaagaacttggctagcaagacaaacgtgtacatctctagcagtgctggagccaggtggcgagaggcacttcctggacctcactactacacatggggagaccacggcggaatcatcacggccattgcccagggcatggaaaccaacgagctaaaatacagtaccaatgaaggggagacctggaaaacattcatcttctctgagaagccagtgtttgtgtatggcctcctcacagaacctggggagaagagcactgtcttcaccatctttggctcgaacaaagagaatgtccacagctggctgatcctccaggtcaatgccacggatgccttgggagttccctgcacagagaatgactacaagctgtggtcaccatctgatgagcgggggaatgagtgtttgctgggacacaagactgttttcaaacggcggaccccccatgccacatgcttcaatggagaggactttgacaggccggtggtcgtgtccaactgctcctgcacccgggaggactatgagtgtgacttcggtttcaagatgagtgaagatttgtcattagaggtttgtgttccagatccggaattttctggaaagtcatactcccctcctgtgccttgccctgtgggttctacttacaggagaacgagaggctaccggaagatttctggggacacttgtagcggaggagatgttgaagcgcgactggaaggagagctggtcccctgtcccctggcagaagagaacgagttcattctgtatgctgtgaggaaatccatctaccgctatgacctggcctcgggagccaccgagcagttgcctctcaccgggctacgggcagcagtggccctggactttgactatgagcacaactgtttgtattggtccgacctggccttggacgtcatccagcgcctctgtttgaatggaagcacagggcaagaggtgatcatcaattctggcctggagacagtagaagctttggcttttgaacccctcagccagctgctttactgggtagatgcaggcttcaaaaagattgaggtagctaatccagatggcgacttccgactcacaatcgtcaattcctctgtgcttgatcgtcccagggctctggtcctcgtgccccaagagggggtgatgttctggacagactggggagacctgaagcctgggatttatcggagcaatatggatggttctgctgcctatcacctggtgtctgaggatgtgaagtggcccaatggcatctctgtggacgaccagtggatttactggacggatgcctacctggagtgcatagagcggatcacgttcagtggccagcagcgctctgtcattctggacaacctcccgcacccctatgccattgctgtctttaagaatgaaatctactgggatgactggtcacagctcagcatattccgagcttccaaatacagtgggtcccagatggagattctggcaaaccagctcacggggctcatggacatgaagattttctacaaggggaagaacactggaagcaatgcctgtgtgcccaggccatgcagcctgctgtgcctgcccaaggccaacaacagtagaagctgcaggtgtccagaggatgtgtccagcagtgtgcttccatcaggggacctgatgtgtgactgccctcagggctatcagctcaagaacaatacctgtgtcaaagaagagaacacctgtcttcgcaaccagtatcgctgcagcaacgggaactgtatcaacagcatttggtggtgtgactttgacaacgactgtggagacatgagcgatgagagaaactgccctaccaccatctgtgacctggacacccagtttcgttgccaggagtctgggacttgtatcccactgtcctataaatgtgaccttgaggatgactgtggagacaacagtgatgaaagtcattgtgaaatgcaccagtgccggagtgacgagtacaactgcagttccggcatgtgcatccgctcctcctgggtatgtgacggggacaacgactgcagggactggtctgatgaagccaactgtaccgccatctatcacacctgtgaggcctccaacttccagtgccgaaacgggcactgcatcccccagcggtgggcgtgtgacggggatacggactgccaggatggttccgatgaggatccagtcaactgtgagaagaagtgcaatggattccgctgcccaaacggcacttgcatcccatccagcaaacattgtgatggtctgcgtgattgctctgatggctccgatgaacagcactgcgagcccctctgtacgcacttcatggactttgtgtgtaagaaccgccagcagtgcctgttccactccatggtctgtgacggaatcatccagtgccgcgacgggtccgatgaggatgcggcgtttgcaggatgctcccaagatcctgagttccacaaggtatgtgatgagttcggtttccagtgtcagaatggagtgtgcatcagtttgatttggaagtgcgacgggatggatgattgcggcgattattctgatgaagccaactgcgaaaaccccacagaagccccaaactgctcccgctacttccagtttcggtgtgagaatggccactgcatccccaacagatggaaatgtgacagggagaacgactgtggggactggtctgatgagaaggattgtggagattcacatattcttcccttctcgactcctgggccctccacgtgtctgcccaattactaccgctgcagcagtgggacctgcgtgatggacacctgggtgtgcgacgggtaccgagattgtgcagatggctctgacgaggaagcctgccccttgcttgcaaacgtcactgctgcctccactcccacccaacttgggcgatgtgaccgatttgagttcgaatgccaccaaccgaagacgtgtattcccaactggaagcgctgtgacggccaccaagattgccaggatggccgggacgaggccaattgccccacacacagcaccttgacttgcatgagcagggagttccagtgcgaggacggggaggcctgcattgtgctctcggagcgctgcgacggcttcctggactgctcggacgagagcgatgaaaaggcctgcagtgatgagttgactgtgtacaaagtacagaatcttcagtggacagctgacttctctggggatgtgactttgacctggatgaggcccaaaaaaatgccctctgcttcttgtgtatataatgtctactacagggtggttggagagagcatatggaagactctggagacccacagcaataagacaaacactgtattaaaagtcttgaaaccagataccacgtatcaggttaaagtacaggttcagtgtctcagcaaggcacacaacaccaatgactttgtgaccctgaggaccccagagggattgccagatgcccctcgaaatctccagctgtcactccccagggaagcagaaggtgtgattgtaggccactgggctcctcccatccacacccatggcctcatccgtgagtacattgtagaatacagcaggagtggttccaagatgtgggcctcccagagggctgctagtaactttacagaaatcaagaacttattggtcaacactctatacaccgtcagagtggctgcggtgactagtcgtggaataggaaactggagcgattctaaatccattaccaccataaaaggaaaagtgatcccaccaccagatatccacattgacagctatggtgaaaattatctaagcttcaccctgaccatggagagtgatatcaaggtgaatggctatgtggtgaaccttttctgggcatttgacacccacaagcaagagaggagaactttgaacttccgaggaagcatattgtcacacaaagttggcaatctgacagctcatacatcctatgagatttctgcctgggccaagactgacttgggggatagccctctggcatttgagcatgttatgaccagaggggttcgcccacctgcacctagcctcaaggccaaagccatcaaccagactgcagtggaatgtacctggaccggcccccggaatgtggtttatggtattttctatgccacgtcctttcttgacctctatcgcaacccgaagagcttgactacttcactccacaacaagacggtcattgtcagtaaggatgagcagtatttgtttctggtccgtgtagtggtaccctaccaggggccatcctctgactacgttgtagtgaagatgatcccggacagcaggcttccaccccgtcacctgcatgtggttcatacgggcaaaacctccgtggtcatcaagtgggaatcaccgtatgactctcctgaccaggacttgttgtatgcaattgcagtcaaagatctcataagaaagactgacaggagctacaaagtaaaatcccgtaacagcactgtggaatacacccttaacaagttggagcctggcgggaaataccacatcattgtccaactggggaacatgagcaaagattccagcataaaaattaccacagtttcattatcagcacctgatgccttaaaaatcataacagaaaatgatcatgttcttctgttttggaaaagcctggctttaaaggaaaagcattttaatgaaagcaggggctatgagatacacatgtttgatagtgccatgaatatcacagcttaccttgggaatactactgacaatttctttaaaatttccaacctgaagatgggtcataattacacgttcaccgtccaagcaagatgcctttttggcaaccagatctgtggggagcctgccatcctgctgtacgatgagctggggtctggtgcagatgcatctgcaacgcaggctgccagatctacggatgttgctgctgtggtggtgcccatcttattcctgatactgctgagcctgggggtggggtttgccatcctgtacacgaagcaccggaggctgcagagcagcttcaccgccttcgccaacagccactacagctccaggctggggtccgcaatcttctcctctggggatgacctgggggaagatgatgaagatgcccctatgataactggattttcagatgacgtccccatggtgatagcctgaaagagctttcctcactagaaaccaaatggtgtaaatattttatttgataaagatagttgatggtttattttaaaagatgcactttgagttgcaatatgttatttttatatgggccaaaaacaaaaaacaaaaaaaaaaa

SEQ ID NO: 1101 - protein, 2000 aa, Homo sapien
MATRSSRRESRLPFLFTLVALLPPGALCEVWTQRLHGGSAPLPQDRGFLVVQGDPRELRLWARGDARGASRADEKPLRRKRSAALQPEPIKVYGQVSLNDSHNQMVVHWAGEKSNVIVALARDSLALARPKSSDVYVSYDYGKSFKKISDKLNFGLGNRSEAVIAQFYHSPADNKRYIFADAYAQYLWITFDFCNTLQGFSIPFRAADLLLHSKASNLLLGFDRSHPNKQLWKSDDFGQTWIMIQEHVKSFSWGIDPYDKPNTIYIERHEPSGYSTVFRSTDFFQSRENQEVILEEVRDFQLRDKYMFATKVVHLLGSEQQSSVQLWVSFGRKPMRAAQFVTRHPINEYYIADASEDQVFVCVSHSNNRTNLYISEAEGLKFSLSLENVLYYSPGGAGSDTLVRYFANEPFADFHRVEGLQGVYIATLINGSMNEENMRSVITFDKGGTWEFLQAPAFTGYGEKINCELSQGCSLHLAQRLSQLLNLQLRRMPILSKESAPGLIIATGSVGKNLASKTNVYISSSAGARWREALPGPHYYTWGDHGGIITAIAQGMETNELKYSTNEGETWKTFIFSEKPVFVYGLLTEPGEKSTVFTIFGSNKENVHSWLILQVNATDALGVPCTENDYKLWSPSDERGNECLLGHKTVFKRRTPHATCFNGEDFDRPVVVSNCSCTREDYECDFGFKMSEDLSLEVCVPDPEFSGKSYSPPVPCPVGSTYRRTRGYRKISGDTCSGGDVEARLEGELVPCPLAEENEFILYAVRKSIYRYDLASGATEQLPLTGLRAAVALDFDYEHNCLYWSDLALDVIQRLCLNGSTGQEVIINSGLETVEALAFEPLSQLLYWVDAGFKKIEVANPDGDFRLTIVNSSVLDRPRALVLVPQEGVMFWTDWGDLKPGIYRSNMDGSAAYHLVSEDVKWPNGISVDDQWIYWTDAYLECIERITFSGQQRSVILDNLPHPYAIAVFKNEIYWDDWSQLSIFRASKYSGSQMEILANQLTGLMDMKIFYKGKNTGSNACVPRPCSLLCLPKANNSRSCRCPEDVSSSVLPSGDLMCDCPQGYQLKNNTCVKEENTCLRNQYRCSNGNCINSIWWCDFDNDCGDMSDERNCPTTICDLDTQFRCQESGTCIPLSYKCDLEDDCGDNSDESHCEMHQCRSDEYNCSSGMCIRSSWVCDGDNDCRDWSDEANCTAIYHTCEASNFQCRNGHCIPQRWACDGDTDCQDGSDEDPVNCEKKCNGFRCPNGTCIPSSKHCDGLRDCSDGSDEQHCEPLCTHFMDFVCKNRQQCLFHSMVCDGIIQCRDGSDEDAAFAGCSQDPEFHKVCDEFGFQCQNGVCISLIWKCDGMDDCGDYSDEANCENPTEAPNCSRYFQFRCENGHCIPNRWKCDRENDCGDWSDEKDCGDSHILPFSTPGPSTCLPNYYRCSSGTCVMDTWVCDGYRDCADGSDEEACPLLANVTAASTPTQLGRCDRFEFECHQPKTCIPNWKRCDGHQDCQDGRDEANCPTHSTLTCMSREFQCEDGEACIVLSERCDGFLDCSDESDEKACSDELTVYKVQNLQWTADFSGDVTLTWMRPKKMPSASCVYNVYYRVVGESIWKTLETHSNKTNTVLKVLKPDTTYQVKVQVQCLSKAHNTNDFVTLRTPEGLPDAPRNLQLSLPREAEGVIVGHWAPPIHTHGLIREYIVEYSRSGSKMWASQRAASNFTEIKNLLVNTLYTVRVAAVTSRGIGNWSDSKSITTIKGKVIPPPDIHIDSYGENYLSFTLTMESDIKVNGYVVNLFWAFDTHKQERRTLNFRGSILSHKVGNLTAHTSYEISAWAKTDLGDSPLAFEHVMTRGVRPPAPSLKAKAINQTAVECTWTGPRNVVYGIFYATSFLDLYRNPKSLTTSLHNKTVIVSKDEQYLFLVRVVVPYQGPSSDYVVVKMIPDSRLPPRHLHVVHTGKTSVVIKWESPYDSPDQDLLYAIAVKDLIRKTDRSYKVKSRNSTVEYTLNKLEPGG

SEQ ID NO: 1102 - DNA, 1270 bp, Homo sapien
ggcacgaggctgcgccggaagtccctagccaggcctggcggtaaccttgggggcctcactgcagccgccgctgctgttggagtgggctttgcgagtctgaacgttggcggggctaggctcgttaactgccgagagcctccgggtttgcggtggaggacgctgaggcccgtggggggcaggcacccgggcgccgggcctcccagccgacatgtctctagtggcggaagccttcgtctcccagattgcagctgcagaaccttggcctgaaaatgctacattatatcagcaattgaaaggggagcaaattttactttctgacaatgcagcttctcttgcagtgcaggcctttttgcaaatgtgtaacttgcctatcaaagtagtttgtagggcaaatgcagaatatatgtctccatctggtaaagtaccttttattcatgtgggaaatcaagtagtatcagaacttggtccaatagtccaatttgttaaagccaagggccattctcttagtgatgggctggaggaagtccaaaaagcagaaatgaaagcttacatggaattagtcaacaatatgctgttgactgcagagctgtatcttcagtggtgtgatgaagctacagtaggggagatcactcatgctaggtatggatctccttacccttggcctctgaatcatattttggcctatcaaaaacagtgggaagtcaaacgtaagatgaaagctattggatggggaaagaagactctggaccaggtcttagaggatgtagaccagtgctgtcaagctctctctcaaagactgggaacacaaccgtatttcttcaataagcagcctactgaacttgacgcactggtatttggccatctatacaccattcttaccacacaattgacaaatgatgaactttctgagaaggtgaaaaactatagcaacctccttgctttctgtaggagaattgaacagcactattttgaagatcgtggtaaaggcaggctgtcatagagttatgtgttagtctcaggagtcttaacttttgaaatatgttttacttgaatgttacattagatattggtgtcagaattttaaaaccaaattactgctttttgaaacctcaaattatataatgtatcttatgtatgtgctttatattgttatttgtgtatacattaaaataattctgaattatttaatctgatatgttgtattctgtatcttgaaatttttgtttccttgaaacatgcatgcatttaaaaataaagcttaaacaactgt

SEQ ID NO: 1103 - protein, 263 aa, Homo sapien
MSLVAEAFVSQIAAAEPWPENATLYQQLKGEQILLSDNAASLAVQAFLQMCNLPIKVVCRANAEYMSPSGKVPFIHVGNQVVSELGPIVQFVKAKGHSLSDGLEEVQKAEMKAYMELVNNMLLTAELYLQWCDEATVGEITHARYGSPYPWPLNHILAYQKQWEVKRKMKAIGWGKKTLDQVLEDVDQCCQALSQRLGTQPYFFNKQPTELDALVFGHLYTILTTQLTNDELSEKVKNYSNLLAFCRRIEQHYFEDRGKGRLS

SEQ ID NO: 1104 - DNA, 13449 bp, Homo sapien
  Unsure 11967: Unknown base
  Unsure 12008: Unknown base
  Unsure 12013: Unknown base
gcggccgcgtcgacgcggcggcggcagcggcgtcggctcggggttctccgggagagggggagtgcgcggcggccgcagctgccacaaaccaggtgaagctttgttctaagaatatttgtttcatctagtttatgagtccaaatgatatagactgtaaatgtcacagcagtggtgaaagactgctcggtcatgagcaccgacagtaactcactggcacgtgaatttctgaccgatgtcaaccggctttgcaatgcagtggtccagagggtggaggccagggaggaagaagaggaggagacgcacatggcaacccttggacagtaccttgtccatggtcgaggatttctattacttaccaagctaaattctataattgatcaggcattgacatgtagagaagaactcctgactcttcttctgtctctccttccactggtatggaagatacctgtccaagaagaaaaggcaacagattttaacctaccgctctcagcagatataatcctgaccaaagaaaagaactcaagttcacaaagatccactcaggaaaaattacatttagaaggaagtgccctgtctagtcaggtttctgcaaaagtaaatgtttttcgaaaaagcagacgacagcgtaaaattacccatcgctattctgtaagagatgcaagaaagacacagctctccacctcagattcagaagccaattcagatgaaaaaggcatagcaatgaataagcatagaaggccccatctgctgcatcattttttaacatcgtttcctaaacaagaccaccccaaagctaaacttgaccgcttagcaaccaaagaacagactcctccagatgctatggctttggaaaattccagagagattattccaagacaggggtcaaacactgacattttaagtgagccagctgccttgtctgttatcagtaacatgaacaattctccatttgacttatgtcatgttttgttatctttattagaaaaagtttgtaagtttgacgttaccttgaatcataattctcctttagcagccagtgtagtgcccacactaactgaattcctagcaggctttggggactgctgcagtctgagcgacaacttggagagtcgagtagtttctgcaggttggaccgaagaaccggtggctttgattcaaaggatgctctttcgaacagtgttgcatcttctgtcagtagatgttagtactgcagagatgatgccagaaaatcttaggaaaaatttaactgaattgcttagagcagctttaaaaattagaatatgcctagaaaagcagcctgacccttttgcaccaagacaaaagaaaacactgcaggaggttcaggaagattttgtgttttcaaagtatcgtcatagagcccttcttttacctgagcttttggaaggagttcttcagattctgatctgttgtcttcaaagtgcagcttcaaatcccttctacttcagtcaagccatggatttggttcaagaattcattcagcatcatggatttaatttatttgaaacagcagttcttcaaatggaatggctggttttaagagatggagttcctcccgaggcctcagagcatttgaaagccctaataaatagtgtgatgaaaataatgagcactgtcaaaaaagtgaaatcagagcaacttcatcattcgatgtgtacaagaaaaaggcacagacgatgtgaatattctcattttatgcatcatcaccgagatctctcaggtcttctggtttcggcttttaaaaaccaggtttccaaaaacccatttgaagagactgcagatggagatgtttattatcctgagcggtgctgttgcattgcagtgtgtgcccatcagtgcttgcgcttactacagcaggcttccttgagcagcacttgtgtccagatcctatcgggtgttcataacattggaatatgctgttgtatggatcccaaatctgtaatcattcctttgctccatgcttttaaattgccagcactgaaaaattttcagcagcatatattgaatatccttaacaaacttattttggatcagttaggaggagcagagatatcaccaaaaattaaaaaagcagcttgtaatatttgtactgttgactctgaccaactagcccaattagaagagacactgcagggaaacttatgtgatgctgaactctcctcaagtttatccagtccttcttacagatttcaagggatcctgcccagcagtggatctgaagatttgttgtggaaatgggatgctttaaaggcttatcagaactttgtttttgaagaagacagattacatagtatacagattgcaaatcacatttgcaatttaatccagaaaggcaatatagttgttcagtggaaattatataattacatatttaatcctgtgctccaaagaggagttgaattagcacatcattgtcaacacctaagcgttacttcagctcaaagtcatgtatgtagccatcataaccagtgcttgcctcaggacgtgcttcagatttatgtaaaaactctgcctatcctgcttaaatccagggtaataagagatttgtttttgagttgtaatggagtaagtcaaataatcgaattaaattgcttaaatggtattcgaagtcattctctaaaagcatttgaaactctgataatcagcctaggggagcaacagaaagatgcctcagttccagatattgatgggatagacattgaacagaaggagttgtcctctgtacatgtgggtacttcttttcatcatcagcaagcttattcagattctcctcagagtctcagcaaattttatgctggcctcaaagaagcttatccaaagagacggaagactgttaaccaagatgttcatatcaacacaataaacctattcctctgtgtggcttttttatgcgtaagtaaagaagcagagtctgacagggagtcggccaatgactcagaagatacttctggctatgacagcacagccagcgagcctttaagtcatatgctgccatgtatatctctcgagagccttgtcttgccttctcctgaacatatgcaccaagcagcagacatttggtctatgtgtcgttggatctacatgttgagttcagtgttccagaaacagttttataggcttggtggtttccgagtatgccataagttaatatttatgataatacagaaactgttcagaagtcacaaagaggagcaaggaaaaaaggagggagatacaagtgtaaatgaaaaccaggatttaaacagaatttctcaacctaagagaactatgaaggaagatttattatctttggctataaaaagtgaccccataccatcagaactaggtagtctaaaaaagagtgctgacagtttaggtaaattagagttacagcatatttcttccataaatgtggaagaagtttcagctactgaagccgctcccgaggaagcaaagctatttacaagtcaagaaagtgagacctcacttcaaagtatacgacttttggaagcccttctggccatttgtcttcatggtgccagaactagtcaacagaagatggaattggagttacctaatcagaacttgtctgtggaaagtatattatttgaaatgagggaccatctttcccagtcaaaggtgattgaaacacaactagcaaagccgttatttgatgccctgcttcgagttgccctcgggaattattcagcagattttgaacataatgatgctatgactgagaagagtcatcaatctgcagaagaattgtcatcccagcctggtgatttttcagaagaagctgaggattctcagtgttgtagttttaaacttttagttgaagaagaaggttacgaagcagatagtgaaagcaatcctgaagatggcgaaacccaggatgatggggtagacttaaagtctgaaacagaaggtttcagtgcatcaagcagtccaaatgacttactcgaaaacctcactcaaggggaaataatttatcctgagatttgtatgctggaattaaatttgctttctgctagtaaagccaaacttgatgtgcttgcccatgtatttgagagttttttgaaaattattaggcagaaagaaaagaatgtttttctgctcatgcaacagggaactgtgaaaaatcttttaggagggttcttgagtattttaacacaggatgattctgattttcaagcatgccagagagtattggtggatcttttggtatctttgatgagttcaagaacatgttcagaagagctaacccttcttttgagaatatttctggagaaatctccttgtacaaaaattcttcttctgggtattctgaaaattattgaaagtgatactactatgagcccttcacagtatctaaccttccctttactgcacgctccaaatttaagcaacggtgtttcatcacaaaagtatcctgggattttaaacagtaaggccatgggtttattgagaagagcacgagtttcacggagcaagaaagaggctgatagagagagttttccccatcggctgctttcatcttggcacatagccccagtccacctgccgttgctggggcaaaactgctggccacacctatcagaaggtttcagtgtttccctgtggtttaatgtggagtgtatccatgaagctgagagtactacagaaaaaggaaagaagataaagaaaagaaacaaatcattaattttaccagatagcagttttgatggtacagagagcgacagaccagaaggtgcagagtacataaatcctggtgaaagactcatagaagaaggatgtattcatataatttcactgggatccaaagcgttgatgatccaagtgtgggctgatccccacaatgccactcttatctttcgtgtgtgcatggattcaaatgatgacatgaaagctgttttactagcacaggttgaatcacaggagaatattttcctcccaagcaaatggcaacatttagtactcacctacttacagcagccccaagggaaaaggaggattcatgggaaaatctccatatgggtctctggacagaggaagcctgatgttactttggattttatgcttccaagaaaaacaagtttgtcatctgatagcaataaaacattttgcatgattggccattgtttatcatcccaagaagagtttttgcagttggctggaaaatgggacctgggaaatttgcttctcttcaacggagctaaggttggttcacaagaggccttttatctgtatgcttgtggacccaaccatacatctgtaatgccatgtaagtatggcaagccagtcaatgactactccaaatatattaataaagaaattttgcgatgtgaacaaatcagagaactttttatgaccaagaaagatgtggatattggtctcttaattgaaagtctttcagttgtttatacaacttactgtcctgctcagtataccatctatgaaccagtgattagacttaaaggtcaaatgaaaacccaactctctcaaagacccttcagctcaaaagaagttcagagcatcttattagaacctcatcatctaaagaatctccaacctactgaatataaaactattcaaggcattctgcacgaaattggtggaactggcatatttgtttttctctttgccagggttgttgaactcagtagctgtgaagaaactcaagcattagcactgcgagttatactctcattaattaaatacaaccaacaaagagtacatgaattagaaaattgtaatggactttctatgattcatcaggtgttgatcaaacaaaaatgcattgttgggttttacattttgaagacccttcttgaaggatgctgtggtgaagatattatttatatgaatgagaatggagagtttaagttggatgtagactctaatgctataatccaagatgttaagctgttagaggaactattgcttgactggaagatatggagtaaagcagagcaaggtgtttgggaaactttgctagcagctctagaagtcctcatcagagcagatcaccaccagcagatgtttaatattaagcagttattgaaagctcaagtggttcatcactttctactgacttgtcaggttttgcaggaatacaaagaggggcaactcacacccatgccccgagaggtttgtagatcatttgtgaaaattatagcagaagtccttggatctcctccagatttggaattattgacaattatcttcaatttccttttagcagttcaccctcctactaatacttacgtttgtcacaatcccacgaacttctacttttctttgcacatagatggcaagatctttcaggagaaagtgcggtcaatcatgtacctgaggcattccagcagtggaggaaggtcccttatgagccctggatttatggtaataagcccatctggttttactgcttcaccatatgaaggagagaattcctctaatattattccacaacagatggccgcccatatgctgcgttctagaagcctaccagcattccctacttcttcactactaacgcaatcacaaaaactgactggaagtttgggttgtagtatcgacaggttacaaaatattgcagatacttatgttgccacccaatcaaagaaacaaaattctttggggagttccgacacactgaaaaaaggcaaagaggacgcattcatcagtagctgtgagtctgcaaaaactgtttgtgaaatggaagctgtcctctcagcccaggtctctgtcagtgatgtcccaaagggagtgctgggatttccagtggtcaaagcagatcataaacagttgggagcagaacccaggtcagaagatgacagtcctggggatgagtcctgcccacgccgacctgattacctaaagggattggcctccttccagcgaagccacagcactattgcaagccttgggctagcttttccttcacagaacggatctgcagctgttggccgttggccaagtcttgttgatagaaacactgatgattgggaaaactttgcctattctcttggttatgagccaaattacaaccgaactgcaagtgctcacagtgtaactgaagactgtttggtacctatatgctgtggattatatgaactcctaagtggggttcttcttatcctgcctgatgttttgcttgaagatgtgatggacaagcttattcaagcagatacacttttggtcctcgttaaccacccatcaccagctatacaacaaggtgttattaaactattagatgcatattttgctagagcatctaaggaacaaaaagataaatttctgaagaatcgtggattttccttgctagccaaccagttgtatcttcatcgaggaactcaagaattgttagaatgcttcatcgaaatgttctttggtcgacatattggccttgatgaagaatttgatctggaagatgtgagaaacatgggattgtttcagaagtggtctgtcattcctattctgggactaatagagacctctctatatgacaacatactcttgcataatgctcttttacttcttctccaaattttaaattcttgttctaaggtagcagatatgttgctggataatggtctactctatgtgttatgtaatacagtagcagccctgaatggattagaaaagaacattcccatgagtgaatataaattgcttgcttgtgatatacagcaacttttcatagcagttacaattcatgcttgcagttcctcaggctcacaatattttagggttattgaagaccttattgtaatgcttggatatcttcaaaatagcaaaaacaagaggacacaaaatatggctgttgcactacagcttagagttctccaggctgctatggaatttataaggaccaccgcaaatcatgactctgaaaacctcacagattcactccagtcaccttctgctccccatcatgcagtagttcaaaagcggaaaagcattgctggtcctcgaaaatttccccttgctcaaactgaatcgcttctgatgaaaatgcgttcagtggcaaatgatgagcttcatgtgatgatgcaacggagaatgagccaagagaaccctagccaagcaactgaaacggaacttgcgcagagactacagaggctcactgttttagcagtcaacaggattatttatcaagaatttaattcagacattattgacattttgagaactccagaaaatgtaactcaaagcaagacctcagttttccagaccgaaatttctgaggaaaatattcatcatgaacagtcttctgttttcaatccatttcagaaagaaatttttacatatctggtagaaggattcaaagtatctattggttcaagtaaagccagtggttccaagcagcaatggactaaaattctgtggtcttgtaaggagaccttccgaatgcagcttgggagactactagtgcatattttgtcgccagcccacgctgcacaagagagaaagcaaatttttgaaatagttcatgaaccaaatcatcaggaaatactacgagactgtctcagcccatccctacaacatggagccaagttagttttgtatttgtcagagttgatacataatcaccaaggtgaattgactgaagaagagctaggcacagcagaactgcttatgaatgctttgaagttatgtggtcacaagtgcatccctcccagtgcatcaacaaaagcagaccttattaaaatgatcaaagaggaacaaaagaaatatgaaactgaagaaggagtgaataaagctgcttggcagaaaacagttaacaataatcaacaaagtctctttcagcgtctggattcaaaatcaaaggatatatctaaaatagctgcagatatcacccaggcagtgtctctctcccaaggaaatgagagaaaaaaggtgatccagcatattagaggaatgtataaagtagatttgagtgccagcagacattggcaggaacttattcagcagctgacacatgatagagcagtatggtatgaccccatctactatccaacctcatggcagttggatccaacagaagggccaaatcgagagaggagacgtttacagagatgttatttaactattccaaataagtatctccttagggatagacagaaatcagaagatgttgtcaaaccaccactctcttacctgtttgaagacaaaactcattcttctttctcttctactgtcaaagacaaagctgcaagtgaatctataagagtgaatcgaagatgcatcagtgttgcaccatctagagagacagctggtgaattgttactaggtaaatgtggaatgtattttgtggaagataatgcttctgatacagttgaaagttcgagccttcagggagagttggaaccagcatcattttcctggacatatgaagaaattaaagaagttcacaagcgttggtggcaattgagagataatgctgtagaaatctttctaacaaatggcagaacactcctgttggcatttgataacaccaaggttcgtgatgatgtataccacaatatactcacaaataacctccctaatcttctggaatatggtaacatcaccgctctgacaaatttatggtatactgggcaaattactaattttgaatatttgactcacttaaacaaacatgctggccgatccttcaatgatctcatgcagtatcctgtgttcccatttatacttgctgactacgttagtgagacacttgacctcaatgatctgttgatatacagaaatctctctaaacctatagctgttcagtataaagaaaaagaagatcgttatgtggacacatacaagtacttggaggaagagtaccgcaaaggagccagagaagatgaccccatgcctcccgtgcagccctatcactatggctcccactattccaatagcggcactgtgcttcacttcctggtcaggatgcctcctttcactaaaatgtttttagcctatcaagatcaaagttttgacattccagacagaacttttcattctacaaatacaacttggcgactctcatcttttgaatctatgactgatgtgaaagaacttatcccagagtttttctatcttccagagttcctagttaaccgtgaaggttttgattttggtgtgcgtcagaatggtgaacgggttaatcacgtcaaccttcccccttgggcgcgtaatgatcctcgtctttttatcctcatccatcggcaggctctagagtctgactacgtgtcgcagaacatctgtcagtggattgacttggtgtttgggtataagcaaaaggggaaggcttctgttcaagcgatcaatgtttttcatcctgctacatattttggaatggatgtctctgcagttgaagatccagttcagagacgagcgctagaaaccatgataaaaacctacgggcagactccccgtcagctgttccacatggcccatgtgagcagacctggagccaagctcaatattgaaggagagcttccagctgctgtggggttgctagtgcagtttgctttcagggagacccgagaacaggtcaaagaaatcacctatccgagtcctttgtcatggataaaaggcttgaaatggggggaatacgtgggttcccccagtgctccagtacctgtggtctgcttcagccagccccacggagaaagatttggctctctccaggctctgcccaccagagcaatctgtggtttgtcacggaatttctgtcttgtgatgacatatagcaaggaacaaggtgtgagaagcatgaacagtacggacattcagtggtcagccatcctgagctggggatatgctgataatattttaaggttgaagagtaaacaaagtgagcctccagtaaactttattcaaagttcacaacagtaccaggtgactagttgtgcttgggtgcctgacagttgccagctgtttactggaagcaaatgcggtgtcatcacagcctacacaaacagatttacaagcagcacgccatcagaaatagaaatggagactcaaatacatctctatggtcacacagaagagataaccagcttatttgtttgcaaaccatacagtatactgataagtgtgagcagagacggaacctgcatcatatgggatttaaacaggttatgctatgtacaaagtctggcgggacacaaaagccctgtcacagctgtctctgccagtgaaacctcaggtgatattgctactgtgtgtgattcagctggcggaggcagtgacctcagactctggacggtgaacggggatctcgttggacatgtccactgcagggagatcatctgttccgtggctttctccaaccagcctgagggagtatctatcaatgtaatcgctgggggattagaaaatggaattgtaaggttatggagcacatgggacttaaagcctgtgagagaaattacatttcccaaatcaaataagcccatcatcagccttacattttcttgtgatggccaccatttgtacacagcaaacagtgatgggaccgtgattgcctggtgtcggaaggaccagcagcgcttgaaacagccaatgttctattccttccttagcagctatgcagccgggtgaatgcgaatgaacttcacgttctccaaagcactttaactccaaactagatttgttgacttcaccagttttaggaggttgaacctaaagaaatggatgactggacaaaccatccaaataatgataaagtctattcatctgcacaaaattctgaagagtcacatgatcctaagaggaaagttctgttctattttagtgataatctggaagattgtgtcaatatgcactagccaacaagttttaagcctcgcatggtacattaaaatgatattcttaaaattttttcccaccaaggtattccaaagaaaatattaaggtctcccctttttctatgattccaaaaggaccagtagaatttaaattggttggttgatngtttatataaaacacactaaaattatattttaaaagtttantgccntgaaatactcctcccaccacacacacatgctccaaaagaggaaagaaaaaaagataatttttaggacttgataattgctttctttgagaagcaaattattcagtaggtgcctctgtaccaaatattttatggaatatctaaatactaaaataaactatgaatgaatctcaaaattaggcagtttttgccagttgctttcttagctcaaaggagaaccagaatttttttgacagccacaaacaagaatacaggtatcttggatttcagacacattctgtttcttcataaaaattttacttaaaatctgtaacgctagatattgactatccttagttgagtcactgaggtttaaacacaatggtaagtcttaaagtctgctatttacagagcattgaatctgtaccaatttgcaatagaaagccttcagtatgcaagaagtttgcatgggtattaagaacacagcctaaataaggcatttgatctaatctgcaggaagaattttcttccccaaaacagaattataaaagcttactttaaacaggaggcagaataattcttttaggaaaccatttcattctgtttctactaacctataccatctgagaattcctaaacatcttggagccgtctgtctctcccatatgatggctgtctgtatatttttacttggggtgctgctttattggctttgaaaacactgtcagataagctcagtaatatgttaccatgggataaaaatatgtatccctgcctaagaataacttgtgcatttgttatggaaatttaattcatatggtgtttacagtactacttttgtaacttccagactttctaaaacattctgcttaaaaaccatataaaatataattccaaagtctctgctgtcaagatagattcgagagaaagcacgtggccatgtatgctttaaccttaaactgcatacacatgtagtgatacctaggctgcatttagatcaccgtgtgctcaggccaggtgtgaatcctgaggtccatggaggtgcagagatgagattactcctattcacgttgaagtgatttgctttgttaacaaaaaattgcagctattgtctagctttcatttttttactgagaactttaaattagtcccctattagaatagggttgctactcatctttttttaaaaaccgaatttcatcatttatctaaagagaaaatatgcagaataactggtcttgttaagagtgcaatattatatttttatgtaaaaataaaaattaatttggggggattatttattcagcatgaaacctaatatgtatatgtttgaaatacttcataatgtgcatgttgtagcaaacatttctgtaaattatcacaagctctgttacctttatatacgctgcctcttcaatttggaaataaatttcataaaaaaaaaaaaaaaaaaaaaaaaa

SEQ ID NO: 1105 - protein, 2000 aa, Homo sapien
MSTDSNSLAREFLTDVNRLCNAVVQRVEAREEEEEETHMATLGQYLVHGRGFLLLTKLNSIIDQALTCREELLTLLLSLLPLVWKIPVQEEKATDFNLPLSADIILTKEKNSSSQRSTQEKLHLEGSALSSQVSAKVNVFRKSRRQRKITHRYSVRDARKTQLSTSDSEANSDEKGIAMNKHRRPHLLHHFLTSFPKQDHPKAKLDRLATKEQTPPDAMALENSREIIPRQGSNTDILSEPAALSVISNMNNSPFDLCHVLLSLLEKVCKFDVTLNHNSPLAASVVPTLTEFLAGFGDCCSLSDNLESRVVSAGWTEEPVALIQRMLFRTVLHLLSVDVSTAEMMPENLRKNLTELLRAALKIRICLEKQPDPFAPRQKKTLQEVQEDFVFSKYRHRALLLPELLEGVLQILICCLQSAASNPFYFSQAMDLVQEFIQHHGFNLFETAVLQMEWLVLRDGVPPEASEHLKALINSVMKIMSTVKKVKSEQLHHSMCTRKRHRRCEYSHFMHHHRDLSGLLVSAFKNQVSKNPFEETADGDVYYPERCCCIAVCAHQCLRLLQQASLSSTCVQILSGVHNIGICCCMDPKSVIIPLLHAFKLPALKNFQQHILNILNKLILDQLGGAEISPKIKKAACNICTVDSDQLAQLEETLQGNLCDAELSSSLSSPSYRFQGILPSSGSEDLLWKWDALKAYQNFVFEEDRLHSIQIANHICNLIQKGNIVVQWKLYNYIFNPVLQRGVELAHHCQHLSVTSAQSHVCSHHNQCLPQDVLQIYVKTLPILLKSRVIRDLFLSCNGVSQIIELNCLNGIRSHSLKAFETLIISLGEQQKDASVPDIDGIDIEQKELSSVHVGTSFHHQQAYSDSPQSLSKFYAGLKEAYPKRRKTVNQDVHINTINLFLCVAFLCVSKEAESDRESANDSEDTSGYDSTASEPLSHMLPCISLESLVLPSPEHMHQAADIWSMCRWIYMLSSVFQKQFYRLGGFRVCHKLIFMIIQKLFRSHKEEQGKKEGDTSVNENQDLNRISQPKRTMKEDLLSLAIKSDPIPSELGSLKKSADSLGKLELQHISSINVEEVSATEAAPEEAKLFTSQESETSLQSIRLLEALLAICLHGARTSQQKMELELPNQNLSVESILFEMRDHLSQSKVIETQLAKPLFDALLRVALGNYSADFEHNDAMTEKSHQSAEELSSQPGDFSEEAEDSQCCSFKLLVEEEGYEADSESNPEDGETQDDGVDLKSETEGFSASSSPNDLLENLTQGEIIYPEICMLELNLLSASKAKLDVLAHVFESFLKIIRQKEKNVFLLMQQGTVKNLLGGFLSILTQDDSDFQACQRVLVDLLVSLMSSRTCSEELTLLLRIFLEKSPCTKILLLGILKIIESDTTMSPSQYLTFPLLHAPNLSNGVSSQKYPGILNSKAMGLLRRARVSRSKKEADRESFPHRLLSSWHIAPVHLPLLGQNCWPHLSEGFSVSLWFNVECIHEAESTTEKGKKIKKRNKSLILPDSSFDGTESDRPEGAEYINPGERLIEEGCIHIISLGSKALMIQVWADPHNATLIFRVCMDSNDDMKAVLLAQVESQENIFLPSKWQHLVLTYLQQPQGKRRIHGKISIWVSGQRKPDVTLDFMLPRKTSLSSDSNKTFCMIGHCLSSQEEFLQLAGKWDLGNLLLFNGAKVGSQEAFYLYACGPNHTSVMPCKYGKPVNDYSKYINKEILRCEQIRELFMTKKDVDIGLLIESLSVVYTTYCPAQYTIYEPVIRLKGQMKTQLSQRPFSSKEVQSILLEPHHLKNLQPTEYKTIQGILHEIGGTGIFVFLFARVVELSSCEETQALALRVILSLIKYNQQRVHELENCNGLSMIHQVLIKQKCIVGFYILKTLLEGCCGEDIIYMNENGEFKLDVDSNAIIQDVKLLEELLLDWKIWSKAEQGVWETLLAALEVLIRADHHQQMFNIKQLLKAQVVHHFLLTCQVLQEYKEGQLTPMPREVCRSFVKIIAEVL

SEQ ID NO: 1106 - DNA, 8046 bp, Homo sapien
ctgcggcggcgcgctccgagcctgcgtctagggcgcccccgggtcagagctgtcgccgtggccgccgctgcaaagaacaatgtaccgcaagcagcgctcgctcctccgtttcttcccaccggcctaaagacgacggcgggggcggcccgcgcagcggccgcagctctggctcctcttcaggcccggctcgccgcagctcaccgccgccttccgccctccggctcctcgtcgcggaccccggctcgccgaccccgctcgccctcaaggcaccgcggccgccgggcctcgccgtccccgccacgggttcgtcgcgtctccccgtccccgcctcgggcccgtcgcggctccccgtcgccaccgcggggccgacgactcttcccgccgggcccggccggcttcagaggcagcagccgaggggagtcccgcgccgactatgcccgggacggccgcggagaccatccaggcgacagcggcagccggagacgctctcctggtctgtgttctgactctttggaaaagagcttaaggatcactgttggcaatgaccacttctgtgttagcacaccagaacggcgacggcttagtgatcggctggggtcaccagtggataatctggaagacatggacagggatgacctgactgatgattctgtcttcactcgaagctcccagtgctctcggggtcttgagcgatatatttcccaggaggaagggcctctcagtcccttcttgggacaacttgatgaggactaccgaacaaaagaaactttcctgcatcgatctgattatagtccccatatcagttgtcatgatgagctgttgcggggaacagaacggaatcgagaaaaactcaaaggctactccatacgatctgaagaaaggagccgggaggccaaaagaccccgttatgatgacacagtgaagataaacagcatgggaggggatcacccaagttttacatcaggaactcgcaactatcgacagcgtagaagaagcccaagtcctaggtttctcgaccctgagtttcgagaactggatcttgccagacgaaagcgagaggaagaggaggagcgaagtaggagcttgagtcaggagctggttggggttgatggtggtggtactggctgttccatccctggattgtcaggtgtcctaacagcatcggagccaggatattctttgcatcggcctgaggaagtatctgtgatgcccaagaaatccattttgaagaagcggattgaggtggacataatggagccctccatgcagcttgagagtttttccagcagtaccagctccagccaggatcaccctctctactctgggcacccatcccttccactaagtggtgctattgctgcttttgcctcagagattgaaaacaaggggactatggtagagactgccttgaaggaacctcagggcaacctctaccaatggggtccccttcctgggattcccaaagacaacagtcctctcagagaaaaatttggaagttttctatgccacaaggataatttggatttgaaggctgagggacctgagcgacacacagacttcctgctgccccatgagagagctagccaggatggcagtggtttttcccgcattctgagcatgttggctgattctaccagtacacaggaaaaaaggcgacgtagctttcccgacattgaagatgaggagaaatttctctatggggatgaagaagaggatttaaaggcagaatccgtaccaaagccccttgggagctctgagagtgaagttatgaggcagaaggcaagctccctgccgtcttcagctccagctgtaaagctagaatcactagaagagaccaatccagaatatgcgaagatccatgacttgctcaagacaatagggctggatattggagtagcagagattagtcaattggctgcacgcacccaggaacgacttcatggcaagaagccatcattacgctcctcagctgaccgccgttcctcagttgaccgatacttttcagctgaccactgttcctcagttgaccaccgcttctcagctgaccgctgttcctcagttgaccactgcttctcagctgatcgacgttcctcagatccccacagactagagagcagggaggcacatcatagcaatacccactctccagaggtgtcccatccacacccaccttctcctgtggatccttacctgctcacaaaaaacagccctccattcctaaagtctgaccatccagtgggtcatatttcaggaccagaggtggttggtagtgggtttcagtcatctgttgcagtcaggtgcatgttgccatcagccccatctgccccaattagacttccacacactgctgctttatctcagtttcacatgccaagggcctctcagtttgctgcagctcggatacctccgaactaccagggacctgccattccccctgcctcttttgatgcctataggcactacatggcatatgcagcctccagatggcccatgtatcccacctctcaaccgtcaaaccaccctgtacctgaaccacacaggataatgccaataaccaaacaagctactcgtagccgtcccaatcttcgtgtgatccccactgtgactcctgataagcctaagcagaaagagtctctgcgaggctcaattcctgcggcccaagtgcctgtccaggtgtccattccatcactcataagatataatccagagaagatctctgatgagaagaaccgtgcttcccagaagcaaaaggttattgaagagagggaaaaactaaagaatgaccgggaagcccgccagaagaagatgtactatcttaggaccgagttagagcggcttcataaacaacaaggagaaatgctgcgcaagaaacgaagggagaaggatggccacaaagatcctctcttggtggaggtgagtcggcttcaggataacattatgaaggacattgcagagctacggcaagaggcagaagaggcagaaaagaagcaatctgaactggacaaagtggctcagatcttgggaattaacattttcgataaatcccagaagtctttaagtgacagtagagagcctacagagaagcctgggaaagcagaaaaatctaagagcccagaaaaagtgtcatcgttctcaaactcctcctccaacaaggaatcaaaagtaaacaatgagaagttttgtattaagagccccaagcctgccgaaagcccccagtcagccactaagcagttggatcagcccactgctgcttatgagtattatgatgctggcaatcactggtgcaaagactgcaacaccatctgtgggaccatgtttgatttcttcactcatatgcacaataagaagcacacacagacactggatccctacaacagaccttgggcttcaaagacccagagtgaggccaagcaagatgccataaagcgcactgacaagataactgttcctgcaaaaggctctgagtttctggttcccatcagtggattttattgccagctctgtgaggaatttttgggggatccaatttctggggagcaacatgtgaagggtcaccaacacaatgagaaatacaagaaatatgtggatgaaaacccattatatgaggagcggcggaatctggaccgccaagctggcttggctgtggtcctagagacagaacggcgacggcagagtgagctaaagcgcaaacttagtgagaaaccaaaggaggagaagaaagaaaaaaaggcaaaggctgtgaaagaagtaaaggaggatgacaaggtctctgagaaattagaagaccaactctctgagggtaggaactcccctgaaaaagctgaaaataaaaggaacactggcatcaaactccagtttaaagaagaagtaaagaaggaatcaccaacatcatcttcttttgggaaattcagctggaagaagcccgaaaaagaagaggagaaaagttccttggtgaccccaagtatctctaaagaagagattctagaaagtagtaaggacaaagaggatggcaaaactgaagctgggaaggcaaagcctatcaaaatcaagctctctgggaaaactgttgttgcacataccagcccttggatgcctgttgtgacaacttccacacagactaagatcggacccaacctgcctattccatccacagtactccgcaagtcatgttcagccacaatgagcaagccagctcctcttaacacctttctgtctattaagtcctctggaaccactgctaaacctctgccagtggttaaagagtcttcagctgatctcctcttacctccagacatcatctccaaagcatttggaggggaagaggtgattctaaaagggtctccagaggaaaaagtggtgttggctgaaaagagtgagccatctcatttacctgaacaaatactaccacctcctccaccacccccacctccaccacctccaccaccccccgttatacctcatccagctgccccgtctgctgctcaagcaaatgctatcttggctccagtaaaatcaaacccagttgtatctcaaactctcagccctggcttcgtgggtcctaacattttgaacccagtgttgcctgtagccatcatggcctcagcacagccagctgccattccttctgatgagacagctcctggggtgagtgagagtgaccgagaccagaccctgttctctgtgttagtacgtcctccaccacccctctcaagtgtgttcagtgaacaagccaaaaaattagagaagcgaaattcatgcttagccacagccaatgctaaggacctgtatgacatattctatagtagtggtggaaagggggcccctgagactaagggggcccctgagactaagctaagtggtggtccattggccaatggggaaaatagcaacctctctagaaccaaaagttcagacacctcttctacttctcctttgaacagcagtgcatcccaagaggagttgcatcaagatgagggtttggtcgctgctcctatagttagcaactctgaaaagcccattgcaaaaactctggtggccctagggaaatggtcagttgtagaacatgtaggcccaaaaagcacaggcagcacctatggcttcctacagcctctgacaaggttgtgccaaagcaggccttatgaaacaattaccccaaagacagacactttggccatatggacctctagttccttccagagtgacactagtagggatatatctccagagaagagtgagcttgacctgggagagccaggaccacctggtgtagaaccacctcctcaactgttagatatacagtgcaaagaatctcagaagttggtagaaatccacctcagagaatctgttaaccaggataaggaaagccaagagctccgtaaatctgaggattgtagagaaagtgagatagagacaaacactgaactaaaagaaagggtaaaggagctgtctgaggggatagttgatgagggagcaagtaccagcattggaccccacagcatagatgattctaatttgaaccatggaaacagatacatgtgggagggagaagtaaaacagcccaacttgctaatgattgacaaagaggctgaacagtccaataaattgatgacaggaagtgaaactccaagtaaagtagtgatcaaattgagtccacaggcttgctctttcacaaaggcaaaattagactcatttttatcagaagctaggtctttactcaacccacaagatacacctgtgaaaatttctgccccagagttgctgcttcattccccagccagatcagctatgtgtttaacaggtagtccacaagagcaaggagtttcagttgttagtgaggaggggctagagaattcagctccagaatcagcttctagaacttctaggtacagaagtctcaaactcaagagagaaagatcaaaagactttcaagttaaaaagatctatgagttggctgtttgggatgaaaacaagaagaggccagagacctgggagagcccagagaaaccaaaaacagaagcactggagctacaagatgtccatccagagttaacagtgacaatagaaagcaaggccctagaagactttgaagctacagacttaaaggtagaggagcttactgccctggggaatctgggggatatgcctgttgatttctgcactactcgggtaagcccagcacatagatccccaactgtcttgtgtcagaaagtgtgtgaagaaaattctgtatcacctatagggtgtaattcctccgatcccgctgacttcgaaccaatcccatctttttctgggtttccgttagattctcccaaaaccttggtgcttgactttgagacagagggtgaacgaaactcacctaatcccaggagtgttaggatcccttctcctaacattttgaaaactggacttacagaaaatgttgaccgtggcttggggggcctagagggaacacaccaggcccttgacctgttagcaggaggaatgatgcctgaggaagtaaaagaatcttcccaattagacaaacaagagtcactcggattggaattaaaaacaattaattttgcaggccttgggccatctccttgccttccagaccttgttgactttgtcacacggacctctggagttcaaaaagataaactgtgttctccactctctgagccaggtgacccttctaaatgtagttccctggagttggggccattacagctagaaatatcgaatgcatccaccacagaggtggcaattctgcaagtagatgatgacagtggcgaccctctgaatttggttaaagctccagtgtcaaggtcccctccaagggagcaggtaattgaagacaatatggtccctcagggaatgcctgaacaggaaactacagttggtgccatccaggaccacacagaatccagtgttcacaactaagaataaatacctagagctacttgtgagtgaatcattggcttctagaaatcagatgcccagatgatccaagactagtttgttatctcatctggaacctacaccaagagatgcagtcagcatcttaaagtaaatgttcatggaagctaaaaaatttacctcctttccttttccctttccccttaaaacaccagacaaatcgataacaacttatatatatatatatatatatctgtaaaaatgtattttgttaatttttttggccaatttattttctcccactttgtcattaaaatcacatgtctaactggctcaccacatagtgtgctttgattgtattttggctttgactctgccatttctgaaatgtgggggaggatggaggcagctgacctctccagttgctgtgttgtattcctacccaatttcctgggcagttgatgcatctctgggaaaaacaccagaaagcttgctgaaatggaaaacttggaagaattgttcatctcttaggcttccatttggatgggcctgccttaacattgtttgaaatgcagcgtgagtagctcttttgtttactgtttacaccccttattggcatgtcaactcctgtacttcccttactctgttgcctttcttgagatgcattgtcctgctaacccacaaacctgtttggaaataaacatggaagaatatctggcaggcttacttttagaagacgacaaatcggtaaggcttattcatggttcattgccaggagcagatatgcttttgagatcacttttatttttgaaatggcctttgttcattgtattgtgatccaataacactttgtattaaattgtttagcagccatttgtgttgtgaaggggtagaagatctctgaaacttgtctttagattgaactcattccctgttccacaaacccatatgtatcctttcctcaacctcctcctttcccaattaatttcaaccatagtacgatgtttggggttgtatattttgttaaaaagattaaagaatttatgagttggcttggacaagtttaactttatttttaatgtgttaattacttggaataaatgcattaatttcagaaaaaaaaaaaaaaaaaaaaaaaaaaaaaaaaaa

SEQ ID NO: 1107 - protein, 2000 aa, Homo sapien
MDRDDLTDDSVFTRSSQCSRGLERYISQEEGPLSPFLGQLDEDYRTKETFLHRSDYSPHISCHDELLRGTERNREKLKGYSIRSEERSREAKRPRYDDTVKINSMGGDHPSFTSGTRNYRQRRRSPSPRFLDPEFRELDLARRKREEEEERSRSLSQELVGVDGGGTGCSIPGLSGVLTASEPGYSLHRPEEVSVMPKKSILKKRIEVDIMEPSMQLESFSSSTSSSQDHPLYSGHPSLPLSGAIAAFASEIENKGTMVETALKEPQGNLYQWGPLPGIPKDNSPLREKFGSFLCHKDNLDLKAEGPERHTDFLLPHERASQDGSGFSRILSMLADSTSTQEKRRRSFPDIEDEEKFLYGDEEEDLKAESVPKPLGSSESEVMRQKASSLPSSAPAVKLESLEETNPEYAKIHDLLKTIGLDIGVAEISQLAARTQERLHGKKPSLRSSADRRSSVDRYFSADHCSSVDHRFSADRCSSVDHCFSADRRSSDPHRLESREAHHSNTHSPEVSHPHPPSPVDPYLLTKNSPPFLKSDHPVGHISGPEVVGSGFQSSVAVRCMLPSAPSAPIRLPHTAALSQFHMPRASQFAAARIPPNYQGPAIPPASFDAYRHYMAYAASRWPMYPTSQPSNHPVPEPHRIMPITKQATRSRPNLRVIPTVTPDKPKQKESLRGSIPAAQVPVQVSIPSLIRYNPEKISDEKNRASQKQKVIEEREKLKNDREARQKKMYYLRTELERLHKQQGEMLRKKRREKDGHKDPLLVEVSRLQDNIMKDIAELRQEAEEAEKKQSELDKVAQILGINIFDKSQKSLSDSREPTEKPGKAEKSKSPEKVSSFSNSSSNKESKVNNEKFCIKSPKPAESPQSATKQLDQPTAAYEYYDAGNHWCKDCNTICGTMFDFFTHMHNKKHTQTLDPYNRPWASKTQSEAKQDAIKRTDKITVPAKGSEFLVPISGFYCQLCEEFLGDPISGEQHVKGHQHNEKYKKYVDENPLYEERRNLDRQAGLAVVLETERRRQSELKRKLSEKPKEEKKEKKAKAVKEVKEDDKVSEKLEDQLSEGRNSPEKAENKRNTGIKLQFKEEVKKESPTSSSFGKFSWKKPEKEEEKSSLVTPSISKEEILESSKDKEDGKTEAGKAKPIKIKLSGKTVVAHTSPWMPVVTTSTQTKIGPNLPIPSTVLRKSCSATMSKPAPLNTFLSIKSSGTTAKPLPVVKESSADLLLPPDIISKAFGGEEVILKGSPEEKVVLAEKSEPSHLPEQILPPPPPPPPPPPPPPPVIPHPAAPSAAQANAILAPVKSNPVVSQTLSPGFVGPNILNPVLPVAIMASAQPAAIPSDETAPGVSESDRDQTLFSVLVRPPPPLSSVFSEQAKKLEKRNSCLATANAKDLYDIFYSSGGKGAPETKGAPETKLSGGPLANGENSNLSRTKSSDTSSTSPLNSSASQEELHQDEGLVAAPIVSNSEKPIAKTLVALGKWSVVEHVGPKSTGSTYGFLQPLTRLCQSRPYETITPKTDTLAIWTSSSFQSDTSRDISPEKSELDLGEPGPPGVEPPPQLLDIQCKESQKLVEIHLRESVNQDKESQELRKSEDCRESEIETNTELKERVKELSEGIVDEGASTSIGPHSIDDSNLNHGNRYMWEGEVKQPNLLMIDKEAEQSNKLMTGSETPSKVVIKLSPQACSFTKAKLDSFLSEARSLLNPQDTPVKISAPELLLHSPARSAMCLTGSPQEQGVSVVSEEGLENSAPESASRTSRYRSLKLKRERSKDFQVKKIYELAVWDENKKRPETWESPEKPKTEALELQDVHPELTVTIESKALEDFEATDLKVEELTALGNLGDMPVDFCTTRVSPAHRSPTVLCQKVCEENSVSPIGCNSSDPADFEPIPSFSGFPLDSPKTLVLDFETEGERNSPNPRSVRIPSPNILKTGLTENVDRGLGGLEGTHQALDLLAGGMMPEEVKESSQLDKQESLGLELKTINFAGLGPSPCLPDLVDFVTRTS

SEQ ID NO: 1108 - DNA, 8046 bp, Homo sapien; identical to SEQ ID NO: 1106

SEQ ID NO: 1109 - protein, 2099 aa, Homo sapien
MDRDDLTDDSVFTRSSQCSRGLERYISQEEGPLSPFLGQLDEDYRTKETFLHRSDYSPHISCHDELLRGTERNREKLKGYSIRSEERSREAKRPRYDDTVKINSMGGDHPSFTSGTRNYRQRRRSPSPRFLDPEFRELDLARRKREEEEERSRSLSQELVGVDGGGTGCSIPGLSGVLTASEPGYSLHRPEEVSVMPKKSILKKRIEVDIMEPSMQLESFSSSTSSSQDHPLYSGHPSLPLSGAIAAFASEIENKGTMVETALKEPQGNLYQWGPLPGIPKDNSPLREKFGSFLCHKDNLDLKAEGPERHTDFLLPHERASQDGSGFSRILSMLADSTSTQEKRRRSFPDIEDEEKFLYGDEEEDLKAESVPKPLGSSESEVMRQKASSLPSSAPAVKLESLEETNPEYAKIHDLLKTIGLDIGVAEISQLAARTQERLHGKKPSLRSSADRRSSVDRYFSADHCSSVDHRFSADRCSSVDHCFSADRRSSDPHRLESREAHHSNTHSPEVSHPHPPSPVDPYLLTKNSPPFLKSDHPVGHISGPEVVGSGFQSSVAVRCMLPSAPSAPIRLPHTAALSQFHMPRASQFAAARIPPNYQGPAIPPASFDAYRHYMAYAASRWPMYPTSQPSNHPVPEPHRIMPITKQATRSRPNLRVIPTVTPDKPKQKESLRGSIPAAQVPVQVSIPSLIRYNPEKISDEKNRASQKQKVIEEREKLKNDREARQKKMYYLRTELERLHKQQGEMLRKKRREKDGHKDPLLVEVSRLQDNIMKDIAELRQEAEEAEKKQSELDKVAQILGINIFDKSQKSLSDSREPTEKPGKAEKSKSPEKVSSFSNSSSNKESKVNNEKFCIKSPKPAESPQSATKQLDQPTAAYEYYDAGNHWCKDCNTICGTMFDFFTHMHNKKHTQTLDPYNRPWASKTQSEAKQDAIKRTDKITVPAKGSEFLVPISGFYCQLCEEFLGDPISGEQHVKGHQHNEKYKKYVDENPLYEERRNLDRQAGLAVVLETERRRQSELKRKLSEKPKEEKKEKKAKAVKEVKEDDKVSEKLEDQLSEGRNSPEKAENKRNTGIKLQFKEEVKKESPTSSSFGKFSWKKPEKEEEKSSLVTPSISKEEILESSKDKEDGKTEAGKAKPIKIKLSGKTVVAHTSPWMPVVTTSTQTKIGPNLPIPSTVLRKSCSATMSKPAPLNTFLSIKSSGTTAKPLPVVKESSADLLLPPDIISKAFGGEEVILKGSPEEKVVLAEKSEPSHLPEQILPPPPPPPPPPPPPPPVIPHPAAPSAAQANAILAPVKSNPVVSQTLSPGFVGPNILNPVLPVAIMASAQPAAIPSDETAPGVSESDRDQTLFSVLVRPPPPLSSVFSEQAKKLEKRNSCLATANAKDLYDIFYSSGGKGAPETKGAPETKLSGGPLANGENSNLSRTKSSDTSSTSPLNSSASQEELHQDEGLVAAPIVSNSEKPIAKTLVALGKWSVVEHVGPKSTGSTYGFLQPLTRLCQSRPYETITPKTDTLAIWTSSSFQSDTSRDISPEKSELDLGEPGPPGVEPPPQLLDIQCKESQKLVEIHLRESVNQDKESQELRKSEDCRESEIETNTELKERVKELSEGIVDEGASTSIGPHSIDDSNLNHGNRYMWEGEVKQPNLLMIDKEAEQSNKLMTGSETPSKVVIKLSPQACSFTKAKLDSFLSEARSLLNPQDTPVKISAPELLLHSPARSAMCLTGSPQEQGVSVVSEEGLENSAPESASRTSRYRSLKLKRERSKDFQVKKIYELAVWDENKKRPETWESPEKPKTEALELQDVHPELTVTIESKALEDFEATDLKVEELTALGNLGDMPVDFCTTRVSPAHRSPTVLCQKVCEENSVSPIGCNSSDPADFEPIPSFSGFPLDSPKTLVLDFETEGERNSPNPRSVRIPSPNILKTGLTENVDRGLGGLEGTHQALDLLAGGMMPEEVKESSQLDKQESLGLELKTINFAGLGPSPCLPDLVDFVTRTSGVQKDKLCSPLSEPGDPSKCSSLELGPLQLEISNASTTEVAILQVDDDSGDPLNLVKAPVSRSPPREQVIEDNMVPQGMPEQETTVGAIQDHTESSVHN

SEQ ID NO: 1110 - DNA, 1631 bp, Homo sapien
tttaacacccatagtaggcctaaaagcagccaccaattaagaaagccacagcacgtacacccactccagggatctgccagcaccctgtggggcccagactacaggctgatggcggaggcttcgagtgacccgggtgctgaggagcgggaagagttgctggggcccactgctcagtggagcgtggaggacgaggaggaggccgtccacgagcaatgccagcatgagagagacaggcagcttcaggcccaggacgaggagggaggcggccatgtccccgagcggccgaagcaggagatgctcctcagcctgaagccctcggaggcccctgaactggatgaggacgagggctttggcgactggtcccagaggccagagcagcggcagcagcacgagggggcgcagggcgccttggacagcggagagcccccccagtgcaggagtcctgagggggagcaagaggacaggcccggcctgcatgcctacgaaaaggaggacagtgatgaagtccacctggaggagttgagtctgagcaaggaggggccaggcccagaggacactgtccaggacaacctgggggccgcaggggctgaggaggaacaggaggagcaccagaaatgtcagcagcccaggacacccagccccttggtcttggaggggaccatcgaacagagctcgcctcccctgagccctaccaccaaactcatcgacaggaccgagtccctaaaccgctccatagagaagagtaacagtgtgaagaaatcccagccagacttgcccatctccaagattgatcagtggctggaacaatacacccaggccatcgagaccgctggccggacccccaagctagcccgccaggcctccatagagctgcccagcatggctgtggccagtaccaagagtcggtgggagacgggtgaggtacaggctcagtctgcggccaagactccgtcctgcaaggatattgtggctggagacatgagcaagaaaagcctctgggagcagaagggaggctccaagacctcatcaacaattaagagcaccccatctgggaagaggtataagtttgtggccaccgggcatgggaagtatgagaaggtgcttgtggaagggggcccggctccctaggcgtcccatctcgcttcctgggtctgcaggtccagccggctggcaccctccatgtacccaggggagattccagccagacacccgccccccggccctggctaagaagttgcttcctgttgccagcatgacctaccctcgcctctttgatgccatccgctgccacctccttttgctcctggaccctttagcctctctgcccttccactctctgaccaccgcccccgccctccccacccagctccgcttcttgttacttgggggaggaaagaaactcctgatcattggccaaagggacttacccctggagaggccaagtgccttctaggaagttaggaggttgaggcacagcctgtgcagagagggtgggtcacccccccagatccaaggggaaactgcaggtcaagggctgataacggccatgcaggatgcttgatgctgcgtcccccgctgcttgccgccccccaccccgccattttgtataataaagctccctgtgtattctc

SEQ ID NO: 1111 - protein, 339 aa, Homo sapien
MAEASSDPGAEEREELLGPTAQWSVEDEEEAVHEQCQHERDRQLQAQDEEGGGHVPERPKQEMLLSLKPSEAPELDEDEGFGDWSQRPEQRQQHEGAQGALDSGEPPQCRSPEGEQEDRPGLHAYEKEDSDEVHLEELSLSKEGPGPEDTVQDNLGAAGAEEEQEEHQKCQQPRTPSPLVLEGTIEQSSPPLSPTTKLIDRTESLNRSIEKSNSVKKSQPDLPISKIDQWLEQYTQAIETAGRTPKLARQASIELPSMAVASTKSRWETGEVQAQSAAKTPSCKDIVAGDMSKKSLWEQKGGSKTSSTIKSTPSGKRYKFVATGHGKYEKVLVEGGPAP

SEQ ID NO: 1112 - DNA, 576 bp, Homo sapien
aaacactctgtgtggctcctcggctttgggacagagtgcaagacgatgacttgcaaaatgtcgcagctggaacgcaacatagagaccatcatcaacaccttccaccaatactctgtgaagctggggcacccagacaccctgaaccagggggaattcaaagagctggtgcgaaaagatctgcaaaattttctcaagaaggagaataagaatgaaaaggtcatagaacacatcatggaggacctggacacaaatgcagacaagcagctgagcttcgaggagttcatcatgctgatggcgaggctaacctgggcctcccacgagaagatgcacgagggtgacgagggccctggccaccaccataagccaggcctcggggagggcaccccctaagaccacagtggccaagatcacagtggccacggccatggccacagtcatggtggccacggccacaggccactaatcaggaggccaggccaccctgcctctacccaaccagggccccggggcctgttatgtcaaactgtcttggctgtggggctaggggctggggccaaataaagtctcttcctccaa

SEQ ID NO: 1113 - protein, 114 aa, Homo sapien
MTCKMSQLERNIETIINTFHQYSVKLGHPDTLNQGEFKELVRKDLQNFLKKENKNEKVIEHIMEDLDTNADKQLSFEEFIMLMARLTWASHEKMHEGDEGPGHHHKPGLGEGTP

SEQ ID NO: 1114 - DNA, 4859 bp, Homo sapien
cacgttgggtgacataatggggtttttttaattatagattcacactgcatttattcatcacccctgtcctctcatccataactcaaatttactaccagcaacacaaaatacaaagatgtgtccagtttcactacagctcttcgcgtttacaagtgtcgagcgcttgctttcggaacgcccttgtgattggccgagccaatgccagtgacatcaaccaacttacttttgattggaaggctggttgctgggactgtagcgtttgcaggaagtcacttaactgtttgggagctggaaaaccgaagctgaagttctcttttgccataggaacgagcgcaactgactaggaaagatgtgtcccaaagctccgcaagctggaacgtgagccaggaggcccggaccggccacgggaccgcgaggcactccgaaagtgtgcggctgccccttccctgcctcccagctgttacccttttaaatgtcagtgttcgaggctgtaggggtagcacgaggcagcgaaacggaacagtcggattggccgcacgcctcagttctagacgcacctctccaccgaagccgttctgactggcagggggagaaagtaaacagagttgaatcaccctccccactggccaattggagggggtttggtttgtgacgtgatgggattctgcgaaattgttactgagcaagagaatgccggaacgtgcggaccggccggagcaggggttcagaagccgtcagtggactcgggaaaaagtgtctcttagacctggcgctcggcggggccctcgccacccgcgtcggggtgatcgggtgaatgtcctggggctttggctcgacggcgaggcggccgagggcgtgcacctctcttgcagtttcctctcccagcgcctcgggggcgttttcagtcgaataaacttgcgaccgccacgtgtggcatctttccaagggagccggctcagaggggccggcgcgcccgtcgggggatcgcggccggcgcggggcaggggcggcggctagaggcggcggcgcggcggagcccggggccgtggatgctgcgtgcggaggcgctgccggttacgtaaagatgaggggctgaggtcgcctcggcgctcctgcgagtcggaagcgccccgcgcccccgcccccttggccgccgcgccgtgccgggcgggcgggtcgtcgtccgaggccagggagggcgagccgaacctccgcagccaccgccaagtttgtccgcgccgcctgggctgccgtcgcccgcaccatgtccgcggccgcctacatggacttcgtggctgcccagtgtctggtttccatttcgaaccgcgctgcggtgccggagcatggggtcgctccggacgccgagcggctgcgactacctgagcgcgaggtgaccaaggagcacggtgacccgggggacacctggaaggattactgcacactggtcaccatcgccaagagcttgttggacctgaacaagtaccgacccatccagaccccctccgtgtgcagcgacagtctggaaagtccagatgaggatatgggatccgacagcgacgtgaccaccgaatctgggtcgagtccttcccacagcccggaggagagacaggatcctggcagcgcgcccagcccgctctccctcctccatcctggagtggctgcgaaggggaaacacgcctccgaaaagaggcacaagtgcccctacagtggctgtgggaaagtctatggaaaatcctcccatctcaaagcccattacagagtgcatacaggtgaacggcccttcccctgcacgtggccagactgccttaaaaagttctcccgctcagacgagctgacccgccactaccggacccacactggggaaaagcagttccgctgtccgctgtgtgagaagcgcttcatgaggagtgaccacctcacaaagcacgcccggcggcacaccgagttccaccccagcatgatcaagcgatcgaaaaaggcgctggccaacgctttgtgaggtgctgcccgtggaagccagggagggatggaccccgaaaggacaaaagtactcccaggaaacagacgcgtgaaaactgagccccagaagaggcacacttgacggcacaggaagtcactgctctttggtcaatattctgattttcctctccctgcattgtttttaaaaagcacattgtagcctaagatcaaagtcaacaacactcggtccccttgaagaggcaactctctgaacccgtctctgactgttggagggaaggcaaatgcttttgggttttttggtttttgtttttgtttttttttctccttttatttttttgcgggggagggtagggagtgggtgggggggagggggtaaggccaagactgggtagattttaaagattcaacactggtgtacatatgtccgctgggtgagttgacctgtggcctcgcacagtgattctaggccctttatgcttgctgtctctcagaattgttttcttaccttttaatgtaatgacgagtgtgcttcagtttgtttagcaaaaccactctcttgaatcacgttaacttttgagattaaaaaaaaaaacgccatagcacagctgtctttatgcaagcaagagcacatctactccagcatgatctgtcatctaaagacttgaaaacaaaaaacagttacttatagtcaatgggtaagcagagtctgaatttatactaatcaagacaaacctttgaaaggttacactaagtacagaacttttaaaccttgctttgtatgagttgtactttttgaacataagctgcacttttattttctaatgcagaggatgaataagttaaatacatgctttgaggatagaagcagatgttctgtttggcaccacgttataatctgcttattttacaatatacacgtttccctaagaaatcatgcgcagagatgtgagggcagaatatacacaacagatgctgaaggagaaggagggtagtgttttgcaaaagaaaaagaaaagaaccaacagaattttaactctattaacttttccaaattttcctatgcttttagttaacatcattattgtatcctaatgccactaggggagagagcttttgactctgttgggttttatttgaatgtgtgcataacagtaatgagatctggaaacacctattttttggggaaaaaggtttgttggtctccttcctgtgttcctacaaaactcccactctcaggtgcaagagttatgtagaaggaaagggagctgaaataggaacagaaaaatcaacccctataactagtgaacaccaagggaaaataccacaatgatttcagaggagactctgcaaaatcgtcccttgtggagaatgcaggcaacatggaatactacgaatgaaatcacatcactgtatcttttacatcaatagcctcaccactaatatatcttgtatctaggtgtctataatggctgaaaccactacatccatctatgccatttacctgaaaacttaactgtggcctttatgaggccagaaaagtgaactgagttttgtagttaagacctcaaatgaggggagtcagcagtgatcatgggggaaatgtttacattttttttttcttcagaagtaacgctttctgatgattttatctgatatttaaaacagggagctatggtgcactctagtttatacttgcgctctgaaatgtgtaaacatagggtgcctacctatttcacctgacccatactcgtttctgattcagaatcagtgtgggctcctgcagtgggcgcgggtcacggctgactccaacttccaatacaacagccatcactagcacagtgtttttttgtttaaccaacgtagtgttattagtagttctataaagagaactgcttttaacattagggactgggagcagtccatgggataaaaaggaaagtgttttctcacgagaaaacatgtcaggaaaaataaagaacactttctacctctgtttcagatttttgaaacacttattttaaaccaaattttaatttctgtgtccaaaataagttttaaggacatctgttcttccatacgaaataggttaggctgcctatttctcactgagctcatggaatggttctgcttatgatactctgcacgctgccttttagtgagtgaggagtttggggttgcctagcacttgctaacttgtaaaaagtcatctttccctcacagaaagaaacgaaagaaagcaaagcaaagtcagtgaaagacaatctttatagtttcaggagtaaatctaaatgtggcttttgtcaagcacttagatggatataaatgcagcaacttgttttaaaaaaatgcacatttacttcccaaaaaagttgttacttgccttttcaagtgtgacaaactcacatttgatattctcttatatgttatagtaatgtaacgtataaactcaagcctttttattctttgtgattaaatcctgttttaaaatgtcacaaaacaggaaccagcattctaattagatttactatatcaagatatggttcaaataggactactagagttcattgaacactaaaactatgaaacaattactttttatattaaaaagaccatggatttaacttatgaaaatccaaatgcaggatagtaatttttgtttacttttttaaccaaactgaatttttgaaagactattgcaggtgtttaaaaagaaagaaaagttgttttatctaatactgtaagtagttgtcatattctggaaaatttaatagttttagagttaagatatctcctctctttggttagggaagaagaaagcccttcaccattgtggaatgatgccctggctttaaggtttagctccacatcatgcttctctt

SEQ ID NO: 1115 - protein, 244 aa, Homo sapien
MSAAAYMDFVAAQCLVSISNRAAVPEHGVAPDAERLRLPEREVTKEHGDPGDTWKDYCTLVTIAKSLLDLNKYRPIQTPSVCSDSLESPDEDMGSDSDVTTESGSSPSHSPEERQDPGSAPSPLSLLHPGVAAKGKHASEKRHKCPYSGCGKVYGKSSHLKAHYRVHTGERPFPCTWPDCLKKFSRSDELTRHYRTHTGEKQFRCPLCEKRFMRSDHLTKHARRHTEFHPSMIKRSKKALANAL

SEQ ID NO: 1116 - DNA, 4859 bp, Homo sapien; identical to SEQ ID NO: 1114

SEQ ID NO: 1117 - protein, 244 aa, Homo sapien; identical to SEQ ID NO: 1115

SEQ ID NO: 1118 - DNA, 728 bp, Homo sapien
gcggcctcagatgaatgcggctgttaagacctgcaataatccagaatggctactctgatctatgttgataaggaaaatggagaaccaggcacccgtgtggttgctaaggatgggctgaagctggggtctggaccttcaatcaaagccttagatgggagatctcaagtttcaacaccacgttttggcaaaacgttcgatgccccaccagccttacctaaagctactagaaaggctttgggaactgtcaacagagctacagaaaagtctgtaaagaccaagggacccctcaaacaaaaacagccaagcttttctgccaaaaagatgactgagaagactgttaaagcaaaaagctctgttcctgcctcagatgatgcctatccagaaatagaaaaattctttcccttcaatcctctagactttgagagttttgacctgcctgaagagcaccagattgcgcacctccccttgagtggagtgcctctcatgatccttgacgaggagagagagcttgaaaagctgtttcagctgggccccccttcacctgtgaagatgccctctccaccatgggaatccaatctgttgcagtctccttcaagcattctgtcgaccctggatgttgaattgccacctgtttgctgtgacatagatatttaaatttcttagtgcttcagagtttgtgtgtatttgtattaataaagcattcttcaacagaaaaaaaaaaaaaaaaa

SEQ ID NO: 1119 - protein, 202 aa, Homo sapien
MATLIYVDKENGEPGTRVVAKDGLKLGSGPSIKALDGRSQVSTPRFGKTFDAPPALPKATRKALGTVNRATEKSVKTKGPLKQKQPSFSAKKMTEKTVKAKSSVPASDDAYPEIEKFFPFNPLDFESFDLPEEHQIAHLPLSGVPLMILDEERELEKLFQLGPPSPVKMPSPPWESNLLQSPSSILSTLDVELPPVCCDIDI

SEQ ID NO: 1120 - DNA, 2649 bp, Homo sapien
aggaggacctgggggtgtggcagcgaggaagggccgagccacggactgtggggccgaaactcgctcccgcccaccctttctcgaggctgtggcctccgcgagagccgagcgggccgcaccgccggccgtgcgactgccccagtcagacacgaccccggcttctagcccgcctaagcctgtttggggttgctgactcgtttcctccccgagtttcccgcgggaactaactcttcaagaggaccaaccgcagcccagagcttcgcagacccggccaaccagaggcgaggttgagagcccggcgggccgcggggagagagcgtcccatctgtcctggaaagcctgggcgggtggattgggaccccgagagaagcaggggagctcggcggggtgcagaagtgcccaggcccctccccgctggggttgggagcttgggcaggccagcttcacccttcctaagtccgcttctggtctccgggcccagcctcggccaccatgtcccgccagaccacctctgtgggctccagctgcctggacctgtggagggaaaagaatgaccggctcgttcgacaggccaaggtggctcagaactccggtctgactctgaggcgacagcagttggctcaggatgcactggaagggctcagagggctcctccatagtctgcaagggctccctgcagctgttcctgttcttcccttggagctgactgtcacctgcaacttcattatcctgagggcaagcttggcccagggtttcacagaggatcaggcccaggatatccagcggagcctagagagagtgctggagacacaggagcagcaggggcccaggttggaacaggggctcagggagctgtgggactctgtccttcgtgcttcctgccttctgccggagctgctgtctgccctgcaccgcctggttggcctgcaggctgccctctggttgagtgctgaccgtcttggggacctggccttgttactagagaccctgaatggcagccagagtggagcctctaaggatctgctgttacttctgaaaacttggagtcccccagctgaggaattagatgctccattgaccctgcaggatgcccagggattgaaggatgtcctcctgacagcatttgcctaccgccaaggtctccaggagctgatcacagggaacccagacaaggcactaagcagccttcatgaagcggcctcaggcctgtgtccacggcctgtgttggtccaggtgtacacagcactggggtcctgtcaccgtaagatgggaaatccacagagagcactgttgtacttggttgcagccctgaaagagggatcagcctggggtcctccacttctggaggcctctaggctctatcagcaactgggggacacaacagcagagctggagagtctggagctgctagttgaggccttgaatgtcccatgcagttccaaagccccgcagtttctcattgaggtagaattactactgccaccacctgacctagcctcaccccttcattgtggcactcagagccagaccaagcacatactagcaagcaggtgcctacagacggggagggcaggagacgctgcagagcattacttggacctgctggccctgttgctggatagctcggagccaaggttctccccacccccctcccctccagggccctgtatgcctgaggtgtttttggaggcagcggtagcactgatccaggcaggcagagcccaagatgccttgactctatgtgaggagttgctcagccgcacatcatctctgctacccaagatgtcccggctgtgggaagatgccagaaaaggaaccaaggaactgccatactgcccactctgggtctctgccacccacctgcttcagggccaggcctgggttcaactgggtgcccaaaaagtggcaattagtgaatttagcaggtgcctcgagctgctcttccgggccacacctgaggaaaaagaacaaggggcagctttcaactgtgagcagggatgtaagtcagatgcggcactgcagcagcttcgggcagccgccctaattagtcgtggactggaatgggtagccagcggccaggataccaaagccttacaggacttcctcctcagtgtgcagatgtgcccaggtaatcgagacacttactttcacctgcttcagactctgaagaggctagatcggagggatgaggccactgcactctggtggaggctggaggcccaaactaaggggtcacatgaagatgctctgtggtctctccccctgtacctagaaagctatttgagctggatccgtccctctgatcgtgacgccttccttgaagaatttcggacatctctgccaaagtcttgtgacctgtagctgccacgttttgaagagcttgagctgggtccccagtgggctgtctctctgtggggagggctttctgcttcaccatcattaggaatgtgaccattcctatataattcctggactggtgagattggtggtaggcctgtgaaatttgccctagttactaccattctcgttttggaggaaacaatctctgccaccaccaagtcattgactttgctcgaggcaccttttttcctgtttctccttttctgttgtcgagtaaaatttcatatttataaaaaaaaaaaaaaaaaa

SEQ ID NO: 1121 - protein, 622 aa, Homo sapien
MSRQTTSVGSSCLDLWREKNDRLVRQAKVAQNSGLTLRRQQLAQDALEGLRGLLHSLQGLPAAVPVLPLELTVTCNFIILRASLAQGFTEDQAQDIQRSLERVLETQEQQGPRLEQGLRELWDSVLRASCLLPELLSALHRLVGLQAALWLSADRLGDLALLLETLNGSQSGASKDLLLLLKTWSPPAEELDAPLTLQDAQGLKDVLLTAFAYRQGLQELITGNPDKALSSLHEAASGLCPRPVLVQVYTALGSCHRKMGNPQRALLYLVAALKEGSAWGPPLLEASRLYQQLGDTTAELESLELLVEALNVPCSSKAPQFLIEVELLLPPPDLASPLHCGTQSQTKHILASRCLQTGRAGDAAEHYLDLLALLLDSSEPRFSPPPSPPGPCMPEVFLEAAVALIQAGRAQDALTLCEELLSRTSSLLPKMSRLWEDARKGTKELPYCPLWVSATHLLQGQAWVQLGAQKVAISEFSRCLELLFRATPEEKEQGAAFNCEQGCKSDAALQQLRAAALISRGLEWVASGQDTKALQDFLLSVQMCPGNRDTYFHLLQTLKRLDRRDEATALWWRLEAQTKGSHEDALWSLPLYLESYLSWIRPSDRDAFLEEFRTSLPKSCDL

SEQ ID NO: 1122 - DNA, 2872 bp, Homo sapien
gacccacgcgtccgaaaagctatggcctcaaccaccagcaccaagaagatgatggaggaagccacctgctccatctgcctgagcctgatgacgaacccagtaagcatcaactgtggacacagctactgccacttgtgtataacagacttctttaaaaacccaagccaaaagcaactgaggcaggagacattctgctgtccccagtgtcgggctccatttcatatggatagcctccgacccaacaagcagctgggaagcctcattgaagccctcaaagagacggatcaagaaatgtcatgtgaggaacacggagagcagttccacctgttctgcgaagacgaggggcagctcatctgctggcgctgtgagcgggcaccacagcacaaagggcacaccacagctcttgttgaagacgtatgccagggctacaaggaaaagctccagaaagctgtgacaaaactgaagcaacttgaagacagatgtacggagcagaagctgtccacagcaatgcgaataactaaatggaaagagaaggtacagattcagagacaaaaaatccggtctgactttaagaatctccagtgtttcctacatgaggaagagaagtcttatctctggaggctggagaaagaagaacaacagactctgagtagactgagggactatgaggctggtctggggctgaagagcaatgaactcaagagccacatcctggaactggaggaaaaatgtcagggctcagcccagaaattgctgcagaatgtgaatgacactttgagcaggagttgggctgtgaagctggaaacatcagaggctgtctccttggaacttcatactatgtgcaatgtttccaagctttacttcgatgtgaagaaaatgttaaggagtcatcaagttagtgtgactctggatccagatacagctcatcacgaactaattctctctgaggatcggagacaagtgactcgtggatacacccaggagaatcaggacacatcttccaggagatttactgccttcccctgtgtcttgggttgtgaaggcttcacctcaggaagacgttactttgaagtggatgttggcgaaggaaccggatgggatttaggagtttgtatggaaaatgtgcagaggggcactggcatgaagcaagagcctcagtctggattctggaccctcaggctgtgcaaaaagaaaggctatgtagcacttacttctcccccaacttcccttcatctgcatgagcagcccctgcttgtgggaatttttctggactatgaggccggagttgtatccttttataacgggaatactggctgccacatctttactttcccgaaggcttccttctctgatactctccggccctatttccaggtttatcaatattctcctttgtttctgcctcccccaggtgactaaggaaaagagcagaagctccttggtttaaccagcacagagaaaataatataaatcccataagggcagacgtttggtctgttttcttcgctgtcatttccttagtagttagactagtgctgagattttagtggatatataattgatttatgttgaatatatggacttagcaactaaaaataccacagatggttaacctggactggggcaaagcaagataatagtgatgatcgtatgttgctgtctccatccgtctttaatgggtcagggctttgatttccaagggtcttcaggtgatgagtaggggtacccacaagtcagaaggtctgcgttctcctagtttgtttgctgccatttgaactcatgtagggaatgaaagaaagctgcaattatccgccaactgcatttaaaacaaaacaaaacagaaaaatcaaaataacattgactcttccaaccactgacatgttgtttaataatctaagcggcagtcctggaggctaccagacttactgagttctacctgagaaacagccaagcaaagtgtgagagaagggttaagactggcttacaatgagatgcttcaaatgaaaagggaattatgagtaaaattgaactttgatgggggattcagttctggaaaagaatttggtattttccagtctgctaggaccaattaccttgaaatattttaaaatctcagtaaatagttattgctgaaatggctgttggcagttcttattatgattcagagaagagcaaatagaccttaacttcattttgaaaaagaccaaattaccatacccgagtgagtaatgacaggactacaactaaaacataaacaacattaatgatgaccataaaaagtcacaaaattgctaaatgttataatttagagttgacataaaaattgatggccaggcatggtggctcacgcctgtaatcccagaactatgtgaggctgaggcaggtggatcacttgaggtcaggagttcaacaccagcctggccaacatggtgaaaccctgtctctactaaaaatacaaaaattagccgggcatggtggtaggggcctgtaacccagctactcgtgaggccaaggcaggagaattgcttgagcctgcagcagctgcagtaagccaagatcatgctgtgcctcaaggaaaaaaaaaattaatgtttactgatatttgttgaagtcctacaacatcacctctgagaataggagaaatgaagcaacagttgtgtctagatgtcagaggcatggctgggcctccatctctgcctaagggagatataaaagagttcaaactattgcccatgttccccagggtcagaagttctaattatgatgatagaggctgggttgtaagtagtaagtgaagggtagcagaatatgccatctttggcataagaagtattttgagttgaagacaattgagaaaaaaaaaaaaaaaaaa

SEQ ID NO: 1123 - protein, 465 aa, Homo sapien
MASTTSTKKMMEEATCSICLSLMTNPVSINCGHSYCHLCITDFFKNPSQKQLRQETFCCPQCRAPFHMDSLRPNKQLGSLIEALKETDQEMSCEEHGEQFHLFCEDEGQLICWRCERAPQHKGHTTALVEDVCQGYKEKLQKAVTKLKQLEDRCTEQKLSTAMRITKWKEKVQIQRQKIRSDFKNLQCFLHEEEKSYLWRLEKEEQQTLSRLRDYEAGLGLKSNELKSHILELEEKCQGSAQKLLQNVNDTLSRSWAVKLETSEAVSLELHTMCNVSKLYFDVKKMLRSHQVSVTLDPDTAHHELILSEDRRQVTRGYTQENQDTSSRRFTAFPCVLGCEGFTSGRRYFEVDVGEGTGWDLGVCMENVQRGTGMKQEPQSGFWTLRLCKKKGYVALTSPPTSLHLHEQPLLVGIFLDYEAGVVSFYNGNTGCHIFTFPKASFSDTLRPYFQVYQYSPLFLPPPGD

SEQ ID NO: 1124 - DNA, 6296 bp, Homo sapien
cactgggagagtttatgtggccgaggcagacaagtggaattaggccttgctgcaggggacttcatttccttctcagtactggacccatttatgaggaggtggcttatgaaagtgtgatgttcgcgtatttcttgacaggcagtggcgtgatcttggctcactgcaacctccgactccctggttcaagcgattctcctgcctcagcctcctgagtggggattacaggccacagcaaacacaggtgtgcaggaaccgtttgtcatggaagccagggagcctgggaggcccacacccacctaccatcttgtccctaacaccagccagtcccaggtggaagaagatgtcagctcgccacctcaaaggtcctccgaaactatgcagctgaagaaggagatctccctgctgaatggggtcagcctggtggtgggcaacatgatcggctcagggatctttgtctcacccaagggtgtgctggtacacactgcctcctatgggatgtcactgattgtgtgggccattggtgggctcttctctgttgtgggtgccctttgttatgcagagctggggaccaccatcaccaagtcgggagccagctacgcttatattctagaggcctttgggggcttcattgccttcatccgcctgtgggtctcactgctagttgttgagcccaccggtcaggccatcatcgccatcacctttgccaactacatcatccagccgtccttccccagctgtgatcccccatacctggcctgccgtctcctggctgctgcttgcatatgtctgctgacatttgtgaactgtgcctatgtcaagtggggcacacgtgtgcaggacacgttcacttacgccaaggtcgtagcgctcattgccatcattgtcatgggccttgttaaactgtgccagggacactctgagcactttcaggacgcctttgagggttcctcctgggacatgggaaacctctctcttgccctctactctgccctcttctcttactcaggttgggacacccttaattttgtaacagaagaaatcaaaaacccagaaagaaatttgcccttggccattgggatttctatgccaattgtgacgctcatctacatcctgaccaatgtggcctattacacagtgctgaacatttcagatgtccttagcagtgatgctgtggctgtgacatttgctgaccagacgtttggcatgttcagctggaccatccccattgctgttgccctgtcctgctttgggggcctcaatgcatccatctttgcttcatcaaggttgttcttcgtgggctcccgggagggccacctaccggaccttctgtccatgatccacattgagcgttttacacctatccctgctttactgttcaattgcaccatggcactcatctacctcatcgtggaggatgttttccagcttatcaactacttcagcttcagctactggttcttcgtgggcctgtctgttgttggacagctctacctccgctggaaggagcccaagcggccccggcctctcaagctgagcgtgtttttccccatcgtgttctgcatatgctccgtgtttctggtgatagtgcccctcttcactgacaccattaattccctcattggcatcgggattgccctttctggagtccctttctacttcatgggtgtttacctgccagagtcccggaggccattgtttattcggaatgtcctggctgctatcaccagaggcacccagcagctttgcttttgtgtcctgactgagcttgatgtagccgaagaaaaaaaggatgagaggaaaactgactagaggtcagaggtggctttctgaggcctggaaggcaggccaaccagcaaaatcctgataacaagactctgtgggcccaactctcctgaattaaaggagccttttgacccaatcatatagtggggctcagggccagtgctcactcttattggtaagctataggagactcaggatctgggccaacctcaaggtgggggcttcagagggtggggggaagattggggaacggggggaatggtcatttagttttactcctgataggtagatgcagctcttacagatatttacttggtaaagtgcagtggggaagagggaatgctaggttgatagggctggtggcttctgaatttggtatttgaactaggagtccctatagaggggctgctttatgggaagtttttctctgaccaggtacaacacctgactttaaaggcctgaaatgctaccatttcttcctctggctcaaaattcttccctggggagagagttatattcccttatttattgatatttagtccagaacaccagttctaacgaagcatgcgtgtctcttcatctacaggatgcaataggctgattgtatttaaaaatcaaagtacccaaaactgagtccctttgggctcagaaatgtctgtggtattgggtcagactctgaccacagattttatgctgtttagcacaatttctattgagtcttacctgcaacaatgaaccttaaagatttttttactcacgtacctgttacactttagcatacagatagatcatagatcacgttacaagcacttggctcaggtccagcaaggacagatgaacaaattcctgagtcagaagtctgttaatattgctgttttgaaggacaatcctttattttacttgagaccttacatctttgttctagctgacagtaaatctctgggtttctgttacgaactctaagagggctgaaacttctgatattcaggtggatcacctgaattctctcagctgtcaatggcttggagaacatctcatgggcccaagtcatcaaataacctgttcctctctgtaagggcagtgtgagggactgctgtgcagacccaagcaatcccaacctggtgctaggtcatttcacttttctgaaaacctcacatcaggctgcatcctcttctgtccctggcaccaggctttgtttacacttggagccaccttggtgtgggtcaccgggacagtgtactcctctcctgccagcctccccttccccgaggtgtggtggctgcagtctcaggaagagcttggtacttgtggggacttctgttttctccctgtggagatcagtgaagactgggaggaaagctgcttcaacctgagtccggctcttcagcaggctgcacaagtggaagcaactaattctggtgctcaggctgggctctccacccaagttaggcctgctctggcctaatggatcttactgtatgagcaggacggctgcattggattgtacaactgttttgtgatgcccccagacactgtcatcctaggccgagaagaacctgctagcttgacataccccatgggcttatccttaggttttggaattggtcaacagtgaggcagtctcccttcctgaccattcttctccacccagtcacagataagggaataaccttggccatatatttgctcaataaagattgaaggaagcatggtcatagttgccctgggttcagagcataatgcatatgtgaagcatggggtgacattcctactgtcatgggtttgggatttgtaacggcaaattcctgcccgacgacagggtgtcttatgcaaaggctgacttgcctgaacgctaagaacatgacttctgtctgagctaagctggcacccatcccagggctcctctggagctaatcctttaagcaaaatgtgcttgccttttaaagatccctgaccccagctttagctttctccaccagataaccagctaatcccaggaatttgctgccccccaccagtggcttctagggaaagcaaggacctcacatgccaggtgccctagtacttgcttagtgagccatgtcatcctcctttcatttttggatggtgacagcatttttcccctctgtgctggatacagacttctcccaggatcctctctttgggagcgaagccagaggatccctacagcactcaagcttcatggtggaattaatttctgccagctctttgttgtctgtctccttaaatccttttcctggtgtgcttattatcccttttgcagtgagtacagtttattaagttgtcagccctttaatattggggaaacttaatgagtataaatagcagggagcacattgtaacagcacagtgttttgtttttttcacccggttgctgtatgagaatggctttcaatcctttgtttctatgcctacagacagaaagcaagatgtctaatattagacatacaagttgctgcctgttataacggtgaattatacctttgtgcatgcctaggatgtttgttgttttaattagctgcaatatatacggcctgtgtacacagaatttaatcacttcggcaggttgaacaactccatgtagataagagcaagtgtaggcaaaggtttagaaaatggacataaagtcaaagaatgatggcaggtaggatgaaggagagatacttaggaaatcctaaaagaggcggcaagaaggtacctccctgtgtaactcaccttcccccatgacagtaagagacactcacaggctatgagggtacacccctagctgaatgttctgtgttgtttccttagacctgtggtgtccgctgcaacagctactagccacgtgtagctaattacattaaaatgaaataaaattaaaagctcagtttctcagttgcgctaatcacatttcaagtgctcagcagccacccgtgtctactactacacagtgcagacacagaacatatcatcactgcagatagttctactggacaatgttacgctagaataaacaccaaggcagtcagttaaggcagctatggtttggaaaggcatacggacagagtctgcttagaagagatacaagttgttaataaaattgatcctgttgatagtagtttgtttttgtggtgggtgctgtgaagagtaaacattactcagtggaaagctaagttcagaaggtactttgtttttcctcccttgccttaagtccttggtatttataatcaatgctgaaccttctatttcactaccgctccctgttttagatattcagatttaaaaggttttcaaagaattactttcttccatgttcaaagctagattttactaaacacatgtatcacattcatatatattgtttcttggccccactgccaaaggaagtcagtcagtaatttcacaaccgttatcagagtttggaagcagaaatagctgttaactaaaatctcccactgctcagactactttctgccctaatggccattactatccagtctgtattgctacaagggacccactggtaccccttttagattctatcaaaaggaacagggttttcctagaggcaggcagcctggtggtatggcacagcagaagcttactgctaatgaaatgggaacctccccctcccttgtggtttcagcacagaacctgaatgccaggaaaaattcctgggccaagaagctaaagctaaagaaaccttccttttttcaacgtttttttttctttcaaactgtagggtcacttttgattgaggcaaaggggtcctactgtaagtggaaaagactcactcccctaacataagttttcactgtggtgggatggtgccgcccgatatgcttgatatgcttttccttccacatgttaagctaggaaacctaacaggatgtcagcagggcagttaactctggactcagagccctcaagggcatgtggcagaacctcatggacatcacaagaccatcagtctgaatccaggtcgtgggggctgtcatagccgaactccttctgcacatccagagggtacttgctccacatccgctgtctgctgctgcctctttcctcctcactcaggctgttgtagtcagcagagcctagaatgacatcccgggagtggattctaaatgtgattttcctaggctactgcaggagccccttctcttctcagaaaggtctgtttttgttcccgattgtaatgcaaaatccttgctcaataaataaaaaagaatatagaattcttttttttttaaagaaggaatcactttcctatcatctaaaccaagttccttcacactggagtattttgtcacttctcccctccgtggagtattttgtcacttctcccctccgtataggattttttgttgttgtaagagttgtagtcatattgtaaatatttttgtacctttctccttttaacgtgttattgacaaacctccccaaaagaatatgcaattgtttgattcatttctctgttatcagacaccaataaattctttttgttgggc

SEQ ID NO: 1125 - protein, 515 aa, Homo sapien
MEAREPGRPTPTYHLVPNTSQSQVEEDVSSPPQRSSETMQLKKEISLLNGVSLVVGNMIGSGIFVSPKGVLVHTASYGMSLIVWAIGGLFSVVGALCYAELGTTITKSGASYAYILEAFGGFIAFIRLWVSLLVVEPTGQAIIAITFANYIIQPSFPSCDPPYLACRLLAAACICLLTFVNCAYVKWGTRVQDTFTYAKVVALIAIIVMGLVKLCQGHSEHFQDAFEGSSWDMGNLSLALYSALFSYSGWDTLNFVTEEIKNPERNLPLAIGISMPIVTLIYILTNVAYYTVLNISDVLSSDAVAVTFADQTFGMFSWTIPIAVALSCFGGLNASIFASSRLFFVGSREGHLPDLLSMIHIERFTPIPALLFNCTMALIYLIVEDVFQLINYFSFSYWFFVGLSVVGQLYLRWKEPKRPRPLKLSVFFPIVFCICSVFLVIVPLFTDTINSLIGIGIALSGVPFYFMGVYLPESRRPLFIRNVLAAITRGTQQLCFCVLTELDVAEEKKDERKTD

SEQ ID NO: 1126 - DNA, 1219 bp, Homo sapien
gggaagatggcgaaggtctcagagctttacgatgtcacttgggaagaaatgagagataaaatgagaaaatggagagaagaaaactcaagaaatagtgagcaaattgtggaagttggagaagaattaattaatgaatatgcttctaagctgggagatgatatttggatcatatatgaacaggtgatgattgcagcactagactatggtcgggatgacttggcattgttttgtcttcaagagctgagaagacagttccctggcagtcacagagtcaagcgattaacaggcatgagatttgaagccatggaaagatatgatgatgctatacagctatatgataggattttacaagaagatccaactaacactgctgcaagaaagcgtaagattgccattcgaaaagcccaggggaaaaatgtggaggccattcgggagctgaatgagtatctggaacaatttgttggagaccaagaagcctggcatgaacttgcagaactttacatcaatgaacatgactatgcaaaagcagccttttgtttagaggaactaatgatgactaatccacacaaccacttatactgtcagcagtatgctgaagttaagtatacccaaggtggacttgaaaacctcgaactttcaagaaagtattttgcacaggcattgaaactgaacaacagaaatatgagagctttgtttggactttatatgtcggcaagtcatattgcttctaatccaaaagcaagtgcaaaaacgaaaaaggacaacatgaaatatgctagttgggcagctagtcaaataaacagagcttatcagtttgcaggtcgaagtaagaaggaaaccaaatattctcttaaggctgtcgaagacatgttggaaacattgcagatcacccagtcttaaggtttcaaaaactctttgacattagatttcacaactgcacaattgaacttattggcctgtaacttatttactaaatgctcagtgctatttatatactacagtaattttctgttaagaaggcagttgtaaagaatgtgtttatataaacctaaaaatgccttttactgctaagtggggagatgggggaaatccatggaagagagatttaagacttattgattgtacatcagtctcttcatatcacatatacatgtatatatataaaactctaatgtagtataaccttgttaaataaaccatgatgatttattaaacttgc

SEQ ID NO: 1127 - protein, 297 aa, Homo sapien
MAKVSELYDVTWEEMRDKMRKWREENSRNSEQIVEVGEELINEYASKLGDDIWIIYEQVMIAALDYGRDDLALFCLQELRRQFPGSHRVKRLTGMRFEAMERYDDAIQLYDRILQEDPTNTAARKRKIAIRKAQGKNVEAIRELNEYLEQFVGDQEAWHELAELYINEHDYAKAAFCLEELMMTNPHNHLYCQQYAEVKYTQGGLENLELSRKYFAQALKLNNRNMRALFGLYMSASHIASNPKASAKTKKDNMKYASWAASQINRAYQFAGRSKKETKYSLKAVEDMLETLQITQS

SEQ ID NO: 1128 - DNA, 1539 bp, Homo sapien
gctgactccagtgtcccgagaggcgccgcttcttccgctttctcgtcaggctcctgcaaccccaggcatgaaccaaggtttctgaactactgggcgggagccaacgtctcttctttctcccgctctggcggaggctttgtcgctgcgggctgggccccagggtgtcccccatggcggggccgcgggtggaggtcgatggcagcatcatggaagggggcggccagatcctgagagtctctacggccttgagctgtctcctaggcctccccttgcgggtgcagaagatccgagccggccggagcacgccaggcctgaggcctcaacatttatctggactggaaatgattcgagatttgtgtgatgggcaactggagggggcagaaattggctcaacagaaataacctttacaccagagaagatcaaaggtggaatccacacagcagataccaagacagcagggagtgtgtgcctcttgatgcaggtctcaatgccgtgtgttctctttgctgcttctccatcagaacttcatttgaaaggtggaactaatgctgaaatggcaccacagatcgattatacagtgatggtcttcaagccaattgttgaaaaatttggtttcatatttaattgtgacattaaaacaaggggatattacccaaaagggggtggtgaagtgattgttcgaatgtcaccagttaaacaattgaaccctataaatttaactgagcgtggctgtgtgactaagatatatggaagagctttcgttgctggtgttttgccatttaaagtagcaaaagatatggcagcggcagcagttagatgcatcagaaaggagatccgggatttgtatgttaacatccagcctgttcaagaacctaaagaccaagcatttggcaatggaaatggaataataattattgctgagacctccactggctgtttgtttgctggatcatcgcttggtaaacgaggtgtaaatgcagacaaagttggaattgaagctgccgaaatgctattagcaaatcttagacatggtggtactgtggatgagtatctgcaagaccagctgattgttttcatggcattagccaatggagtttccagaataaaaacaggaccagttacactccatacgcaaaccgcgatacattttgctgaacaaatagcaaaggctaaatttattgtgaagaaatcagaagatgaagaagacgccgctaaagatacttatattattgaatgccaaggaattgggatgacaaatccaaatctatagagtatttgcctcttaaatgatacctcattgatatattgcactatttcataaatactataaaataatgactaggaagtaacttattaaaggctatgacttaaatttgaagatgaagtacagtgttctaggtttgctgagaaggcttcattaaattaatctcactttgaatatctcctgagagatggacaatgaaatatcagttggtggatatgtgtgatagctgatttcaatattgaagtattgaaataaaatattctttacacctgag

SEQ ID NO: 1129 - protein, 366 aa, Homo sapien
MAGPRVEVDGSIMEGGGQILRVSTALSCLLGLPLRVQKIRAGRSTPGLRPQHLSGLEMIRDLCDGQLEGAEIGSTEITFTPEKIKGGIHTADTKTAGSVCLLMQVSMPCVLFAASPSELHLKGGTNAEMAPQIDYTVMVFKPIVEKFGFIFNCDIKTRGYYPKGGGEVIVRMSPVKQLNPINLTERGCVTKIYGRAFVAGVLPFKVAKDMAAAAVRCIRKEIRDLYVNIQPVQEPKDQAFGNGNGIIIIAETSTGCLFAGSSLGKRGVNADKVGIEAAEMLLANLRHGGTVDEYLQDQLIVFMALANGVSRIKTGPVTLHTQTAIHFAEQIAKAKFIVKKSEDEEDAAKDTYIIECQGIGMTNPNL

SEQ ID NO: 1130 - DNA, 3906 bp, Homo sapien
ctggcgcgcgcacgcgcacgcgcacgcccaccgcgcggcttcccccgctccccggtgctgaggagagagcgatccgagggactgcgccgcccggacggcctgcagagcgctgccatcatgagtgaaattcgtaaggacaccttgaaggccattctgttggagttagaatgtcattttacatggaatttacttaaggaagacattgatctgtttgaggtagaagatacaattgggcaacagcttgaatttcttaccacaaaatctagacttgctctttataacctattggcctatgtgaaacacctaaaaggccaaaataaagacgcccttgagtgcttggaacaagcagaagaaataatccagcaagaacactcagacaaagaagaagtacgaagcctggtcacttggggaaactatgcctgggtgtattatcacatggaccagcttgaagaagctcagaagtatacaggtaagatagggaatgtctgtaagaaattgtccagtccttctaactacaagttggagtgtcctgagactgactgtgagaaaggctgggcactcttgaaatttggaggaaagtattatcaaaaggctaaagcggcttttgagaaggctctggaagtggagcctgacaatccagaatttaacatcggctatgctatcacagtgtatcggctggatgattctgatagagaagggtctgtaaagagcttttctctggggcctttgagaaaggctgttaccctgaacccagataacagctatattaaggtttttctggcactgaagcttcaagatgtacatgcagaagctgaaggggaaaagtatattgaagaaatcctggaccaaatatcatcccagccttacgtccttcgttatgcagccaagttctataggagaaaaaattcctggaacaaagctctcgaacttttaaaaaaggccttggaggtgacaccaacttcttctttcctgcatcaccagatgggactttgctacagggcacaaatgatccaaatcaagaaggccacacacaacagacctaaaggaaaggataaactaaaggttgatgagctgatttcatctgctatatttcatttcaaagcagccatggaacgagactctatgtttgcatttgcctacacagacctggccaacatgtatgctgaaggaggccagtatagcaatgctgaggacattttccggaaagctcttcgtctggagaacataaccgatgatcacaaacatcagatccattaccactatggccgctttcaggaatttcaccgtaaatcagaaaatactgccatccatcattatttagaagccttaaaggtcaaagacagatcaccccttcgcaccaaactgacaagtgctctgaagaaattgtctaccaagagactttgtcacaatgctttagatgtgcagagtttaagtgccctagggtttgtttacaagctggaaggagaaaagaggcaagctgctgagtactatgagaaggcacaaaagatagatccagaaaatgcagaattcctgactgctctctgtgagctccgactttccatttaaatacatactctaggaaattagctctaagtttttcccttcattttgggttctcctgtttgttttttttttattattttaatcccttgtttattatagagctaatatttattgaatagttattgtgtaccaagcattgtgctaaatactttatatgcattatgatgaatcttgtgcggttttctttctttttttctttttaattaaaatactataatccattgagaaatagcaatattctagctattgtaacttctaaaaatggtatggccattagatctgtgctttttatctctgctctttgaatttctcatattatatagtaaatatattcctacgtaaacctttgatacctagatcaggaatactcttccaggagtacaaaattacattattgatagttaagctcttaattgtgtagcttgcaaaagacagcactttttagttacagatgttttgactttgatgaggatatttagctatcaatctaatagtcacctaaaatatcttttttgttggaaaaaagtttataataaaaaagtttgtcatctctagtgacttcaataaagaaaaaactagaagaggagaaaaaggatttcctcaaattttaaatatgtaacttcagggattcaatccccaaatgtttattaagtagctagaaataattatgtggaaaaaaatgaataatggaaaatagtgagtctcaaattgtttttttttaactaaaatctgcaatgaatctagatgcaattaattttattccttccaactaaaattacaatatttttaggttaaaattattgagatataaagcagccattgggaaattgggagaaatgataaacaaatggaaaaagaagatgtccctaacctacacccatagattaccaaggtttcagtgtactagttttgaatctgttctgaatggagtttttataccctcaatttctggcctttggctattttagcatttcaaagtgacttctatgaagctttttttttaatgtgaaattttcagaatgttgtttttttcatgtagatactccaggaagagttaagcactgctttcagttttaatatccaccttgaggggtcgctgcttgagggctcttatcccaggggactttttaattcggatgttacttaatgtggcttctctaatgtagtttctttgattaccgactacacaattatgtaccatcacagtattagtggaaaagtaccatgtgatttaattctccattcctccaatgtaactcttaaaattattatgtatgtgtatgtgttttactttttgttttttatcatctttaaaatttctattatggtttgattattataaaaataatgaattctcactgtaaatttcaaaaaaaaaattacaaaagtatgtgaatttaaaaatgagagcagtcccctcaccctaccacagttccacaccctcaaggtaaacttataacttataatttgatatgtaaacttccagatcttttttctatgcgtaatcagacatacatatatactgcagtgtatctcacgtattaatttttaaaaatcttttgttttacttaattctgtttttattattattattattttgtttgatctattaaggaagaacaaggaagggaatgatctttactcaagaatttcagaaagtcagcactgaagtcctgacctatcagtagacacatttgtccctttcagatattttaggatattctagcaaagcaggccatttctcccacctgaaagtacataacttctatcacttgccacataattaaaagaactcacattaagcggttactcagacagttaatcatagaaaagattatttgcttcatcagttcatagaaaagattatttgcttcatcagttaacttgtttttataaatcagggcctgtgttcatacacagaaggggcctgagatttctgcactttaaacaagctcctcctaggtgaggatgctgtggctgttctaattacattttgagtagtaaggtctacagcattgttcctcaaacttggctacgtattggaatcacctaaaaagttaaaacaaaacatggatgtctgggtcccgccccatagagaatgacttaattggcatggggtgcagtccaggcatcatgatttttagatttcccagttggaacttgtgcagcaaagtttgggagctactgatggacatgtgaaaagtaagtataaatggaataaaattaattaggctaataggcttaacccaggaaatcctaagttccttgaatatccagtttgcatttgggactcctcatcatatacttggtatataatactctaataaaagctgcctgagttga

SEQ ID NO: 1131 - protein, 482 aa, Homo sapien
MSEIRKDTLKAILLELECHFTWNLLKEDIDLFEVEDTIGQQLEFLTTKSRLALYNLLAYVKHLKGQNKDALECLEQAEEIIQQEHSDKEEVRSLVTWGNYAWVYYHMDQLEEAQKYTGKIGNVCKKLSSPSNYKLECPETDCEKGWALLKFGGKYYQKAKAAFEKALEVEPDNPEFNIGYAITVYRLDDSDREGSVKSFSLGPLRKAVTLNPDNSYIKVFLALKLQDVHAEAEGEKYIEEILDQISSQPYVLRYAAKFYRRKNSWNKALELLKKALEVTPTSSFLHHQMGLCYRAQMIQIKKATHNRPKGKDKLKVDELISSAIFHFKAAMERDSMFAFAYTDLANMYAEGGQYSNAEDIFRKALRLENITDDHKHQIHYHYGRFQEFHRKSENTAIHHYLEALKVKDRSPLRTKLTSALKKLSTKRLCHNALDVQSLSALGFVYKLEGEKRQAAEYYEKAQKIDPENAEFLTALCELRLSI

SEQ ID NO: 1132 - DNA, 3906 bp, Homo sapien; identical to SEQ ID NO: 1130

SEQ ID NO: 1133 - protein, 482 aa, Homo sapien; identical to SEQ ID NO: 1131

SEQ ID NO: 1134 - DNA, 2354 bp, Homo sapien
tcggagggaggttcgggtgggcatcgggcggctggaagagctcgactcgtcccgctgggaaagcgcgagtctgagtggaaccctggacgacttgcagagcggctggcgcagtcatggcggactactggaagtcacagccaaagaaattctgtgattactgcaagtgctggatagcagacaataggcctagtgttgaatttcatgaaagaggaaagaatcataaggaaaatgtggcaaaaaggatcagtgagattaaacagaaaagcctggataaggcaaaggaagaagaaaaggcatcaaaggagtttgctgcaatggaggcagctgccctgaaagcataccaagaggatttgaaaagacttggcttagagtcagaaattttggagccaagcataacaccagtaaccagcactatcccacctacctcgacatcaaatcaacagaaagaaaagaaagaaaagaagaaaagaaaaaaagatccttcaaagggcagatgggtagaaggcataacctctgagggttaccattactattatgatcttatctcaggagcatctcagtgggagaaacctgaaggatttcaaggagacttaaaaaagacagcagtgaagaccgtttgggtagaaggtttaagtgaagatggttttacctattactataatacagaaacaggagaatccagatgggagaaacctgatgatttcattccacacactagtgatctgccttctagtaaggtcaatgaaaattcacttggcaccctagatgaatccaaatcatcagattcgcatagtgattctgatggggaacaggaagcagaagaaggaggggtctctacagagacagaaaagccaaaaataaagtttaaggaaaaaaataaaaatagtgatggaggaagtgacccagaaacacagaaagaaaaaagtattcagaaacagaattcattaggttcaaatgaagaaaaatcgaaaactcttaagaaatcaaacccatatggagaatggcaagaaattaaacaagaggttgagtctcatgaggaggtagatttggaacttccaagcactgaaaatgagtatgtatcaacttcagaagctgatggtggcggagaacccaaagtggtatttaaagaaaaaacagtcacttctcttggagttatggcagatggagtggccccagtcttcaaaaagagaagaactgaaaatggaaaatctagaaatttaaggcaacgaggtgatgatcaatagttgcaggagagctttttgtacatgcttttaggacagaatggagacttatacacccaaagtttatctgtgtttgtttgtaagtattatgatgctaaaaatttagatttattctaaatgtatttgatgtgaattaaaataaatattttttcatgtgaaatttattttggttcctaaaatggaagcctaccacattgcattgtaatacagtgtattatgttcagtgtctaaaaactgctaattaagtcataatttaagatgctatgtatctgttatttaaaacatggagaaacagggcctttattccattcatattcataagagcatatttatcctgcattgaaaatgcattacttttgcacattgatattaactgttgtccaacaaataagtatcggagtacgtgagaatattcccagcccagtgatgatttggttctgaggctgatgtgagaaagctgatgtaaaaaatgtatgcatattggcttaccttactcaatttaaagtcaaaagccaacagccaggagcagctcaggtacttcagatgtgcttaatatggagtgaaaactggaccagaggtggaaagatgtatttgccccagttcacttcaaagcagcaaacgttgtttaagcattttagtttgaaccaggcattgtgttaggaatccagggataaagatgaatgaaatgtatttctgttcttcaggagttcacattctagcatatgccttttttcccccagtcatgcactctttttagcagtcttatatgtactagaaaagattttttaaagtttatttaaagctgtgtagatgaaggcttgatctaaaatagtataaggtctccagcttcagtaaaagtttttagtgtttacttaaattagtaatttctcactttctgtctggttaaaatgtcttaaaaagtagaattttcttctttaatccgtttagtagttacctcccttttacttttcaaattcacaaaattacatttctcataaattgtatagtatttaacttataatagttaatatttgtctttttaagatgactgtacatgtaagaaaaaagcttattaaaaacttgatcaaagaaaaaaaaaaaaaaaaaaaaaaa

SEQ ID NO: 1135 - protein, 376 aa, Homo sapien
MADYWKSQPKKFCDYCKCWIADNRPSVEFHERGKNHKENVAKRISEIKQKSLDKAKEEEKASKEFAAMEAAALKAYQEDLKRLGLESEILEPSITPVTSTIPPTSTSNQQKEKKEKKKRKKDPSKGRWVEGITSEGYHYYYDLISGASQWEKPEGFQGDLKKTAVKTVWVEGLSEDGFTYYYNTETGESRWEKPDDFIPHTSDLPSSKVNENSLGTLDESKSSDSHSDSDGEQEAEEGGVSTETEKPKIKFKEKNKNSDGGSDPETQKEKSIQKQNSLGSNEEKSKTLKKSNPYGEWQEIKQEVESHEEVDLELPSTENEYVSTSEADGGGEPKVVFKEKTVTSLGVMADGVAPVFKKRRTENGKSRNLRQRGDDQ

SEQ ID NO: 1136 - DNA, 2164 bp, Homo sapien
cttccagctggtgggagttgacgacgtggtgctgggcgttgggaccctactttatctagttcgggaagttgggttgtggggtcatacctgtctgtctgctcccagctttcttgggtttcttccgacggcgtggggcctcgctaaggaattcccggcccctcagggccacggctttagcggtgtcttttgcgagttcttcgtaagtacatcttaaagctgtcaagatggttctagcagaccttggaagaaaaataacatcagcattacgctcattgagcaatgccaccattatcaatgaagaggtattgaatgctatgctaaaagaagtctgtaccgctttgttggaagcagatgttaatattaaactagtgaagcaactaagagaaaatgttaagtctgctattgatcttgaagagatggcatctggtcttaacaaaagaaaaatgattcagcatgctgtatttaaagaacttgtgaagcttgtagaccctggagttaaggcatggacacccactaaaggaaaacaaaatgtgattatgtttgttggattgcaagggagtggtaaaacaacaacatgttcaaagctagcatattattaccagaggaaaggttggaagacctgtttaatatgtgcagacacattcagagcaggggcttttgaccaactaaaacagaatgctaccaaagcaagaattccattttatggaagctatacagaaatggatcctgtcatcattgcttctgaaggagtagagaaatttaaaaatgaaaattttgaaattattattgttgatacaagtggccgccacaaacaagaagactctttgtttgaagaaatgcttcaagttgctaatgctatacaacctgataacattgtttatgtgatggatgcctccattgggcaggcttgtgaagcccaggctaaggcttttaaagataaagtagatgtagcctcagtaatagtgacaaaacttgatggccatgcaaaaggaggtggtgcactcagtgcagtcgctgccacaaaaagtccgattattttcattggtacaggggaacatatagatgactttgaacctttcaaaacacagccttttattagcaaacttcttggtatgggcgacattgaaggactgatagataaagtcaacgagttgaagttggatgacaatgaagcacttatagagaagttgaaacatggtcagtttacgttgcgagacatgtatgagcaatttcaaaatatcatgaaaatgggccccttcagtcagatcttggggatgatccctggttttgggacagattttatgagcaaaggaaatgaacaggagtcaatggcaaggctaaagaaattaatgacaataatggatagtatgaatgatcaagaactagacagtacggatggtgccaaagtttttagtaaacaaccaggaagaatccaaagagtagcaagaggatcgggtgtatcaacaagagatgttcaagaacttttgacacaatataccaagtttgcacagatggtaaaaaagatgggaggtatcaaaggacttttcaaaggtggcgacatgtctaagaatgtgagccagtcacagatggcaaaattgaaccaacaaatggccaaaatgatggatcctagggttcttcatcacatgggtggtatggcaggacttcagtcaatgatgaggcagtttcaacagggtgctgctggcaacatgaaaggcatgatgggattcaataatatgtaaagaaaatgccttaatataaactgactcagttgaatacctaatttgctgagacctcagcgtttcccttctttttgcgaattggggggaaagtgtatttttcttgcttatcatgcactctttccttttcttctcgcccgcttttcccctccttttctttttccttccttctttcctccctttaatataagggagaaatacatggtttttgtggaaatcattatatgtttgctttagattttcttctgttttcaccatcataacacttaagttaaatcatgatgtaaaattttagtacttaaaggtttttaattatctcgaaggccaagcattgcatttgtaaacagtcctggtcagtagttaaataatgtttcaattaaagtgctgtaaaataaacttcaaagtggttataaaaaaaaaaaaaaaaa

SEQ ID NO: 1137 - protein, 504 aa, Homo sapien
MVLADLGRKITSALRSLSNATIINEEVLNAMLKEVCTALLEADVNIKLVKQLRENVKSAIDLEEMASGLNKRKMIQHAVFKELVKLVDPGVKAWTPTKGKQNVIMFVGLQGSGKTTTCSKLAYYYQRKGWKTCLICADTFRAGAFDQLKQNATKARIPFYGSYTEMDPVIIASEGVEKFKNENFEIIIVDTSGRHKQEDSLFEEMLQVANAIQPDNIVYVMDASIGQACEAQAKAFKDKVDVASVIVTKLDGHAKGGGALSAVAATKSPIIFIGTGEHIDDFEPFKTQPFISKLLGMGDIEGLIDKVNELKLDDNEALIEKLKHGQFTLRDMYEQFQNIMKMGPFSQILGMIPGFGTDFMSKGNEQESMARLKKLMTIMDSMNDQELDSTDGAKVFSKQPGRIQRVARGSGVSTRDVQELLTQYTKFAQMVKKMGGIKGLFKGGDMSKNVSQSQMAKLNQQMAKMMDPRVLHHMGGMAGLQSMMRQFQQGAAGNMKGMMGFNNM

SEQ ID NO: 1138 - DNA, 1750 bp, Homo sapien
caccgcgcaagcgcatcctggcctttcttcagtccccacgtgcgatccttcccggcaactttttcgagaaaaatgcccaaattcaaggcggcccgtggggtggggggtcaggaaaaacatgcgcccctggccgatcagatcctggctgggaatgcggtgcgggcgggggtccgggagaagcggcggggtcgcgggacaggagaagcggaggaagagtatgtggggccccggctgagccgacggattttgcagcaagcacggcagcaacaggaggaactcgaggccgagcatgggactggggacaagcccgcggcgccgcgggaacgcaccacgcggctgggtccaagaatgcctcaggatggatcagatgacgaggacgaggagtggcccaccctggagaaggctgccacaatgacagcagcgggccatcatgcagaggtggttgtggaccctgaggatgagcgtgccatagagatgttcatgaacaagaaccctcctgccaggcgcaccctggctgacatcatcatggagaagctgactgagaagcagacagaggttgagacagtcatgtcagaggtgtcgggcttccctatgccccagctggacccccgggtcctagaagtgtacaggggggtccgggaggtattatctaagtaccgcagtggaaaactgcccaaggcatttaagatcatccctgcactctccaactgggagcaaatcctctacgtcacagagccggaggcctggactgcagctgccatgtaccaggccaccaggatttttgcctctaacctgaaggaacgcatggcccagcgcttctacaaccttgtcctgctccctcgagtacgagatgacgttgctgaatacaaacgactcaacttccatctctacatggctctcaagaaggcccttttcaaacctggagcctggttcaaagggatcctgattccactgtgcgagtctggcacttgtaccctccgggaagccatcattgtgggtagcatcatcaccaagtgctccatccctgtgttgcactccagtgcggccatgctgaaaattgctgagatggaatacagcggtgccaacagcatcttcctgcgactgctgctggataagaagtatgcactgccttaccgggtgctggatgccctagtcttccacttcctggggttccggacagagaagcgtgaactgcctgtgctgtggcaccagtgcctcctgactttggtccagcgctacaaggccgacttggccacagaccagaaagaggccctcttagaactgctccggctgcagccccatccacagctatcgcccgaaatcaggcgtgagcttcagagtgcagtcccccgcgatgtggaagatgttcccatcaccgtggagtgaggaaaacagtcagctgtcctggccaaaggggtttggaaggacaccaagacccccgttggtgactgaagatgacactgagctttaatggctgaagacccagatcagggcagtgacagatcacagggacatctgtggctcccagtccaggacaggaaggactgagggtctggctggttccctcttccattctaggcccttatccctgtttagttctgagagccaacttgagataccatatgctagcattcccagtccccagctggggcttggtgtgagtactttttctatggctattgtgtcaggtcactgtggataaaggcaaagacagatatttattgaaaaaaaaaaaaaaaaaaaaaaaaaa

SEQ ID NO: 1139 - protein, 301 aa, Homo sapien
MNKNPPARRTLADIIMEKLTEKQTEVETVMSEVSGFPMPQLDPRVLEVYRGVREVLSKYRSGKLPKAFKIIPALSNWEQILYVTEPEAWTAAAMYQATRIFASNLKERMAQRFYNLVLLPRVRDDVAEYKRLNFHLYMALKKALFKPGAWFKGILIPLCESGTCTLREAIIVGSIITKCSIPVLHSSAAMLKIAEMEYSGANSIFLRLLLDKKYALPYRVLDALVFHFLGFRTEKRELPVLWHQCLLTLVQRYKADLATDQKEALLELLRLQPHPQLSPEIRRELQSAVPRDVEDVPITVE

SEQ ID NO: 1140 - DNA, 1194 bp, Homo sapien
agcctttaagatttccggggatggaatccgaaatggaaacgcagagcgccagggcagaggagggctttacccaggtcacccgcaagggtggccgacgggcgaagaaacgacaggctgaacagctgtccgcagcaggagagggcggggatgcgggccgcatggacacagaggaggccaggccggcgaagaggcccgtcttcccacccctctgtggggacgggctcctgagtgggaaagaagaaacaaggaaaattccagtcccagctaacagatacacaccattgaaagaaaactggatgaagatatttactcctattgtggaacatttgggacttcagatacgctttaacttgaaatcaaggaatgtagaaatcaggacttgtaaagaaaccaaggatgttagtgctctgacaaaagcagctgattttgtgaaagcttttattctcggctttcaggtggaggatgcacttgccctcatcaggttggatgacctcttcctagagtcttttgaaattacagatgttaaacccctaaagggagaccatctatccagggcaataggaagaatcgctggcaaaggaggaaaaaccaaattcaccatagagaatgtgacacggacaaggatagttttggctgatgtgaaagttcacatccttggctccttccaaaatatcaagatggcaagaactgccatttgcaacctaatcttgggaaatcctccttccaaggtttatggcaatattcgagctgtggctagcagatcagcagatcgattctgatttcaagtcagagactttttatcttgcctttggactctggtgaaaaatactttacagtggtcggtcacaagaaaccatctgaacaatttcagtcatttgaagcctccgtcccttcttccattctcagccagaagcataaacagaaaagaaagatttaagaggattcacactcaacaggttttaggataatttaaatatcaaaaattgattgttatacttacacattaggtataatttatcatttatctgaaatcacatgtagcagattgcatagtctgtaatcctctcagagggaaacttcttgtttaaacagctctatatggatttatacttttatatttataaatttataacttcatacaaatttataaacatttctttataaattgtaatttaatagattatctcagaaaaa

SEQ ID NO: 1141 - protein, 252 aa, Homo sapien
MESEMETQSARAEEGFTQVTRKGGRRAKKRQAEQLSAAGEGGDAGRMDTEEARPAKRPVFPPLCGDGLLSGKEETRKIPVPANRYTPLKENWMKIFTPIVEHLGLQIRFNLKSRNVEIRTCKETKDVSALTKAADFVKAFILGFQVEDALALIRLDDLFLESFEITDVKPLKGDHLSRAIGRIAGKGGKTKFTIENVTRTRIVLADVKVHILGSFQNIKMARTAICNLILGNPPSKVYGNIRAVASRSADRF

SEQ ID NO: 1142 - DNA, 1462 bp, Homo sapien
cgggctgtagagccttgcgcgcgcagtggggatggaacgttgctaggcttagcgggtctggctgctgggggcccgagcagcacgctcggagccgccgcgcgccaaagcgggaatctgggaggcgagcagctctgcagttaatgcacgtattttaaactcccgggcctgcggacgctatgcacaggaagcacctccaggagattccagacctgagtagcaacgttgccaccagcttcacgtggggatgggattccagcaagacttctgaactgctgtcaggcatgggggtctccgccctggagaaagaggagcccgacagtgagaacatcccccaggaactgctctcaaacctgggccacccggagagccccccacggaaacggctgaagagcaaagggagtgacaaagactttgtgattgtccgcaggcctaagctaaatcgagagaactttccaggtgtttcatgggactcccttccggatgagctgctcttgggaatcttttcctgtctgtgcctccctgagctgctaaaggtctctggtgtttgtaagaggtggtatcgcctagcgtctgatgagtctctatggcagaccttagacctcacaggtaaaaatctgcacccggatgtgactggtcggttgctgtctcaaggggtgattgccttccgctgcccacgatcatttatggaccaaccattggctgaacatttcagcccttttcgtgtacagcacatggacctatcgaactcagttatagaagtgtccaccctccacggcatactgtctcagtgttccaagttgcagaatctaagcctggaaggcctgcggctttcggatcccattgtcaatactctcgcaaaaaactcaaatttagtgcgacttaacctttctgggtgttctggattctctgaatttgccctgcagactttgctaagcagctgttccagactggatgagctgaacctctcctggtgttttgatttcactgaaaagcatgtacaggtggctgttgcgcatgtgtcagagaccatcacccagctgaatcttagcggctacagaaagaatctccagaaatcagatctctctactttagttagaagatgccccaatcttgtccatctagacttaagtgatagtgtcatgctaaagaatgactgctttcaggaatttttccagctcaactacctccaacacctatcactcagtcggtgctatgatataatacctgaaactttactattagtgacaagagctggggttaggatccggttggactctgacatcggatgccctcaaacatacagaacttccaaactcaagtccagccataagctattttgccaacatgtcagagtaatctgtatttttgtatgtgatttctacttttatagacttgttttaaaacaataaaacacatttttataaaaatgagtgcttaaactaaaaaaaaaaaaaaaaaaaaa

SEQ ID NO: 1143 - protein, 424 aa, Homo sapien
MHRKHLQEIPDLSSNVATSFTWGWDSSKTSELLSGMGVSALEKEEPDSENIPQELLSNLGHPESPPRKRLKSKGSDKDFVIVRRPKLNRENFPGVSWDSLPDELLLGIFSCLCLPELLKVSGVCKRWYRLASDESLWQTLDLTGKNLHPDVTGRLLSQGVIAFRCPRSFMDQPLAEHFSPFRVQHMDLSNSVIEVSTLHGILSQCSKLQNLSLEGLRLSDPIVNTLAKNSNLVRLNLSGCSGFSEFALQTLLSSCSRLDELNLSWCFDFTEKHVQVAVAHVSETITQLNLSGYRKNLQKSDLSTLVRRCPNLVHLDLSDSVMLKNDCFQEFFQLNYLQHLSLSRCYDIIPETLLELGEIPTLKTLQVFGIVPDGTLQLLKEALPHLQINCSHFTTIARPTIGNKKNQEIWGIKCRLTLQKPSCL

SEQ ID NO: 1144 - DNA, 6677 bp, Homo sapien
ttgagaaaggggaatttcatcccaaataaaaggaatgaagtctggctccggaggagggtccccgacctcgctgtgggggctcctgtttctctccgccgcgctctcgctctggccgacgagtggagaaatctgcgggccaggcatcgacatccgcaacgactatcagcagctgaagcgcctggagaactgcacggtgatcgagggctacctccacatcctgctcatctccaaggccgaggactaccgcagctaccgcttccccaagctcacggtcattaccgagtacttgctgctgttccgagtggctggcctcgagagcctcggagacctcttccccaacctcacggtcatccgcggctggaaactcttctacaactacgccctggtcatcttcgagatgaccaatctcaaggatattgggctttacaacctgaggaacattactcggggggccatcaggattgagaaaaatgctgacctctgttacctctccactgtggactggtccctgatcctggatgcggtgtccaataactacattgtggggaataagcccccaaaggaatgtggggacctgtgtccagggaccatggaggagaagccgatgtgtgagaagaccaccatcaacaatgagtacaactaccgctgctggaccacaaaccgctgccagaaaatgtgcccaagcacgtgtgggaagcgggcgtgcaccgagaacaatgagtgctgccaccccgagtgcctgggcagctgcagcgcgcctgacaacgacacggcctgtgtagcttgccgccactactactatgccggtgtctgtgtgcctgcctgcccgcccaacacctacaggtttgagggctggcgctgtgtggaccgtgacttctgcgccaacatcctcagcgccgagagcagcgactccgaggggtttgtgatccacgacggcgagtgcatgcaggagtgcccctcgggcttcatccgcaacggcagccagagcatgtactgcatcccttgtgaaggtccttgcccgaaggtctgtgaggaagaaaagaaaacaaagaccattgattctgttacttctgctcagatgctccaaggatgcaccatcttcaagggcaatttgctcattaacatccgacgggggaataacattgcttcagagctggagaacttcatggggctcatcgaggtggtgacgggctacgtgaagatccgccattctcatgccttggtctccttgtccttcctaaaaaaccttcgcctcatcctaggagaggagcagctagaagggaattactccttctacgtcctcgacaaccagaacttgcagcaactgtgggactgggaccaccgcaacctgaccatcaaagcagggaaaatgtactttgctttcaatcccaaattatgtgtttccgaaatttaccgcatggaggaagtgacggggactaaagggcgccaaagcaaaggggacataaacaccaggaacaacggggagagagcctcctgtgaaagtgacgtcctgcatttcacctccaccaccacgtcgaagaatcgcatcatcataacctggcaccggtaccggccccctgactacagggatctcatcagcttcaccgtttactacaaggaagcaccctttaagaatgtcacagagtatgatgggcaggatgcctgcggctccaacagctggaacatggtggacgtggacctcccgcccaacaaggacgtggagcccggcatcttactacatgggctgaagccctggactcagtacgccgtttacgtcaaggctgtgaccctcaccatggtggagaacgaccatatccgtggggccaagagtgagatcttgtacattcgcaccaatgcttcagttccttccattcccttggacgttctttcagcatcgaactcctcttctcagttaatcgtgaagtggaaccctccctctctgcccaacggcaacctgagttactacattgtgcgctggcagcggcagcctcaggacggctacctttaccggcacaattactgctccaaagacaaaatccccatcaggaagtatgccgacggcaccatcgacattgaggaggtcacagagaaccccaagactgaggtgtgtggtggggagaaagggccttgctgcgcctgccccaaaactgaagccgagaagcaggccgagaaggaggaggctgaataccgcaaagtctttgagaatttcctgcacaactccatcttcgtgcccagacctgaaaggaagcggagagatgtcatgcaagtggccaacaccaccatgtccagccgaagcaggaacaccacggccgcagacacctacaacatcaccgacccggaagagctggagacagagtaccctttctttgagagcagagtggataacaaggagagaactgtcatttctaaccttcggcctttcacattgtaccgcatcgatatccacagctgcaaccacgaggctgagaagctgggctgcagcgcctccaacttcgtctttgcaaggactatgcccgcagaaggagcagatgacattcctgggccagtgacctgggagccaaggcctgaaaactccatctttttaaagtggccggaacctgagaatcccaatggattgattctaatgtatgaaataaaatacggatcacaagttgaggatcagcgagaatgtgtgtccagacaggaatacaggaagtatggaggggccaagctaaaccggctaaacccggggaactacacagcccggattcaggccacatctctctctgggaatgggtcgtggacagatcctgtgttcttctatgtccaggccaaaacaggatatgaaaacttcatccatctgatcatcgctctgcccgtcgctgtcctgttgatcgtgggagggttggtgattatgctgtacgtcttccatagaaagagaaataacagcaggctggggaatggagtgctgtatgcctctgtgaacccggagtacttcagcgctgctgatgtgtacgttcctgatgagtgggaggtggctcgggagaagatcaccatgagccgggaacttgggcaggggtcgtttgggatggtctatgaaggagttgccaagggtgtggtgaaagatgaacctgaaaccagagtggccattaaaacagtgaacgaggccgcaagcatgcgtgagaggattgagtttctcaacgaagcttctgtgatgaaggagttcaattgtcaccatgtggtgcgattgctgggtgtggtgtcccaaggccagccaacactggtcatcatggaactgatgacacggggcgatctcaaaagttatctccggtctctgaggccagaaatggagaataatccagtcctagcacctccaagcctgagcaagatgattcagatggccggagagattgcagacggcatggcatacctcaacgccaataagttcgtccacagagaccttgctgcccggaattgcatggtagccgaagatttcacagtcaaaatcggagattttggtatgacgcgagatatctatgagacagactattaccggaaaggagggaaagggctgctgcccgtgcgctggatgtctcctgagtccctcaaggatggagtcttcaccacttactcggacgtctggtccttcggggtcgtcctctgggagatcgccacactggccgagcagccctaccagggcttgtccaacgagcaagtccttcgcttcgtcatggagggcggccttctggacaagccagacaactgtcctgacatgctgtttgaactgatgcgcatgtgctggcagtataaccccaagatgaggccttccttcctggagatcatcagcagcatcaaagaggagatggagcctggcttccgggaggtctccttctactacagcgaggagaacaagctgcccgagccggaggagctggacctggagccagagaacatggagagcgtccccctggacccctcggcctcctcgtcctccctgccactgcccgacagacactcaggacacaaggccgagaacggccccggccctggggtgctggtcctccgcgccagcttcgacgagagacagccttacgcccacatgaacgggggccgcaagaacgagcgggccttgccgctgccccagtcttcgacctgctgatccttggatcctgaatctgtgcaaacagtaacgtgtgcgcacgcgcagcggggtggggggggagagagagttttaacaatccattcacaagcctcctgtacctcagtggatcttcagaactgcccttgctgcccgcgggagacagcttctctgcagtaaaacacatttgggatgttccttttttcaatatgcaagcagctttttattccctgcccaaacccttaactgacatgggcctttaagaaccttaatgacaacacttaatagcaacagagcacttgagaaccagtctcctcactctgtccctgtccttccctgttctccctttctctctcctctctgcttcataacggaaaaataattgccacaagtccagctgggaagccctttttatcagtttgaggaagtggctgtccctgtggccccatccaaccactgtacacacccgcctgacaccgtgggtcattacaaaaaaacacgtggagatggaaatttttacctttatctttcacctttctagggacatgaaatttacaaagggccatcgttcatccaaggctgttaccattttaacgctgcctaattttgccaaaatcctgaactttctccctcatcggcccggcgctgattcctcgtgtccggaggcatgggtgagcatggcagctggttgctccatttgagagacacgctggcgacacactccgtccatccgactgcccctgctgtgctgctcaaggccacaggcacacaggtctcattgcttctgactagattattatttgggggaactggacacaataggtctttctctcagtgaaggtggggagaagctgaaccggcttccctgccctgcctccccagccccctgcccaacccccaagaatctggtggccatgggccccgaagcagcctggcggacaggcttggagtcaaggggccccatgcctgcttctctcccagccccagctcccccgcccgcccccaaggacacagatgggaaggggtttccagggactcagccccactgttgatgcaggtttgcaaggaaagaaattcaaacaccacaacagcagtaagaagaaaagcagtcaatggattcaagcattctaagctttgttgacattttctctgttcctaggacttcttcatgggtcttacagttctatgttagaccatgaaacatttgcatacacatcgtctttaatgtcacttttataacttttttacggttcagatattcatctatacgtctgtacagaaaaaaaaaagctgctattttttttgttcttgatctttgtggatttaatctatgaaaaccttcaggtccaccctctcccctttctgctcactccaagaaacttcttatgctttgtactagagtgcgtgactttcttcctcttttcccggtaatggatacttctatcacataatttgccatgaactgttggatgcctttttataaatacatcccccatccctgctcccacctgcccctttagttgttttctaacccgtaggctctctgggcacgaggcagaaagcaggccgggcacccatcctgagagggccgcgctcctctccccagcctgccctcacagcattggagcctgttacagtgcaagacatgatacaaactcaggtcagaaaaacaaaggttaaatatttcacacgtctttgttcagtgtttccactcaccgtggttgagaagcctcaccctctctttcccttgcctttgcttaggttgtgacacacatatatatatatttttttaattcttgggtacaacagcagtgttaaccgcagacactaggcatttggattactatttttcttaatggctatttaatccttccatcccacgaaaaacagctgctgagtccaagggagcagcagagcgtggtccggcagggcctgttgtggccctcgccacccccctcaccggaccgactgacctgtctttggaaccagaacatcccaagggaactccttcgcactggcgttgagtgggaccccgggatccaggctggcccagggcggcaccctcagggctgtgcccgctggagtgctaggtggaggcagcacagacgccacggtggcccaagagcccctttgcttcttgctgggggaccagggctgtggtgctggcccactttccctcggccaggaatccaggtccttggggcccaggggtcttgtcttgtttcatttttagcacttctcaccagagagatgacagcacaagagttgcttctgggatagaaatgtttaggagtaagaacaaagctgggatacggtgattgctagttgtgactgaagattcaacacagaaaagaaagtttatacggcttttttgctggtcagcagtttgtcccactgctttctctagtctctatcccatagcgtgttccctttaaaaaaaaaaaaaggtattatatgtaggagttttcttttaatttattttgtgataaattaccagtttcaatcactgtagaaaagccccattatgaatttaaatttcaaggaaagggtgtgtgtggaa

SEQ ID NO: 1145 - protein, 1367 aa, Homo sapien
MKSGSGGGSPTSLWGLLFLSAALSLWPTSGEICGPGIDIRNDYQQLKRLENCTVIEGYLHILLISKAEDYRSYRFPKLTVITEYLLLFRVAGLESLGDLFPNLTVIRGWKLFYNYALVIFEMTNLKDIGLYNLRNITRGAIRIEKNADLCYLSTVDWSLILDAVSNNYIVGNKPPKECGDLCPGTMEEKPMCEKTTINNEYNYRCWTTNRCQKMCPSTCGKRACTENNECCHPECLGSCSAPDNDTACVACRHYYYAGVCVPACPPNTYRFEGWRCVDRDFCANILSAESSDSEGFVIHDGECMQECPSGFIRNGSQSMYCIPCEGPCPKVCEEEKKTKTIDSVTSAQMLQGCTIFKGNLLINIRRGNNIASELENFMGLIEVVTGYVKIRHSHALVSLSFLKNLRLILGEEQLEGNYSFYVLDNQNLQQLWDWDHRNLTIKAGKMYFAFNPKLCVSEIYRMEEVTGTKGRQSKGDINTRNNGERASCESDVLHFTSTTTSKNRIIITWHRYRPPDYRDLISFTVYYKEAPFKNVTEYDGQDACGSNSWNMVDVDLPPNKDVEPGILLHGLKPWTQYAVYVKAVTLTMVENDHIRGAKSEILYIRTNASVPSIPLDVLSASNSSSQLIVKWNPPSLPNGNLSYYIVRWQRQPQDGYLYRHNYCSKDKIPIRKYADGTIDIEEVTENPKTEVCGGEKGPCCACPKTEAEKQAEKEEAEYRKVFENFLHNSIFVPRPERKRRDVMQVANTTMSSRSRNTTAADTYNITDPEELETEYPFFESRVDNKERTVISNLRPFTLYRIDIHSCNHEAEKLGCSASNFVFARTMPAEGADDIPGPVTWEPRPENSIFLKWPEPENPNGLILMYEIKYGSQVEDQRECVSRQEYRKYGGAKLNRLNPGNYTARIQATSLSGNGSWTDPVFFYVQAKTGYENFIHLIIALPVAVLLIVGGLVIMLYVFHRKRNNSRLGNGVLYASVNPEYFSAADVYVPDEWEVAREKITMSRELGQGSFGMVYEGVAKGVVKDEPETRVAIKTVNEAASMRERIEFLNEASVMKEFNCHHVVRLLGVVSQGQPTLVIMELMTRGDLKSYLRSLRPEMENNPVLAPPSLSKMIQMAGEIADGMAYLNANKFVHRDLAARNCMVAEDFTVKIGDFGMTRDIYETDYYRKGGKGLLPVRWMSPESLKDGVFTTYSDVWSFGVVLWEIATLAEQPYQGLSNEQVLRFVMEGGLLDKPDNCPDMLFELMRMCWQYNPKMRPSFLEIISSIKEEMEPGFREVSFYYSEENKLPEPEELDLEPENMESVPLDPSASSSSLPLPDRHSGHKAENGPGPGVLVLRASFDERQPYAHMNGGRKNERALPLPQSSTC

SEQ ID NO: 1146 - DNA, 6030 bp, Homo sapien
gttggcccccgttacttttcctctgggaaatatggcgcacgctgggagaacagggtacgataaccgggagatagtgatgaagtacatccattataagctgtcgcagaggggctacgagtgggatgcgggagatgtgggcgccgcgcccccgggggccgcccccgcgccgggcatcttctcctcgcagcccgggcacacgccccatacagccgcatcccgggacccggtcgccaggacctcgccgctgcagaccccggctgcccccggcgccgccgcggggcctgcgctcagcccggtgccacctgtggtccacctgaccctccgccaggccggcgacgacttctcccgccgctaccgccgcgacttcgccgagatgtccaggcagctgcacctgacgcccttcaccgcgcggggacgctttgccacggtggtggaggagctcttcagggacggggtgaactgggggaggattgtggccttctttgagttcggtggggtcatgtgtgtggagagcgtcaaccgggagatgtcgcccctggtggacaacatcgccctgtggatgactgagtacctgaaccggcacctgcacacctggatccaggataacggaggctgggatgcctttgtggaactgtacggccccagcatgcggcctctgtttgatttctcctggctgtctctgaagactctgctcagtttggccctggtgggagcttgcatcaccctgggtgcctatctgggccacaagtgaagtcaacatgcctgccccaaacaaatatgcaaaaggttcactaaagcagtagaaataatatgcattgtcagtgatgttccatgaaacaaagctgcaggctgtttaagaaaaaataacacacatataaacatcacacacacagacagacacacacacacacaacaattaacagtcttcaggcaaaacgtcgaatcagctatttactgccaaagggaaatatcatttattttttacattattaagaaaaaaagatttatttatttaagacagtcccatcaaaactcctgtctttggaaatccgaccactaattgccaagcaccgcttcgtgtggctccacctggatgttctgtgcctgtaaacatagattcgctttccatgttgttggccggatcaccatctgaagagcagacggatggaaaaaggacctgatcattggggaagctggctttctggctgctggaggctggggagaaggtgttcattcacttgcatttctttgccctgggggctgtgatattaacagagggagggttcctgtggggggaagtccatgcctccctggcctgaagaagagactctttgcatatgactcacatgatgcatacctggtgggaggaaaagagttgggaacttcagatggacctagtacccactgagatttccacgccgaaggacagcgatgggaaaaatgcccttaaatcataggaaagtatttttttaagctaccaattgtgccgagaaaagcattttagcaatttatacaatatcatccagtaccttaagccctgattgtgtatattcatatattttggatacgcaccccccaactcccaatactggctctgtctgagtaagaaacagaatcctctggaacttgaggaagtgaacatttcggtgacttccgcatcaggaaggctagagttacccagagcatcaggccgccacaagtgcctgcttttaggagaccgaagtccgcagaacctgcctgtgtcccagcttggaggcctggtcctggaactgagccggggccctcactggcctcctccagggatgatcaacagggcagtgtggtctccgaatgtctggaagctgatggagctcagaattccactgtcaagaaagagcagtagaggggtgtggctgggcctgtcaccctggggccctccaggtaggcccgttttcacgtggagcatgggagccacgacccttcttaagacatgtatcactgtagagggaaggaacagaggccctgggcccttcctatcagaaggacatggtgaaggctgggaacgtgaggagaggcaatggccacggcccattttggctgtagcacatggcacgttggctgtgtggccttggcccacctgtgagtttaaagcaaggctttaaatgactttggagagggtcacaaatcctaaaagaagcattgaagtgaggtgtcatggattaattgacccctgtctatggaattacatgtaaaacattatcttgtcactgtagtttggttttatttgaaaacctgacaaaaaaaaagttccaggtgtggaatatgggggttatctgtacatcctggggcattaaaaaaaaaatcaatggtggggaactataaagaagtaacaaaagaagtgacatcttcagcaaataaactaggaaatttttttttcttccagtttagaatcagccttgaaacattgatggaataactctgtggcattattgcattatataccatttatctgtattaactttggaatgtactctgttcaatgtttaatgctgtggttgatatttcgaaagctgctttaaaaaaatacatgcatctcagcgtttttttgtttttaattgtatttagttatggcctatacactatttgtgagcaaaggtgatcgttttctgtttgagatttttatctcttgattcttcaaaagcattctgagaaggtgagataagccctgagtctcagctacctaagaaaaacctggatgtcactggccactgaggagctttgtttcaaccaagtcatgtgcatttccacgtcaacagaattgtttattgtgacagttatatctgttgtccctttgaccttgtttcttgaaggtttcctcgtccctgggcaattccgcatttaattcatggtattcaggattacatgcatgtttggttaaacccatgagattcattcagttaaaaatccagatggcaaatgaccagcagattcaaatctatggtggtttgacctttagagagttgctttacgtggcctgtttcaacacagacccacccagagccctcctgccctccttccgcgggggctttctcatggctgtccttcagggtcttcctgaaatgcagtggtgcttacgctccaccaagaaagcaggaaacctgtggtatgaagccagacctccccggcgggcctcagggaacagaatgatcagacctttgaatgattctaatttttaagcaaaatattattttatgaaaggtttacattgtcaaagtgatgaatatggaatatccaatcctgtgctgctatcctgccaaaatcattttaatggagtcagtttgcagtatgctccacgtggtaagatcctccaagctgctttagaagtaacaatgaagaacgtggacgcttttaatataaagcctgttttgtcttctgttgttgttcaaacgggattcacagagtatttgaaaaatgtatatatattaagaggtcacgggggctaattgctggctggctgccttttgctgtggggttttgttacctggttttaataacagtaaatgtgcccagcctcttggccccagaactgtacagtattgtggctgcacttgctctaagagtagttgatgttgcattttccttattgttaaaaacatgttagaagcaatgaatgtatataaaagcctcaactagtcatttttttctcctcttcttttttttcattatatctaattattttgcagttgggcaacagagaaccatccctattttgtattgaagagggattcacatctgcatcttaactgctctttatgaatgaaaaaacagtcctctgtatgtactcctctttacactggccagggtcagagttaaatagagtatatgcactttccaaattggggacaagggctctaaaaaaagccccaaaaggagaagaacatctgagaacctcctcggccctcccagtccctcgctgcacaaatactccgcaagagaggccagaatgacagctgacagggtctatggccatcgggtcgtctccgaagatttggcaggggcagaaaactctggcaggcttaagatttggaataaagtcacagaatcaaggaagcacctcaatttagttcaaacaagacgccaacattctctccacagctcacttacctctctgtgttcagatgtggccttccatttatatgtgatctttgttttattagtaaatgcttatcatctaaagatgtagctctggcccagtgggaaaaattaggaagtgattataaatcgagaggagttataataatcaagattaaatgtaaataatcagggcaatcccaacacatgtctagctttcacctccaggatctattgagtgaacagaattgcaaatagtctctatttgtaattgaacttatcctaaaacaaatagtttataaatgtgaacttaaactctaattaattccaactgtacttttaaggcagtggctgtttttagactttcttatcacttatagttagtaatgtacacctactctatcagagaaaaacaggaaaggctcgaaatacaagccattctaaggaaattagggagtcagttgaaattctattctgatcttattctgtggtgtcttttgcagcccagacaaatgtggttacacactttttaagaaatacaattctacattgtcaagcttatgaaggttccaatcagatctttattgttattcaatttggatctttcagggattttttttttaaattattatgggacaaaggacatttgttggaggggtgggagggaggaacaatttttaaatataaaacattcccaagtttggatcagggagttggaagttttcagaataaccagaactaagggtatgaaggacctgtattggggtcgatgtgatgcctctgcgaagaaccttgtgtgacaaatgagaaacattttgaagtttgtggtacgacctttagattccagagacatcagcatggctcaaagtgcagctccgtttggcagtgcaatggtataaatttcaagctggatatgtctaatgggtatttaaacaataaatgtgcagttttaactaacaggatatttaatgacaaccttctggttggtagggacatctgtttctaaatgtttattatgtacaatacagaaaaaaattttataaaattaagcaatgtgaaactgaattggagagtgataatacaagtcctttagtcttacccagtgaatcattctgttccatgtctttggacaaccatgaccttggacaatcatgaaatatgcatctcactggatgcaaagaaaatcagatggagcatgaatggtactgtaccggttcatctggactgccccagaaaaataacttcaagcaaacatcctatcaacaacaaggttgttctgcataccaagctgagcacagaagatgggaacactggtggaggatggaaaggctcgctcaatcaagaaaattctgagactattaataaataagactgtagtgtagatactgagtaaatccatgcacctaaaccttttggaaaatctgccgtgggccctccagatagctcatttcattaagtttttccctccaaggtagaatttgcaagagtgacagtggattgcatttcttttggggaagctttcttttggtggttttgtttattataccttcttaagttttcaaccaaggtttgcttttgttttgagttactggggttatttttgttttaaataaaaataagtgtacaataagtgtttttgtattgaaagcttttgttatcaagattttcatacttttaccttccatggctctttttaagattgatacttttaagaggtggctgatattctgcaacactgtacacataaaaaatacggtaaggatactttacatggttaaggtaaagtaagtctccagttggccaccattagctataatggcactttgtttgtgttgttggaaaaagtcacattgccattaaactttccttgtctgtctagttaatattgtgaagaaaaataaagtacagtgtgagatactg

SEQ ID NO: 1147 - protein, 205 aa, Homo sapien
MAHAGRTGYDNREIVMKYIHYKLSQRGYEWDAGDVGAAPPGAAPAPGIFSSQPGHTPHPAASRDPVARTSPLQTPAAPGAAAGPALSPVPPVVHLALRQAGDDFSRRYRGDFAEMSSQLHLTPFTARGRFATVVEELFRDGVNWGRIVAFFEFGGVMCVESVNREMSPLVDNIALWMTEYLNRHLHTWIQDNGGWVGASGDVSLG

SEQ ID NO: 1148 - DNA, 4744 bp, Homo sapien
aaataataaagaaattgaaaacaatacattaatataccataacactaaaaagagcaggagcgagagatgagaaagggaatccagcccgctctggagcagtacctggtgaccgccgggggtggggagggggcggctgtcgtcgccgccgccgctgcagcctccatggacaaaagggcactgctagccagccccggcttcgccgccgccgccgccgctgccgccgccccgggcgcgtacatccagatcctcaccacgaacacttccaccacctcctgttcctcctccctccaaagcggcgccgtagccgccggccccctcctccccagtgcccccggcgcggagcagaccgccggcagcctcctctacaccacgccgcacggaccctccagcagagccgggctgctgcagcagccaccagcgctgggacgcggcggcagcggcggcggcggcggccctccggcaaagcgaaggctggagctaggagaaagcggtcatcagtacctctcagatggtttaaaaacccccaagggcaaaggaagagctgcactacgaagtccagatagtccaaaaactccaaaatctccctcagaaaaaacgcggtatgatacgtctcttggtctgctcaccaagaagttcattcagctcctgagccagtcacccgatggggtattggatttgaacaaggcagcagaagtgctaaaagtgcaaaagagaaggatttatgatatcaccaacgttctggaaggcatccacctcattaagaagaagtctaaaaacaacgtccaatggatgggctgcagtctgtctgaggatgggggcatgctggcccagtgtcaaggcctgtcaaaagaagtgaccgagctcagtcaggaagagaagaaattagatgaactgatccaaagctgcaccctggacctcaaactgttaaccgaggattcagagaatcaaaggttagcttatgttacatatcaagatattcgaaaaattagtggccttaaagaccaaactgttatagttgtgaaagcccctccagaaacaagacttgaagtgcctgactcaatagagagcctacaaatacatttggcaagtacccaagggcccattgaggtttacttatgtccagaagagactgaaacacacagtccaatgaaaacaaacaaccaagaccacaatgggaatatccctaaacccgcttccaaagacttggcttcaaccaactcaggacatagcgattgctcagtttctatgggaaacctttctcctctggcctccccagccaacctcttacagcagactgaggaccaaattccttccaacctagaaggaccgtttgtgaacttactgcctcccctgctgcaagaggactatctcctgagcctcggggaggaggaaggcatcagcgatctcttcgatgcttacgatttggaaaagctcccactggtggaagacttcatgtgtagttgattatgcttcgtgtgaactctccttaaaaaccgatatttttttatcatggaccagaacatctgtcatgcagtgttgtcccttcctaccttcttcctccaagagagtatcatgaagtaaactacaaacttcagaagaaagctgacattttaatgaattttttaaaaaattaataaacaaattgtctaaacgcacagttgcaggctcccttgggaaagccctgctttgctccaggctccaagatctcctggctaagtcagcaagtgagaaaatgtgcaatcaggtgtctctcaccccgaattgtccttcctccttcctccccggattggcttgctgtgcctgacggatgggctgtagaatggggtctggccacctggcctgctgggaaacagcaatcttccttaatagcatttcaagccgtgccttctccgcagaatgcatgtctttgaggtctgctaatatggaatggaactgcagcaaatgcaaacttgaagtcatgcaaaagtatgaaatggatttcttcagctcttcttaggaatatttaaattactgtcataattcagtttaagctatgaactgtgtgtcccagtaggaggtcaagaaaacctccacagccttctggatgaagaacctgttttcaaatatacttgttgcagatacagaagactagtagagttctgccactctaagctgttgtggattttcctgtctccatgaaccactcccattcccccgtccccaatgtgtttgtgagtttccagttgatttgtagcaaatgcctacttagttctttgtggattgttctagacttttaatttttttagctgccatttaagcattcctgtggcacccatcaccatttcaatttaattgtttactttgaagcggtttttgcaaattcatattacttaagcagagggagagaacctctactgatcagagcatctaaacctgtgtgatctaaggtttatcagcctctgcaaggagctttgtcccatcgtgcttccattcccaggagggggagcttggagcgagtcagtcctggggcttgctgacatgggtggcccattggaaaggagaaccaggtcagatgatgtaacagccccaaggagcagcaggcatgggtccctccatccttgggcttcccgggcccctgtgacaggggaaagggctctcttacaccgcactcagggagaccacttctcaggatggggtcagatggagagacctctagggagaaagacatccccattgtgtgagtggcatttccttaagctggcaggaacagggagcagccctgtgtcgggggctggaatagttctggccagaccccgttccccttcctctatgaaggaataagttggaccaagggaagtcggggacgtaaaaaatgaagcaaaacaatgccagggtgtctcccgctttactcttcaggaatggtgtcccaagttggaggctttgtgtcagctgcaaatcctaccagttatgtccaagaatggctttccctcgggcaggtggcagcggccatctcccactgggaatatggcgtagtatctccggtccattccttggatgctaaggactgcgggaatgagggagtcagataaagaacaaacctcgaaacgaacagttaaattgaaatgctatgtgcctgacccaatggtaggcacatagtaggcactcaactcatatgtttaattgaattgaaaatatcccttaggaaaaaaaaaaaacacacaaaaaaccacaagagccccagccagtttactccaggtagatttccacaatatgcaaagtggtggtggggtcaagacagatgacaccagcactttaaactctttgtgtgggtatgcgtgggtgtatgtttgggaagaaaaacaaaggtgcagactatcttcctttttttcttcttcagcctccatccctggcctcctcccctcacacacactggacttggtacaaaatgtcggtgtggtcctagatgaagcattggggtgggggagggagagggagctttgtgttaagtgcctactggaaatgcactgtggggttttttcctgtatgggaaaccatttatgccaagcttttccccatttcccatatttatctcatctggttagctgcctctgcttccagctttgtgtaattctctttgccagctgcacaaagctgattttttccaaagtctaaagactgagctcacctggctagattgttgtgtgttttgttgaattttttcataatgtaatgccgtatttattgtttttaaaatgaaaggaatactaataagtcttaaaagttccttcatgcataagatttttttccagttactgggcttaactggtgtacattaattagatgtccatactgtattttgtttgcattaagtaattttctttttgacttagtatccggcacacaaagtgggttagtactacagtatttgcgttactttaagtactaagtatgcaggtttcctggtaccattgagttgctgctattaaagctcacacacgaaatggctaaaagttacaagtgtgcaaattatgactgcgtgagccttagaaaataaaatgtataaagggcaacacatgagctgtcaaacagtgttaggagtgtgtttatatgtacagagttgtgcatagcaatcgttttatttaagttgatatgtagtctactcacattttcattatttagcaattttgtacaaaaatagcaattaatttgtaaacactgccagaatactttctagctgctttgtaattttttaagagtgttattttgtttttgtttttctgttctttgttgtggctcttgttttcatttttgttgtacgtgtagatctgtaaataaaattgcagtatttaaagcttaagctttcaggaaaaagaaaataagaattcagtgtgtgcatgacaactcgtgtgtatgagaaggagggatatgaaggaagatggcttgcagagtaagtcgggtggcaattgtcagggtgtgggaatttcttttcctacggggtacgtgattttgtaaaaaggaagtatttctcccaaaattgggagtaggcaaactactaatcagtttagctttgtgttgtatgctagtttaaaaaagaaaatatgtaatataatgtaaaaaaaaacaaaaaaaagcttttatgatggattttgtaaatagatttgttacagggtgacctgttctctagctgtgatcttaccacttcaaatgggtgtaatttgaataaattttgtatggtaaaggatcaataaaatgattttttttaaga

SEQ ID NO: 1149 - protein, 465 aa, Homo sapien
MRKGIQPALEQYLVTAGGGEGAAVVAAAAAASMDKRALLASPGFAAAAAAAAAPGAYIQILTTNTSTTSCSSSLQSGAVAAGPLLPSAPGAEQTAGSLLYTTPHGPSSRAGLLQQPPALGRGGSGGGGGPPAKRRLELGESGHQYLSDGLKTPKGKGRAALRSPDSPKTPKSPSEKTRYDTSLGLLTKKFIQLLSQSPDGVLDLNKAAEVLKVQKRRIYDITNVLEGIHLIKKKSKNNVQWMGCSLSEDGGMLAQCQGLSKEVTELSQEEKKLDELIQSCTLDLKLLTEDSENQRLAYVTYQDIRKISGLKDQTVIVVKAPPETRLEVPDSIESLQIHLASTQGPIEVYLCPEETETHSPMKTNNQDHNGNIPKPASKDLASTNSGHSDCSVSMGNLSPLASPANLLQQTEDQIPSNLEGPFVNLLPPLLQEDYLLSLGEEEGISDLFDAYDLEKLPLVEDFMCS

SEQ ID NO: 1150 - DNA, 1709 bp, Homo sapien; identical to SEQ ID NO: 25

SEQ ID NO: 1151 - protein, 354 aa, Homo sapien; identical to SEQ ID NO: 26

SEQ ID NO: 1152 - DNA, 9517 bp, Homo sapien
gttgctgtcggagagagaaagccgcacccgagaggaggtgtgggtgttccgcttccatcctaacggaacgagctccctcttcgcggacatgggattacccagcggctgctaacccctctcctcgccctgctcccccaaaccggcgtggctccccgggcaccaaggagctgactacagaggagcaggatttgcacccctcgctgggcttgctttggcaacagagtgcctgacccaggtcaggattttcaagaaagacatgtctgacaaaatgtctagcttcctacatattggagacatttgttctctgtacgcggagggatcgacaaatggatttattagcaccttgggcctggttgatgatcgttgtgttgtacagccagaaaccggggaccttaacaatccacctaagaaattcagagactgcctctttaagctatgtcccatgaaccgctactctgcccaaaagcagttctggaaagccgctaagcctggggccaacagcaccacagacgcagtgctactcaacaaactgcaccacgctgcagacttggaaaagaagcagaatgagacagaaaacaggaaattgctggggaccgtaatccagtatggcaatgtgatccagctcctgcatttgaaaagtaataaatacctaacagtgaataagaggcttcctgctctgttggagaagaatgccatgagagtcacattggacgaggctggaaatgaagggtcctggttttatattcagccattctacaagctgcgatccattggagacagcgtggtcataggtgacaaggtggttctgaaccccgtcaatgctggtcagcccctacatgctagcagccatcaactggtagataacccaggctgcaatgaggtcaattccgtcaactgcaatacaagctggaaaatagtccttttcatgaaatggagtgataacaaagacgacatattaaaggggggtgacgtggtgaggctgtttcatgctgagcaggagaagtttctcacctgtgacgaacacaggaagaagcagcacgtcttcctgagaaccacgggccggcagtcggccacatctgccaccagttcaaaagccctgtgggaggtggaggtggtccagcatgacccatgtcggggcggagcagggtattggaacagccttttccgtttcaagcatctggccacggggcattacttggcagcagaggtggaccctgatcaggacgcctctcgaagtaggttgcggaatgcccaagaaaagatggtatactccctggtctctgtgcctgaaggcaatgacatctcctccattttcgagctagatcccaccactctgcgtggaggtgacagccttgtcccaaggaactcttatgttcggctcagacacctatgtactaatacctgggttcacagcacaaatattcctattgacaaggaagaagaaaagcccgtgatgctgaaaattggcacctctcctgtgaaggaggataaggaagcatttgccatagttccggtttctcctgctgaagttcgggacctggactttgccaatgatgccagcaaggtgctgggctccattgctgggaagctagagaagggcaccatcacccagaatgaaaggaggtctgtaaccaagctgctagaagatttggtttacttcgtcactggtggaactaattctggtcaagatgttctcgaagttgtcttctccaagcccaacagagaacggcagaaactgatgagagaacagaatattctcaagcagatcttcaagttgttacaagccccattcacagactgcggtgatggcccaatgcttcggctggaagagctcggggaccagcggcacgctcctttcagacacatctgccggctctgctacagggtgctgagacactcgcagcaagactacaggaagaaccaggagtatatagccaagcagtttggcttcatgcagaagcagattggctatgatgtgttggctgaagacactatcactgccctgctccacaataatcggaaactcctggaaaaacacattaccgcggcagagattgacacatttgtcagcctggtgcgaaagaacagggagcccagattcttagattacctctccgacctctgtgtctccatgaacaaatcaattccagtgacccaggaactgatatgtaaagctgtgctgaaccccaccaacgctgacatcctgattgagaccaaattggttctttctcgttttgaatttgaaggtgtctcttccactggagagaatgctctggaggcaggagaagacgaggaagaggtgtggctgttttggagggacagcaacaaagagattcgcagcaagagtgtgagggaattggctcaggatgctaaagaagggcagaaggaggaccgagacgttctcagctactacagatatcagctgaacctctttgcgaggatgtgtctggaccgccaatacctggccatcaacgaaatctcaggccagctggatgtcgatctcattctccgctgcatgtctgacgagaacctgccctatgacctcagggcgtccttctgccgcctcatgcttcacatgcatgtggaccgagatccccaggaacaagtcacccccgtgaaatatgcccgcctctggtcggagattccctcggagatcgccattgacgactatgatagtagtggagcttccaaagatgaaattaaggagagatttgctcagaccatggagtttgtggaggagtatttaagagatgtggtttgtcagaggttccctttctctgataaagagaagaataagcttacgtttgaggttgtaaatttagctaggaatctcatatactttggtttctacaacttctctgaccttctccgattaactaagatccttctggccatattggactgtgtacatgtgacaacaatcttccccattagcaagatggcgaaaggagaagagaataaaggcagtaacgtgatgagatctattcatggcgtgggagagctgatgacccaggtggtgctccggggaggaggctttttgcccatgactcccatggctgctgcccctgaaggcaatgtgaagcaggcagagcctgagaaggaggacatcatggtcatggacaccaagctgaagatcattgagatactccagtttattttgaatgtgaggttggattataggatctcctgcctcctgtgtatatttaagcgagagtttgatgaaagcaattcccagacttcagaaacatcctccggaaacagcagccaagaagggccaagtaatgtaccaggtgctcttgactttgaacacattgaagaacaagcagaaggcatctttggaggaagtgaggagaacaccccactggacttggatgaccacggcggcagaacctttctccgtgtcctgctccacttgacgatgcatgactacccacccctggtgtcaggggccctgcagctcctcttccggcacttcagccagaggcaggaggtgctccaggccttcaaacaggttcaactgctggttaccagccaagatgtggacaactacaaacagatcaaacaagacttggatcaactgaggtccatcgtggaaaagtcagagctttgggtgtacaaagggcagggccccgatgagactatggatggtgcatctggagaaaatgaacataagaaaacggaggagggaaataacaagccacaaaagcatgaaagcaccagcagctacaactacagagtggtcaaagagattttgattcggcttagcaaactctgtgttcaagagagtgcctcagtgagaaagagcaggaagcagcaacagcgtctgctccggaacatgggcgcgcacgccgtggtgctggagctgctgcagattccctatgagaaggccgaagataccaagatgcaagagataatgaggttggctcatgaatttttgcagaatttctgcgcaggcaaccagcagaatcaagctttgctacataaacacataaacctgtttctcaacccagggatcctggaggcagtaaccatgcagcacatcttcatgaacaatttccagctttgcagtgagatcaacgagagagttgttcagcacttcgttcactgcatagagactcacggtcggaatgtccagtatataaagttcttacagacaattgtcaaggcagaagggaaatttattaaaaaatgccaagacatggttatggccgagctggtcaattcgggagaggatgtcctcgtgttctacaacgacagagcctctttccagactctgatccagatgatgcggtcagaacgggatcggatggatgagaacagccctctcatgtaccacatccacttggtcgagctcctggctgtgtgcacggagggtaagaatgtctacacagagatcaagtgcaactccctgctcccgctggatgacatcgttcgcgtggtgacccacgaggactgcatccctgaggttaaaattgcatacattaacttcctgaatcactgctatgtggatacagaggtggaaatgaaggagatttataccagcaatcacatgtggaaattgtttgagaatttccttgtagacatctgcagggcctgtaacaacactagtgacaggaaacatgcagactcgattttggagaagtatgtcaccgaaatcgtcatgagtattgttactactttcttcagctctcccttctcagaccagagtacgactttgcagactcgccagcctgtctttgtgcaactgctgcaaggcgtgttcagggtttaccactgcaactggttaatgccaagccaaaaagcctccgtggagagctgtattcgggtgctgtctgatgtagccaagagccgggccattgccattcccgtggacctggacagccaagtcaacaacctctttctcaagtcccacagcattgtgcagaaaacagccatgaactggcggctctcagcccgcaatgccgcacgcagggactctgttctggcagcttccagagactaccggaatatcattgagagattgcaggacatcgtctccgcgctggaggaccgtctcaggcccctggtgcaggcagagttatctgtgctcgtggatgttctccacagacccgagctgcttttcccagagaacacagacgccagaaggaaatgtgaaagtggcggtttcatttgcaagttaataaagcatacaaaacagctgctagaagaaaatgaagagaagctctgcattaaggtcctacagaccctgagggaaatgatgaccaaagatagaggctatggagaaaagggtgaggcgctcaggcaagttctggtcaaccgttactatggaaacgtcagaccttcgggacgaagagagagccttaccagctttggcaatggcccactgtcagcaggaggacccggcaagcccgggggaggagggggaggttccggatccagctctatgagcaggggtgagatgagtctggccgaggttcagtgtcaccttgacaaggagggggcttccaatctagttatcgacctcatcatgaacgcatccagtgaccgagtgttccatgaaagcattctcctggccattgcccttctggaaggaggcaacaccaccatccagcactcctttttctgtcgcttgacagaagataagaagtcagagaaattctttaaggtgttttatgaccggatgaaggtggcccagcaagaaatcaaagcaacagtgacagtgaacaccagtgacttgggaaataaaaagaaagacgatgaggtagacagggatgccccatcacggaaaaaagctaaagagcccacaacacagataacagaagaggtccgggatcagctcctggaggcctccgctgccaccaggaaagccttcaccactttcaggagggaggctgatcccgacgaccactaccagcctggagagggcacccaggccactgccgacaaggccaaggacgacctggagatgagcgcggtcatcaccatcatgcagcccatcctccgcttccttcagctcctgtgtgaaaaccacaaccgagacctgcagaacttcctccgttgccaaaataacaagaccaactacaatttggtatgtgagaccctgcagtttctggactgtatttgtggaagcacaactggaggccttggtcttctgggcttgtatataaatgaaaagaacgtagcgcttatcaaccaaaccctggaaagtctgaccgaatactgtcaaggaccttgccatgagaaccagaactgcatagccacccatgaatccaatggcattgacatcatcacagccctgatcctcaatgatatcaatcctttgggaaagaagaggatggaccttgtgttagaactgaagaacaatgcctcgaagttgctcctggccatcatggaaagcaggcacgacagtgaaaacgcagagaggatactttataacatgaggcccaaggaactggtggaagtgatcaagaaagcctacatgcaaggtgaagtggaatttgaggatggagaaaacggtgaggatggggcggcgtcccccaggaacgtggggcacaacatctacatattagcccatcagttggctcggcataacaaagaacttcagagcatgctgaaacctggtggccaagtggacggagatgaagccctggagttttatgccaagcacacggcgcagatagagattgtcagattagaccgaacaatggaacagatagtctttcccgtgcccagcatatgtgaattcctaaccaaggagtcaaaactacgaatttactatactacagagagagacgaacaaggcagcaaaatcaatgatttctttctgcggtctgaagacctcttcaatgaaatgaattggcagaagaaactgagagcccagcccgtgttgtactggtgtgcccgcaacatgtctttctggagcagcatttcgtttaacctggccgtcctgatgaacctgctggtggcgtttttctacccgtttaagggagtccgaggaggaaccctggagccccactggtcgggactcctgtggacagccatgctcatctctctggccatcgtcattgccctccccaagccccatggcatccgggccttaattgcctccacaattctacgactgatattttcagtcgggttacaacccacgttgtttcttctgggcgctttcaatgtatgcaataaaatcatctttctaatgagctttgtgggcaactgtgggacattcacaagaggctaccgagccatggttctggatgttgagttcctctatcatttgttgtatctggtgatctgtgccatggggctctttgtccatgaattcttctacagtctgctgctttttgatttagtgtacagagaagagactttgcttaatgtcattaaaagtgtcactcgcaatggacggtccatcatcctgacagcagttctggctctgatcctcgtttacctgttctcaatagtgggctatcttttcttcaaggatgactttatcttggaagtagataggctgcccaatgaaacagctgttccagaaaccggcgagagtttggcaagcgagttcctgttctccgatgtgtgtagggtggagagtggggagaactgctcctctcctgcacccagagaagagctggtccctgcagaagagacggaacaggataaagagcacacatgtgagacgctgctgatgtgcattgtcaccgtgctgagtcacgggctgcggagcgggggtggagtaggagatgtactcaggaaaccgtccaaagaggaacccctgtttgctgctagagttatttatgacctcttgttcttcttcatggtcatcatcattgttcttaacctgatttttggggttatcattgacacttttgctgacctgaggagtgagaagcagaagaaggaagagatcttgaagaccacgtgctttatctgtggcttggaaagagacaagtttgacaacaagactgtcacctttgaagagcacatcaaggaagaacacaacatgtggcactatctgtgcttcatcgtcctggtgaaagtaaaggactccaccgaatatactgggcctgagagttacgtggcagaaatgatcaaggaaagaaaccttgactggttccccaggatgagagccatgtcattggtcagcagtgattctgaaggagaacagaatgagctgagaaacctgcaggagaagctggagtccaccatgaaacttgtcacgaacctttctggccagctgtcggaattaaaggatcagatgacagaacaaaggaagcagaaacaaagaattggtcttctaggacatcctcctcacatgaatgtcaacccacaacaaccagcataagcaaatgaaagaaaggaattgtatttaccttttataattattattagtgtgggtatggctaatgagttctgattcacccacgaaggttacatttatgctgaatacatttgtaaatactcagttttatactgtatgtatatgattgctactctaaaggtttggatatatgtattgtaattagaattgttggcatgatgacatttcatttgtgccaaaaatattaaaaatgccttttttggaaggactaacagaaagcacctgatttgcacttgaaccagattatagatttaaaagtatatgacatgtattttgtatttaaaactagaatagccagtatttatgttttttataaaactgtgcaatacgaattatgcaatcacaatacatttgtagctcccgagtgtcctaaagggagtgcacttctttgaagctggtgtgttaatactatgtaataaatggttaactttcaaatgatgctgctgccaaaattatattaatagtgagtttcaggcccctgggcattttgtaccatgtaattatcctctggtgatgctgtttctcgttagtggcagtagtgcctccgtctcctagtgataatgctccaagtctatgaactgttaaatcagcattcattttaagaaaagcaactttagtttcaaagatacttttaagcttctaaattgatcatttaaactatttctttaaataagagagccaaattagaggctcatactttagcttgtgaagaagataatgaattttttaaagggaactttctatgcaatgttcaggataaatcgatactgctggccaatcagtgtcatctcctgggtaaattttgatgtcgcattataaagacatgcataattgatggtttctagattatctagtccaaacaatagagtttattttttcttcatctgaaccaacatgctacagtagctaagaagtattaaaactatatacatccatataaagatgaaatatgaactatctcattagaagtcatagttgaccacagacatgttattcttctgaaagagccacattttggttttatttcttgtcacatgatttcttttcttgatggatgaaaaatatgaaatgaaatcttttatatctgttgcctagttttgtacatggatctcattttacaagagaatctctctgcta

SEQ ID NO: 1153 - protein, 2000 aa, Homo sapien
MSDKMSSFLHIGDICSLYAEGSTNGFISTLGLVDDRCVVQPETGDLNNPPKKFRDCLFKLCPMNRYSAQKQFWKAAKPGANSTTDAVLLNKLHHAADLEKKQNETENRKLLGTVIQYGNVIQLLHLKSNKYLTVNKRLPALLEKNAMRVTLDEAGNEGSWFYIQPFYKLRSIGDSVVIGDKVVLNPVNAGQPLHASSHQLVDNPGCNEVNSVNCNTSWKIVLFMKWSDNKDDILKGGDVVRLFHAEQEKFLTCDEHRKKQHVFLRTTGRQSATSATSSKALWEVEVVQHDPCRGGAGYWNSLFRFKHLATGHYLAAEVDPDQDASRSRLRNAQEKMVYSLVSVPEGNDISSIFELDPTTLRGGDSLVPRNSYVRLRHLCTNTWVHSTNIPIDKEEEKPVMLKIGTSPVKEDKEAFAIVPVSPAEVRDLDFANDASKVLGSIAGKLEKGTITQNERRSVTKLLEDLVYFVTGGTNSGQDVLEVVFSKPNRERQKLMREQNILKQIFKLLQAPFTDCGDGPMLRLEELGDQRHAPFRHICRLCYRVLRHSQQDYRKNQEYIAKQFGFMQKQIGYDVLAEDTITALLHNNRKLLEKHITAAEIDTFVSLVRKNREPRFLDYLSDLCVSMNKSIPVTQELICKAVLNPTNADILIETKLVLSRFEFEGVSSTGENALEAGEDEEEVWLFWRDSNKEIRSKSVRELAQDAKEGQKEDRDVLSYYRYQLNLFARMCLDRQYLAINEISGQLDVDLILRCMSDENLPYDLRASFCRLMLHMHVDRDPQEQVTPVKYARLWSEIPSEIAIDDYDSSGASKDEIKERFAQTMEFVEEYLRDVVCQRFPFSDKEKNKLTFEVVNLARNLIYFGFYNFSDLLRLTKILLAILDCVHVTTIFPISKMAKGEENKGSNVMRSIHGVGELMTQVVLRGGGFLPMTPMAAAPEGNVKQAEPEKEDIMVMDTKLKIIEILQFILNVRLDYRISCLLCIFKREFDESNSQTSETSSGNSSQEGPSNVPGALDFEHIEEQAEGIFGGSEENTPLDLDDHGGRTFLRVLLHLTMHDYPPLVSGALQLLFRHFSQRQEVLQAFKQVQLLVTSQDVDNYKQIKQDLDQLRSIVEKSELWVYKGQGPDETMDGASGENEHKKTEEGNNKPQKHESTSSYNYRVVKEILIRLSKLCVQESASVRKSRKQQQRLLRNMGAHAVVLELLQIPYEKAEDTKMQEIMRLAHEFLQNFCAGNQQNQALLHKHINLFLNPGILEAVTMQHIFMNNFQLCSEINERVVQHFVHCIETHGRNVQYIKFLQTIVKAEGKFIKKCQDMVMAELVNSGEDVLVFYNDRASFQTLIQMMRSERDRMDENSPLMYHIHLVELLAVCTEGKNVYTEIKCNSLLPLDDIVRVVTHEDCIPEVKIAYINFLNHCYVDTEVEMKEIYTSNHMWKLFENFLVDICRACNNTSDRKHADSILEKYVTEIVMSIVTTFFSSPFSDQSTTLQTRQPVFVQLLQGVFRVYHCNWLMPSQKASVESCIRVLSDVAKSRAIAIPVDLDSQVNNLFLKSHSIVQKTAMNWRLSARNAARRDSVLAASRDYRNIIERLQDIVSALEDRLRPLVQAELSVLVDVLHRPELLFPENTDARRKCESGGFICKLIKHTKQLLEENEEKLCIKVLQTLREMMTKDRGYGEKGEALRQVLVNRYYGNVRPSGRRESLTSFGNGPLSAGGPGKPGGGGGGSGSSSMSRGEMSLAEVQCHLDKEGASNLVIDLIMNASSDRVFHESILLAIALLEGGNTTIQHSFFCRLTEDKKSEKFFKVFYDRMKVAQQEIKATVTVNTSDLGNKKKDDEVDRDAPSRKKAKEPTTQITEEVRDQLLEASAATRKAFTTFRREADPDDHYQPGEGTQATADKAKDDLEMSAVITIMQPILRFLQLLCENHNRDLQNFLRCQNNKTNYNLVCETLQFLDCICGSTTGGLGLLGLYINEKNVALINQTLESLTEYCQGPCHENQNCI

SEQ ID NO: 1154 - DNA, 2220 bp, Homo sapien
cccacgcgtccgatggaagttaaagggaaaaagcaattcacaggaaagaatacaaagacagcacaagaaaaaaacagatttcataaaaatagtgattctggttcttcaaagacatttccaacaaggaaagttgctaaagaaggtggacctaaagtcacatctaggaactttgagaaaagtatcacaaaacttgggaaaaagggtgtaaagcagttcaagaataagcagcaaggggacaaatcaccaaagaacaaattccagccggcaaataaattcaacaagaagagaaaattccagccagatggtagaagcgatgaatcagcagccaagaagcccaaatgggatgacttcaaaaagaagaagaaagaactgaagcaaagcagacaactcagtgataaaaccaactatgacattgttgttcgggcaaagcagatgtgggagattttaagaagaaaagactgtgacaaagaaaaaagagtaaagttaatgagtgatttgcagaagttgattcaagggaaaattaaaactattgcatttgcacacgattcaactcgtgtgatccagtgttacattcagtatggtaatgaagaacagagaaaacaggcttttgaagaattgcgagatgatttggttgagttaagtaaagccaaatattcgagaaatattgttaagaaatttctcatgtatggaagtaaaccacagattgcagagataatcagaagttttaaaggccacgtgaggaagatgctgcggcatgcggaagcatcagccatcgtggagtacgcatacaatgacaaagccattttggagcagaggaacatgctgacggaagagctctatgggaacacatttcagctttacaagtcagcagatcacccaactctggacaaagtgttagagttacagccagaaaaattagaacttattatggatgaaatgaaacagattctaactccaatggcccaaaaggaagctgtgattaagcactcattggtgcataaagtattcttggacttttttacctatgcaccccccaaactcagatcagaaatgattgaagccatccgcgaagcggtggtctacctggcacacacacacgatggcgccagagtggccatgcactgcctgtggcatggcacgcccaaggacaggaaagtgattgtgaaaacaatgaagacttatgttgaaaaggtggctaatggccaatactcccatttggttttactggcggcatttgattgtattgatgatactaagcttgtgaagcagataatcatatcagaaattatcagttcattgcctagcatagtaaatgacaaatatggaaggaaggtcctattgtacttactaagccccagagatcctgcacatacagtacgagaaatcattgaagttctgcaaaaaggagatggaaatgcacacagtaagaaagatacagaggtccgcagacgggagctcctagaatccatttctccagctttgttaagctacctgcaagaacacgcccaagaagtggtgctagataagtctgcgtgtgtgttggtgtctgacattctgggatctgccactggagacgttcagcctaccatgaatgccatcgccagcttggcagcaacaggactgcatcctggtggcaaggacggagagcttcacattgcagaacatcctgcaggacatctagttctgaagtggttaatagagcaagataaaaagatgaaagaaaatgggagagaaggttgttttgcaaaaacacttgtagagcatgttggtatgaagaacctgaagtcctgggctagtgtaaatcgaggtgccattattctttctagcctcctccagagttgtgacctggaagttgcaaacaaagtcaaagctgcactgaaaagcttgattcctacattggaaaaaaccaaaagcaccagcaaaggaatagaaattctacttgaaaaactgagcacataggtggaaagagttaagagcaagatggaatgattttttctgttctctgttctgtttcccaatgcagaaaagaaggggtagggtccaccatactggtaattggggtactctgtatatgtgtttcttctttgtatacgaatctatttatataaattgtttttttaaatggtcttttttaaaaaaaaaaaaaaaaaaaaaaaaaaaaaaaaaaaaaaaaaaaaaaaaaaaaaaaaaaaaaaaaaaaaaaaaaaaaaaaaaaaaaaa

SEQ ID NO: 1155 - protein, 508 aa, Homo sapien
MWEILRRKDCDKEKRVKLMSDLQKLIQGKIKTIAFAHDSTRVIQCYIQYGNEEQRKQAFEELRDDLVELSKAKYSRNIVKKFLMYGSKPQIAEIIRSFKGHVRKMLRHAEASAIVEYAYNDKAILEQRNMLTEELYGNTFQLYKSADHPTLDKVLELQPEKLELIMDEMKQILTPMAQKEAVIKHSLVHKVFLDFFTYAPPKLRSEMIEAIREAVVYLAHTHDGARVAMHCLWHGTPKDRKVIVKTMKTYVEKVANGQYSHLVLLAAFDCIDDTKLVKQIIISEIISSLPSIVNDKYGRKVLLYLLSPRDPAHTVREIIEVLQKGDGNAHSKKDTEVRRRELLESISPALLSYLQEHAQEVVLDKSACVLVSDILGSATGDVQPTMNAIASLAATGLHPGGKDGELHIAEHPAGHLVLKWLIEQDKKMKENGREGCFAKTLVEHVGMKNLKSWASVNRGAIILSSLLQSCDLEVANKVKAALKSLIPTLEKTKSTSKGIEILLEKLST

SEQ ID NO: 1156 - DNA, 3480 bp, Homo sapien
cgcccagcagcccgtgggcaggcgcggcggagcgagcggggccggcggcgggcgccgagggacgccgaggcctcgggcgggggctggcccggggttccaggtctccagtgggggctgcagactaagcaaaatgaggcggttcctgaggccagggcatgaccctgtgcgggagaggctcaagcgggacctgttccagtttaacaagacggtggagcatggcttcccgcaccagcccagcgccctcggctacagcccgtccctgcacatcctggccatcggcacccgttctggagccatcaagctctacggagccccaggcgtggagttcatggggctgcaccaggagaacaacgctgtgacgcagatccacctcctgcccggccagtgccagctggtcaccctgctggatgacaacagcctgcacctttggagcctgaaggtcaagggcggggcatcggagctgcaggaggatgagagcttcacactgcgtggacccccaggggctgcccccagtgccacacagatcaccgtggtcctgccacattcctcctgcgagctgctctacctgggcaccgagagtggcaacgtgtttgtggtgcagctgccagcttttcgtgcgctggaggaccggaccatcagctcggacgcggtgctgcagcggttgccagaggaggcccgccaccggcgtgtgttcgagatggtggaggcactgcaggagcaccctcgagaccccaaccagatcctgatcggctacagccgaggcctcgttgtcatctgggacctacagggcagccgcgtgctctaccacttcctcagcagccagcaactggagaacatctggtggcagcgggacggccgcctgctcgtcagctgtcactctgacggcagctactgccagtggcccgtgtccagcgaagcccagcaaccagagcccctccgcagcctcgtgccttacggtccctttccttgcaaagcgattaccagaatcctctggctgaccactaggcaggggttgcccttcaccatcttccagggtggcatgccacgggccagctacggggaccgccactgcatctcagtgatccacgatggccagcagacggccttcgacttcacctcccgtgtcatcggcttcactgtcctcacagaggcagaccctgcagccacctttgacgacccctatgccctggtggtgctggctgaggaggagctggtggtgattgacctgcagacagcaggctggccaccggtccagctgccctacctggcttctctgcactgttccgccatcacctgctctcaccacgtctccaacatcccgctgaagctgtgggagcggatcattgccgccggcagccggcagaacgcacacttctccaccatggagtggccaattgatggtggcaccagcctgaccccagccccaccccagagggacctgctgctcacagggcacgaggacggcacggtgcggttctgggatgcctcgggtgtctgcctgcggctgctctacaaactcagcactgtgcgcgtgttcctcaccgacacggaccccaacgagaacttcagtgcccagggcgaggacgagtggcccccactccgcaaggtgggctcctttgacccctacagtgatgacccccggctgggcatccagaagatcttcctctgcaagtacagcggctacctggctgtggcaggcacggcagggcaggtgctggtactggaactgaatgacgaggcagcggagcaggctgtggagcaggtggaggccgacctgctgcaggaccaagagggctaccgctggaaggggcacgagcgcctggcagcccgctcagggcccgtgcgctttgagcctggctttcagcccttcgtgttggtgcagtgtcagcccccggctgtggtcacctccttggccctgcactctgagtggcggctcgtggccttcggcaccagccatggctttggcctctttgaccaccagcagcggcggcaggtctttgttaagtgcacactgcaccccagtgaccagctggccttggagggcccactctcccgcgtcaagtccctcaagaagtccttgcgtcagtcattccgccggatgcgtcggagccgggtgtccagccggaagcggcacccggctggccccccaggagaggcacaggaggggagtgccaaggctgagcggccaggcctccagaacatggagctggcgcctgtgcagcgcaagatcgaggctcgctcggcagaggactccttcacaggcttcgtccggaccctgtactttgctgacacctacctgaaggacagctcccggcactgcccctcgctgtgggctggcaccaatgggggcaccatctatgccttctccctgcgtgtgcctcccgccgagcggagaatggatgagcctgtgcgggcagagcaggccaaggagatccagctgatgcaccgggcgccggtggtgggcatcctggtgctcgacggacacagcgtaccccttcccgagcccctcgaagtggcccatgatctgtcgaagagccctgacatgcagggaagccaccagctgctcgtcgtatcagaggagcagttcaaggtgttcacgctgcccaaggtgagtgccaagctgaagttgaagctgacggccctggagggctcaagagtgcggcgggtcagcgtggcccacttcggcagtcgtcgagccgaggactacggggagcaccacctggcagtccttaccaacctgggcgacatccaggtggtctcgctgcccctgctcaagccccaggtgcgctacagctgcatccgccgggaggacgtcagtggcatcgcctcctgcgtcttcaccaaatatggccaaggcttctacctgatctcaccctcggagtttgagcgcttctctctctccaccaagtggctggtggagccccggtgtctggtggattcagcagaaaccaagaaccaccgccctggtaacggtgcgggccccaagaaggccccgagccgagccaggaactcagggactcagagtgatggcgaggagaagcagcccggcctggtgatggagcgcgctctgctcagtgatgagagagcggcaactggcgttcacatcgagccgccgtggggtgcagcctcagcaatggcggagcagagtgagtggctgagcgtccaggctgcgcgatgagcacacactactactgatggcctttcgggggtccctgccccaaccggagaggccggtgcacagggccccgccaggggctgggggcatcccggcttccacaatgcagctgctctgggcctcgggagaggagagaccccagtcccctgggctgcccttcccgggcctcgtctgtctgggtcctttggtcaatgttgcacagtttttattgctcccatccctttttgtagtgggctgggttttaagttataaatgttaactgcctctgggtgaaaaagtttttaataaacacctattacctcttg

SEQ ID NO: 1157 - protein, 1015 aa, Homo sapien
MRRFLRPGHDPVRERLKRDLFQFNKTVEHGFPHQPSALGYSPSLHILAIGTRSGAIKLYGAPGVEFMGLHQENNAVTQIHLLPGQCQLVTLLDDNSLHLWSLKVKGGASELQEDESFTLRGPPGAAPSATQITVVLPHSSCELLYLGTESGNVFVVQLPAFRALEDRTISSDAVLQRLPEEARHRRVFEMVEALQEHPRDPNQILIGYSRGLVVIWDLQGSRVLYHFLSSQQLENIWWQRDGRLLVSCHSDGSYCQWPVSSEAQQPEPLRSLVPYGPFPCKAITRILWLTTRQGLPFTIFQGGMPRASYGDRHCISVIHDGQQTAFDFTSRVIGFTVLTEADPAATFDDPYALVVLAEEELVVIDLQTAGWPPVQLPYLASLHCSAITCSHHVSNIPLKLWERIIAAGSRQNAHFSTMEWPIDGGTSLTPAPPQRDLLLTGHEDGTVRFWDASGVCLRLLYKLSTVRVFLTDTDPNENFSAQGEDEWPPLRKVGSFDPYSDDPRLGIQKIFLCKYSGYLAVAGTAGQVLVLELNDEAAEQAVEQVEADLLQDQEGYRWKGHERLAARSGPVRFEPGFQPFVLVQCQPPAVVTSLALHSEWRLVAFGTSHGFGLFDHQQRRQVFVKCTLHPSDQLALEGPLSRVKSLKKSLRQSFRRMRRSRVSSRKRHPAGPPGEAQEGSAKAERPGLQNMELAPVQRKIEARSAEDSFTGFVRTLYFADTYLKDSSRHCPSLWAGTNGGTIYAFSLRVPPAERRMDEPVRAEQAKEIQLMHRAPVVGILVLDGHSVPLPEPLEVAHDLSKSPDMQGSHQLLVVSEEQFKVFTLPKVSAKLKLKLTALEGSRVRRVSVAHFGSRRAEDYGEHHLAVLTNLGDIQVVSLPLLKPQVRYSCIRREDVSGIASCVFTKYGQGFYLISPSEFERFSLSTKWLVEPRCLVDSAETKNHRPGNGAGPKKAPSRARNSGTQSDGEEKQPGLVMERALLSDERAATGVHIEPPWGAASAMAEQSEWLSVQAAR

SEQ ID NO: 1158 - DNA, 3445 bp, Homo sapien
gagtgactccaccgcccggagcagcggtgcaggacgcgcgtctccgccgcccgcggtgacttctgcctgcgctccttctctgaacgctcacttccgaggagacgccgacgatgaagacaccgtggaaggttcttctgggactgctgggtgctgctgcgcttgtcaccatcatcaccgtgcccgtggttctgctgaacaaaggcacagatgatgctacagctgacagtcgcaaaacttacactctaactgattacttaaaaaatacttatagactgaagttatactccttaagatggatttcagatcatgaatatctctacaaacaagaaaataatatcttggtattcaatgctgaatatggaaacagctcagttttcttggagaacagtacatttgatgagtttggacattctatcaatgattattcaatatctcctgatgggcagtttattctcttagaatacaactacgtgaagcaatggaggcattcctacacagcttcatatgacatttatgatttaaataaaaggcagctgattacagaagagaggattccaaacaacacacagtgggtcacatggtcaccagtgggtcataaattggcatatgtttggaacaatgacatttatgttaaaattgaaccaaatttaccaagttacagaatcacatggacggggaaagaagatataatatataatggaataactgactgggtttatgaagaggaagtcttcagtgcctactctgctctgtggtggtctccaaacggcacttttttagcatatgcccaatttaacgacacagaagtcccacttattgaatactccttctactctgatgagtcactgcagtacccaaagactgtacgggttccatatccaaaggcaggagctgtgaatccaactgtaaagttctttgttgtaaatacagactctctcagctcagtcaccaatgcaacttccatacaaatcactgctcctgcttctatgttgataggggatcactacttgtgtgatgtgacatgggcaacacaagaaagaatttctttgcagtggctcaggaggattcagaactattcggtcatggatatttgtgactatgatgaatccagtggaagatggaactgcttagtggcacggcaacacattgaaatgagtactactggctgggttggaagatttaggccttcagaacctcattttacccttgatggtaatagcttctacaagatcatcagcaatgaagaaggttacagacacatttgctatttccaaatagataaaaaagactgcacatttattacaaaaggcacctgggaagtcatcgggatagaagctctaaccagtgattatctatactacattagtaatgaatataaaggaatgccaggaggaaggaatctttataaaatccaacttagtgactatacaaaagtgacatgcctcagttgtgagctgaatccggaaaggtgtcagtactattctgtgtcattcagtaaagaggcgaagtattatcagctgagatgttccggtcctggtctgcccctctatactctacacagcagcgtgaatgataaagggctgagagtcctggaagacaattcagctttggataaaatgctgcagaatgtccagatgccctccaaaaaactggacttcattattttgaatgaaacaaaattttggtatcagatgatcttgcctcctcattttgataaatccaagaaatatcctctactattagatgtgtatgcaggcccatgtagtcaaaaagcagacactgtcttcagactgaactgggccacttaccttgcaagcacagaaaacattatagtagctagctttgatggcagaggaagtggttaccaaggagataagatcatgcatgcaatcaacagaagactgggaacatttgaagttgaagatcaaattgaagcagccagacaattttcaaaaatgggatttgtggacaacaaacgaattgcaatttggggctggtcatatggagggtacgtaacctcaatggtcctgggatcgggaagtggcgtgttcaagtgtggaatagccgtggcgcctgtatcccggtgggagtactatgactcagtgtacacagaacgttacatgggtctcccaactccagaagacaaccttgaccattacagaaattcaacagtcatgagcagagctgaaaattttaaacaagttgagtacctccttattcatggaacagcagatgataacgttcactttcagcagtcagctcagatctccaaagccctggtcgatgttggagtggatttccaggcaatgtggtatactgatgaagaccatggaatagctagcagcacagcacaccaacatatatatacccacatgagccacttcataaaacaatgtttctctttaccttagcacctcaaaataccatgccatttaaagcttattaaaactcatttttgttttcattatctcaaaactgcactgtcaagatgatgatgatctttaaaatacacactcaaatcaagaaacttaaggttacctttgttcccaaatttcatacctatcatcttaagtagggacttctgtcttcacaacagattattaccttacagaagtttgaattatccggtcgggttttattgtttaaaatcatttctgcatcagctgctgaaacaacaaataggaattgtttttatggaggctttgcatagattccctgagcaggattttaatctttttctaactggactggttcaaatgttgttctcttctttaaagggatggcaagatgtgggcagtgatgtcactagggcagggacaggataagagggattagggagagaagatagcagggcatggctgggaacccaagtccaagcataccaacacgagcaggctactgtcagctcccctcggagaagagctgttcacagccagactggcacagttttctgagaaagactattcaaacagtctcaggaaatcaaatatgcaaagcactgacttctaagtaaaaccacagcagttgaaaagactccaaagaaatgtaagggaaactgccagcaacgcaggcccccaggtgccagttatggctataggtgctacaaaaacacagcaagggtgatgggaaagcattgtaaatgtgcttttaaaaaaaaatactgatgttcctagtgaaagaggcagcttgaaactgagatgtgaacacatcagcttgccctgttaaaagatgaaaatatttgtatcacaaatcttaacttgaaggagtccttgcatcaatttttcttatttcatttctttgagtgtcttaattaaaagaatattttaacttccttggactcattttaaaaaatggaacataaaatacaatgttatgtattattattcccattctacatactatggaatttctcccagtcatttaataaatgtgccttcattttttc

SEQ ID NO: 1159 - protein, 766 aa, Homo sapien
MKTPWKVLLGLLGAAALVTIITVPVVLLNKGTDDATADSRKTYTLTDYLKNTYRLKLYSLRWISDHEYLYKQENNILVFNAEYGNSSVFLENSTFDEFGHSINDYSISPDGQFILLEYNYVKQWRHSYTASYDIYDLNKRQLITEERIPNNTQWVTWSPVGHKLAYVWNNDIYVKIEPNLPSYRITWTGKEDIIYNGITDWVYEEEVFSAYSALWWSPNGTFLAYAQFNDTEVPLIEYSFYSDESLQYPKTVRVPYPKAGAVNPTVKFFVVNTDSLSSVTNATSIQITAPASMLIGDHYLCDVTWATQERISLQWLRRIQNYSVMDICDYDESSGRWNCLVARQHIEMSTTGWVGRFRPSEPHFTLDGNSFYKIISNEEGYRHICYFQIDKKDCTFITKGTWEVIGIEALTSDYLYYISNEYKGMPGGRNLYKIQLSDYTKVTCLSCELNPERCQYYSVSFSKEAKYYQLRCSGPGLPLYTLHSSVNDKGLRVLEDNSALDKMLQNVQMPSKKLDFIILNETKFWYQMILPPHFDKSKKYPLLLDVYAGPCSQKADTVFRLNWATYLASTENIIVASFDGRGSGYQGDKIMHAINRRLGTFEVEDQIEAARQFSKMGFVDNKRIAIWGWSYGGYVTSMVLGSGSGVFKCGIAVAPVSRWEYYDSVYTERYMGLPTPEDNLDHYRNSTVMSRAENFKQVEYLLIHGTADDNVHFQQSAQISKALVDVGVDFQAMWYTDEDHGIASSTAHQHIYTHMSHFIKQCFSLP

SEQ ID NO: 1160 - DNA, 1097 bp, Homo sapien
aagtgctgcgagccctgggccacgctggccgtgctggcagtgggccgcctcgatccctctgcagtctttcccttgaggctccaagaccagcaggtgaggcctcgcggcgctgaaaccgtgaggcccggaccacaggctccagatggaccctgggaaggacaaagagggggtgccccagccctcagggccgccagcaaggaagaaatttgtgatacccctcgacgaggatgaggtccctcctggagtggccaagcccttattccgatctacacagagccttcccactgtggacacctcggcccaggcggcccctcagacctacgccgaatatgccatctcacagcctctggaaggggctggggccacgtgccccacagggtcagagcccctggcaggagagacgcccaaccaggccctgaaacccggggcaaaatccaacagcatcattgtgagccctcggcagaggggcaatcccgtactgaagttcgtgcgcaacgtgccctgggaatttggcgacgtaattcccgactatgtgctgggccagagcacctgtgccctgttcctcagcctccgctaccacaacctgcacccagactacatccatgggcggctgcagagcctggggaagaacttcgccttgcgggtcctgcttgtccaggtggatgtgaaagatccccagcaggccctcaaggagctggctaagatgtgtatcctggccgactgcacattgatcctcgcctggagccccgaggaagctgggcggtacctggagacctacaaggcctatgagcagaaaccagcggacctcctgatggagaagctagagcaggacttcgtctcccgggtgactgaatgtctgaccaccgtgaagtcagtcaacaaaacggacagtcagaccctcctgaccacatttggatctctggaacagctcatcgccgcatcaagagaagatctggccttatgcccaggcctgggccctcagaaagcccggaggctgtttgatgtcctgcacgagcccttcttgaaagtaccctgatgaccccagctgccaaggaaacccccagtgtaataataaatcgtcctcccaggccaggctc

SEQ ID NO: 1161 - protein, 297 aa, Homo sapien
MDPGKDKEGVPQPSGPPARKKFVIPLDEDEVPPGVAKPLFRSTQSLPTVDTSAQAAPQTYAEYAISQPLEGAGATCPTGSEPLAGETPNQALKPGAKSNSIIVSPRQRGNPVLKFVRNVPWEFGDVIPDYVLGQSTCALFLSLRYHNLHPDYIHGRLQSLGKNFALRVLLVQVDVKDPQQALKELAKMCILADCTLILAWSPEEAGRYLETYKAYEQKPADLLMEKLEQDFVSRVTECLTTVKSVNKTDSQTLLTTFGSLEQLIAASREDLALCPGLGPQKARRLFDVLHEPFLKVP

SEQ ID NO: 1162 - DNA, 4505 bp, Homo sapien
gaattccggagggagggtccccaacgctgggcttgcttgggggcagcccctcagcacagccggggaccgggaatgtggaggcgggaattccttctggcagaatgctggagcctttgccctgttgggacgctgcgaaagatctgaaagaacctcagtgccctcctggggacagggtgggtgtgcagcctgggaactccagggtttggcagggcaccatggagaaagccggtttggcttggacgcgtggcacaggggtgcaatcagaggggacttgggaaagccagcggcaggacagtgatgccctcccaagtccggagctgctaccccaagatcaggacaagcctttcctgaggaaggcctgcagccccagcaacatacctgctgtcatcattacagacatgggcacccaggaggatggggccttggaggagacgcagggaagccctcggggcaacctgcccctgaggaaactgtcctcttcctcggcctcctccacgggcttctcctcatcctacgaagactcagaggaggacatctccagtgaccctgagcgcaccctggaccccaactcagctttcctgcataccctggaccagcagaaacctagagtgagcaaatcatggaggaagataaaaaacatggtgcactggtctcccttcgtcatgtccttcaagaagaagtacccctggatccagctggcaggacacgcagggagtttcaaggcagctgccaatggcaggatcctgaagaagcactgtgagtcagagcagcgctgcctggaccggctgatggtggatgtgctgaggcccttcgtacctgcctaccatggggatgtggtgaaggacggggagcgctacaaccagatggacgacctgctggccgacttcgactcgccctgtgtgatggactgcaagatgggaatcaggacctacctggaggaggagctcacgaaggcccggaagaagcccagcctgcggaaggacatgtaccagaagatgatcgaggtggaccccgaggcccccaccgaggaggaaaaagcacagcgggctgtgaccaagccacggtacatgcagtggcgggagaccatcagctccacggccaccctggggttcaggatcgagggaatcaagaaagaagacggcaccgtgaaccgggacttcaagaagaccaaaacgagggagcaggtcaccgaggccttcagagagttcactaaaggaaaccataacatcctgatcgcctatcgggaccggctgaaggccattcgaaccactctagaagtttctcccttcttcaagtgccacgaggtcattggcagctccctcctcttcatccacgacaagaaggaacaggccaaagtgtggatgatcgactttgggaaaaccacgcccctgcctgagggccagaccctgcagcatgacgtcccctggcaggaggggaaccgggaggatggctacctctcggggctcaataacctcgtcgacatcctgaccgagatgtcccaggatgccccactcgcctgagctgcccacgccctccctggcccccgcctgggcctcctttcctcctcctgtgcttcctttctcgttcctaacttttccttcacttacacctgactgaccctcctgaactgcactacaagacactttgtagaagaggagatgagagtttctagtcattttcctaacttcagggcttggaggtggtgtttgcactgctttttgtagagagggtcacctactagaagagaaatgcccagtcttagaggtgggtcaggtgtagagctggagggggtccctggctgctgaggggaccctaccagatgagccctgcctctgggagccccctaggaagcaccagcctggacctaccacctgcggaggcctgctgccccctggcggccagtgctgttagagtgctgccaagcacagccttatttctgccggggcctccccaccggagagcccagggggccggccgggttcctggtccctggctgggagcagggctttctggtagttggggcacaaaaccatcggggaaccacatgttgactgtgagcaaagtgtcttccgattagcagcctcagggatgccctggtggcctctccagggctgctcaggcaaggccccccacccatctggtatggaaacctgccggctccaggccagacccaggagccaagagaaggctgaagccagcttggctgtgttctctgatctaggccttcccagaggaggcgagcagaagctgtgccacttggaattgcaacccatgagttcagaaggcacactctgccatgctgagctccaagggtgctaccaggggaagatgggatctatagagtctctgggccctggccccagggaggagcacatttttcttgaccctcacctacctggtgctagttggtcaaccctgcctgcatacatgggctcctgtcatggggcccagagtcccttgcagatatagaaataggggaggagctcaggtctgcgccaggcaggaagaaggcaggcttctggcttccagaggtgccgcggtggcctcctggcatcatttgttattgcctctgaaacaagccttactgcctggagggcttagattcctgcttccccaatgtagtgtgggtatcttgtagggtatgtggtggatgccagggcgtgctccaggcacctcttcctgaagtctctgcatttggagattcgtggagaacctatttaagcccaattttaactgaaagccagtgagtctgatatggaagggaatgtaaaatttgcctgacttcttaagaacaaaacccccagctctgtgccccatgctccttggggcttgccacccactcctttgctgtcagaggtacaggagctgggagagtccaggagctagggacacagagggagactatggaccaaggtgtgtgtgtctggaggaaccactgcccaccccaccaccccggggtctctggggaactgtcaacctgcccacgggacatgtacatttccccttttgtgctggaagtgtgagtgacacttgctgggggtggagggtgggacacatgaggatgtataagtacagattttaaaaaaggaaatcaacttacacttcctggctcttgtttaaaacagtggtgagctcctgtgtgggccgacttgctaaaggtcacacacgcgcccggtggagcacgagagacctcgtggcagcatgtgatctggaaggcaggcaggacgggggcgttggggagccaaagtcaactctgggcctctggagctatagtgacttttgggctagaagggaccctggtggtctgtgcttcagccatttgcagggcaggggcatcattaattcagacgtaaagattctatgaatatggactggccaaaagttatccttactccatctgtgaaagaagtttgctaaagcaaatcatgatatgaacaaaaattacaggggacctgtttaagagaacaaaatgttccaagcactttaggcagacaccagctgtttgcaaacaatgtgctaatatgcaaatgatgtgcttattaaaggaggcccatggggcctcttattggcaatacttggctgtgggttacattaaatatgtgaacatagtatgaagtagcatcattttagggttattctgttacttagggtttttgttttctgttttttttttctctttttttgtatttaccgtgctagttctcttctacacctactctgtctctcaagccattttgccactcgcttccctgccatctggcccttccctttgtctcagtgggatagatggattgtgaaatggaatctcccagaacccctgccctggcagcctggaagaccgtgcctgcccagccctcgtcaccacagggactccttgggtcctggcagtgcatgtgccagcaggcaggacaaactctgtgtacctgtgcccaggtgaatgggcgcagggtcctcttgccctgtcctgcggggggccccacgagttcctggcattcagcactgcttagcattctcggaaggtttcttcaactgcttgcttttcccaggcttgcctttagtgtcatgtaagacatttttaagttatatttattttgttgggttttaaaattgcacagaacactaagaccgaaaggctggactcttgtttctccttgaaagctttgcctttgttttgaacttcctttcccacttggtagaaagagcccagaagcagccctggccctgtaagatggactctttcatccttcagttgtatttagctttgagtttctctgcatctgtccaccccatgtgtatataacccagcccctggctctggggtggtcacctcgtcagtgccttttgttctggaggagaggacccccccgcctgccgagaggctctcttcctgttctgcacccctctccccatgggaccttggagaaaactgaactgttacaaacccctgcacagtgcctgtcaaacagatgcaaaccttcctgaataaagccttggagacggaattc

SEQ ID NO: 1163 - protein, 472 aa, Homo sapien
MLEPLPCWDAAKDLKEPQCPPGDRVGVQPGNSRVWQGTMEKAGLAWTRGTGVQSEGTWESQRQDSDALPSPELLPQDQDKPFLRKACSPSNIPAVIITDMGTQEDGALEETQGSPRGNLPLRKLSSSSASSTGFSSSYEDSEEDISSDPERTLDPNSAFLHTLDQQKPRVSKSWRKIKNMVHWSPFVMSFKKKYPWIQLAGHAGSFKAAANGRILKKHCESEQRCLDRLMVDVLRPFVPAYHGDVVKDGERYNQMDDLLADFDSPCVMDCKMGIRTYLEEELTKARKKPSLRKDMYQKMIEVDPEAPTEEEKAQRAVTKPRYMQWRETISSTATLGFRIEGIKKEDGTVNRDFKKTKTREQVTEAFREFTKGNHNILIAYRDRLKAIRTTLEVSPFFKCHEVIGSSLLFIHDKKEQAKVWMIDFGKTTPLPEGQTLQHDVPWQEGNREDGYLSGLNNLVDILTEMSQDAPLA

SEQ ID NO: 1164 - DNA, 1355 bp, Homo sapien
cagtggctggtaggcagtggctgggaggcagcggcccaattagtgtcgtgcggcccgtggcgaggcgaggtccggggagcgagcgagcaagcaaggcgggaggggtggccggagctgcggcggctggcacaggaggaggagcccgggcgggcgaggggcggccggagagcgccagggcctgagctgccggagcggcgcctgtgagtgagtgcagaaagcaggcgcccgcgcgctagccgtggcaggagcagcccgcacgccgcgctctctccctgggcgacctgcagtttgcaatatgactttggaggaattctcggctggagagcagaagaccgaaaggatggataaggtgggggatgccctggaggaagtgctcagcaaagccctgagtcagcgcacgatcactgtcggggtgtacgaagcggccaagctgctcaacgtcgaccccgataacgtggtgttgtgcctgctggcggcggacgaggacgacgacagagatgtggctctgcagatccacttcaccctgatccaggcgttttgctgcgagaacgacatcaacatcctgcgcgtcagcaacccgggccggctggcggagctcctgctcttggagaccgacgctggccccgcggcgagcgagggcgccgagcagcccccggacctgcactgcgtgctggtgacgaatccacattcatctcaatggaaggatcctgccttaagtcaacttatttgtttttgccgggaaagtcgctacatggatcaatgggttccagtgattaatctccctgaacggtgatggcatctgaatgaaaataactgaaccaaattgcactgaagtttttgaaatacctttgtagttactcaagcagttactccctacactgatgcaaggattacagaaactgatgccaaggggctgagtgagttcaactacatgttctgggggcccggagatagatgactttgcagatggaaagaggtgaaaatgaagaaggaagctgtgttgaaacagaaaaataagtcaaaaggaacaaaaattacaaagaaccatgcaggaaggaaaactatgtattaatttagaatggttgagttacattaaaataaaccaaatatgttaaagtttaagtgtgcagccatagtttgggtatttttggtttatatgccctcaagtaaaagaaaagccgaaagggttaatcatatttgaaaaccatattttattgtattttgatgagatattaaattctcaaagttttattataaattctactaagttattttatgacatgaaaagttatttatgctataaattttttgaaacacaatacctacaataaactggtatgaataattgcatcatt

SEQ ID NO: 1165 - protein, 165 aa, Homo sapien
MTLEEFSAGEQKTERMDKVGDALEEVLSKALSQRTITVGVYEAAKLLNVDPDNVVLCLLAADEDDDRDVALQIHFTLIQAFCCENDINILRVSNPGRLAELLLLETDAGPAASEGAEQPPDLHCVLVTNPHSSQWKDPALSQLICFCRESRYMDQWVPVINLPER

SEQ ID NO: 1166 - DNA, 817 bp, Homo sapien
gaaggaggcccagacagtgagggcaggagggagagaagagacgcagaaggagagcgagcgagagagaaagggttctggattggaggggagagcaagggagggaggaaggcggtgagagaggcgggggcctcgggagggtgaaaggagggaggagaagggcggggcacggaggcccgagcgagggacaagactccgactccagctctgacttttttcgcggctctcggcttccactgcagccatgtcactcctcttgctggtggtctcagcccttcacatcctcattcttatactgcttttcgtggccactttggacaagtcctggtggactctccctgggaaagagtccctgaatctctggtacgactgcacgtggaacaacgacaccaaaacatgggcctgcagtaatgtcagcgagaatggctggctgaaggcggtgcaggtcctcatggtgctctccctcattctctgctgtctctccttcatcctgttcatgttccagctctacaccatgcgacgaggaggtctcttctatgccaccggcctctgccagctttgcaccagcgtggcggtgtttactggcgccttgatctatgccattcacgccgaggagatcctggagaagcacccgcgagggggcagcttcggatactgcttcgccctggcctgggtggccttccccctcgccctggtcagcggcatcatctacatccacctacggaagcgggagtgagcgccccgcctcgctcggctgcccccgccccttcccggcccccctcgccgcgcgtcctccaaaaaaataaaactttaacggcgg

SEQ ID NO: 1167 - protein, 163 aa, Homo sapien
MSLLLLVVSALHILILILLFVATLDKSWWTLPGKESLNLWYDCTWNNDTKTWACSNVSENGWLKAVQVLMVLSLILCCLSFILFMFQLYTMRRGGLFYATGLCQLCTSVAVFTGALIYAIHAEEILEKHPRGGSFGYCFALAWVAFPLALVSGIIYIHLRKRE

SEQ ID NO: 1168 - DNA, 5361 bp, Homo sapien
gccagcgatcagagcagcgctgggtgttcaggggccaagatggcggcgcgccggggacggagagacggagtcgcgccgcccccgagtgggggccccggtccggaccctggcgggggagcccgcggcagtggttggcgaagtcgaagccaagcgccgtatgggactttgggcgctgtgagcggcggcgagcaggtgctgctgcatgaggaggcgggtgattctggctttgtcagtctctctcggcagggcccatctctgagggacaaggacctggaaatggaggagctaatgctgcaggatgagacactgctggggaccatgcagagctacatggatgcctcccttatctccctcattgaggattttgggagccttggagagagcaggttatctctggaggaccacaatgaagtgtcgctgctcacggctctgacggagatcttggacaatgcagattctgagaacctttctccatttgacagcattcctgattcggagctgcttgtgtcaccccgggagggctcctctctgcacaagctgcttactctctctcggacacccccagaacgtgacctcatcaccccagttgacccactggggcccagtacgggcagcagtagagggagtggggttgaaatgtctcttccagatccctcttgggacttctccccaccctctttcttagagacctcttcccccaagcttcctagctggagacccccaagatcaagaccacgctggggccaatccccacctccccagcagcgcagtgatggagaagaagaggaggaggtggccagcttcagtggccagattcttgccggggagcttgacaactgtgtgagcagtatcccggacttccccatgcatttggcctgccctgaggaggaagataaagcaacagcagcagagatggcagtgccagcagctggtgatgagagcatctcctccctgagtgagctggtgcgggccatgcacccatactgcctgcccaacctcacccacctggcatcacttgaggatgagcttcaggagcagccagatgatttgacactgcctgagggctgcgtagtgctggagattgtggggcaggcagccacagctggcgatgacctggagatcccagttgtggtgcgacaggtctctcctggaccccggcctgtgctcctggatgactcgctagagactagttctgccttgcagctgcttatgcctacactggagtcagagacagaggctgctgtgcccaaggtaaccctctgctctgagaaagaggggttgtcattgaactcagaggagaagctggactcagcctgcttattgaagcccagggaggtcgtggagccggtggtgcccaaggagcctcagaacccacctgccaatgcagcaccaggttcccagagagctcgaaagggcaggaagaagaagagcaaggagcagccagcagcctgtgtggaaggctatgccaggaggctgaggtcatcttctcgcgggcagtctactgtaggtacagaagtgacctctcaggtagacaacttgcagaaacagcctcaggaagaacttcaaaaagagtctgggcctctccagggtaaggggaagccccgggcttgggctcgggcctgggcagctgccttggagaattctagccctaagaacttggagagaagtgctggacaaagtagtcctgctaaagaaggccctctagacctctacccaaagctggctgacactatccaaaccaatcctataccaacccatctctcattggtcgactctgcccaagccagccccatgccagttgactctgttgaagctgatcccactgcagttggccctgttctagctggccctgtacctgttgaccctgggttggttgaccttgcttcaaccagctcagaactggttgagcctctcccggctgagccagtgctgatcaacccagtcctggctgactcagcagcagttgaccctgcagtggttcccatctcagataacttgccaccagttgatgctgtcccgtctggcccagcaccagttgatctagcactggttgaccctgttcctaatgacctgactccagttgacccagtgctagttaagtccagaccaactgatcccagacgtggtgcagtgtcatcagccctggggggttcagcaccccagctcctcgtggagtcagagtccttggacccaccaaagaccatcatccctgaagtcaaagaggttgtggattctctgaaaattgaaagtggtaccagtgctacaacccatgaagccagacctcggcctctcagcttatctgagtaccggcgacgaaggcagcaacgccaagcagaaacagaagagagaagtccacagcccccaactgggaagtggcctagccttccagagactcccacagggctggcagacatcccttgtcttgtcatcccaccagccccagccaagaagacagctctgcagagaagccctgaaacaccccttgagatttgccttgtgcctgtaggtcccagccctgcttctcctagtcctgagccacctgtaagcaaacctgtggcctcatctcccactgagcaggtgccatcccaggagatgccactgttggcgagaccttcccctcctgtgcagtctgtgtcccctgctgtgcccacacctccctcgatgtctgctgccctgcctttccctgcaggtgggcttggcatgccccccagtctgcccccacctcccttgcagcctcctagtcttccattgtctatggggccagtactacctgatccgtttactcactatgcccccttgccatcctggccttgttatcctcatgtgtccccttctggctatccttgcctgccccccccaccaacggtgcccctagtgtctggtactcctggtgcctatgccgtgcctcccacttgcagtgtgccttgggcaccccctcctgccccagtctcaccttacagttccacatgtacctatgggcccttgggatggggcccagggcctcaacatgctccattctggtctactgttcccccacctcctttgcctccagcctccattgggagagctgttccccaacctaaaatggagtctaggggcactccagctggccctcctgaaaatgtacttcccttgtcgatggctcctcccctcagtcttgggctacctggccatggagctcctcagacagagcctaccaaggtggaggtcaagccagtgcctgcatctccccatccgaaacacaaggtgtctgccctggtgcaaagtccccagatgaaggctctagcatgtgtgtctgctgaaggtgtgactgttgaggagcctgcatcagagaggctaaagcctgagacccaagagaccaggcccagggagaagccccccttgcctgctaccaaggctgttcccacaccaaggcagagcactgtccccaagctgcctgctgtccacccagcccgtctaaggaagctgtccttcctgcctaccccacgtactcagggttctgaagatgtggtacaggctttcatcagtgagattggaattgaggcatcggacctgtccagtctgctggagcagtttgagaaatcagaagccaaaaaggagtgtcctcctccggctcctgctgacagcttggctgtaggaaactcaggcggcgttgacattccccaggagaagaggcccctagaccggttacaagccccagaactggccaacgtggcagggctcacccctccagctacccctccccaccagttatggaagcccctggctgctgtctcactgctggccaaagccaaatctcctaagtccaccgcccaggagggaaccctgaagcctgaaggagttacggaggccaaacatccagctgcagttcgcctccaagaaggggtccatggccctagtcgagtccatgtgggctctggggaccatgactattgtgtccggagcaggacccccccaaaaaagatgcctgccctagtcattccagaggtgggctcccgatggaatgtcaagcgccatcaggacatcaccatcaaacctgtcttgtccttgggcccagctgcccctccgcccccatgcatagctgcctcccgggagccgcttgatcacaggactagcagtgagcaggcagatccctcagcaccctgccttgccccatccagcttgctgtcccctgaggcctcaccctgccggaatgacatgaacactaggactccccctgaaccctcagccaagcagcggtcaatgcgctgttaccgaaaagcctgcaggtcagccagcccctcaagccagggctggcagggccgccgaggccgcaacagccgttctgtcagctctgggtccaaccggactagcgaagcatcttcctcatcctcatcatcgtcttcctcatcccgatctcggtccaggtccctctcccccccacacaagaggtggcgaaggtccagctgtagttcctctggacgttctcgaagatgctcttcctcttcttcgtcatcatcttcctcttcgtcttcctcatcctcatcatccagttctcgaagccgctcacgatccccatccccccgccggagaagtgacaggaggcggcggtacagctcttatcgttcacatgaccattaccaaaggcaaagagtgctacaaaaggagcgtgcaatagaagaaagaagggtggtcttcattggaaagatacctggccgcatgactcgatcagagctgaaacagaggttctccgtttttggagagattgaggagtgcaccatccacttccgtgtccaaggggacaactacggcttcgtcacttatcgctatgctgaggaggcatttgcagccattgagagtggccacaagctgcggcaggcagatgagcagccctttgatctctgctttgggggccgaaggcagttctgcaagaggagctattctgatcttgactccaaccgggaagactttgacccagcacctgtaaagagcaaatttgattctcttgactttgacacattgttgaaacaggcccagaagaacctcaggaggtaaccttgggcccttccctgctatcctttttctcctttggaggtgcccaacctcctccacccccttcccctactctaggggagagagctgctagtgagatgactgttttataaagaaatggaaaaaagtgaaataaaaaatatgttgaatcagattttttaaaaggggtatttgtttttttataacaggtattgaaacaagttaacttgcattcctatgtaagataggaggggctgaggggatccccagtgtttggaacataagtcactatgcagactaataaacatcaactagagagagaaaaaaaaaaaaaaaaaaaaaaaaaaaaaa

SEQ ID NO: 1169 - protein, 1664 aa, Homo sapien
MAARRGRRDGVAPPPSGGPGPDPGGGARGSGWRSRSQAPYGTLGAVSGGEQVLLHEEAGDSGFVSLSRQGPSLRDKDLEMEELMLQDETLLGTMQSYMDASLISLIEDFGSLGESRLSLEDHNEVSLLTALTEILDNADSENLSPFDSIPDSELLVSPREGSSLHKLLTLSRTPPERDLITPVDPLGPSTGSSRGSGVEMSLPDPSWDFSPPSFLETSSPKLPSWRPPRSRPRWGQSPPPQQRSDGEEEEEVASFSGQILAGELDNCVSSIPDFPMHLACPEEEDKATAAEMAVPAAGDESISSLSELVRAMHPYCLPNLTHLASLEDELQEQPDDLTLPEGCVVLEIVGQAATAGDDLEIPVVVRQVSPGPRPVLLDDSLETSSALQLLMPTLESETEAAVPKVTLCSEKEGLSLNSEEKLDSACLLKPREVVEPVVPKEPQNPPANAAPGSQRARKGRKKKSKEQPAACVEGYARRLRSSSRGQSTVGTEVTSQVDNLQKQPQEELQKESGPLQGKGKPRAWARAWAAALENSSPKNLERSAGQSSPAKEGPLDLYPKLADTIQTNPIPTHLSLVDSAQASPMPVDSVEADPTAVGPVLAGPVPVDPGLVDLASTSSELVEPLPAEPVLINPVLADSAAVDPAVVPISDNLPPVDAVPSGPAPVDLALVDPVPNDLTPVDPVLVKSRPTDPRRGAVSSALGGSAPQLLVESESLDPPKTIIPEVKEVVDSLKIESGTSATTHEARPRPLSLSEYRRRRQQRQAETEERSPQPPTGKWPSLPETPTGLADIPCLVIPPAPAKKTALQRSPETPLEICLVPVGPSPASPSPEPPVSKPVASSPTEQVPSQEMPLLARPSPPVQSVSPAVPTPPSMSAALPFPAGGLGMPPSLPPPPLQPPSLPLSMGPVLPDPFTHYAPLPSWPCYPHVSPSGYPCLPPPPTVPLVSGTPGAYAVPPTCSVPWAPPPAPVSPYSSTCTYGPLGWGPGPQHAPFWSTVPPPPLPPASIGRAVPQPKMESRGTPAGPPENVLPLSMAPPLSLGLPGHGAPQTEPTKVEVKPVPASPHPKHKVSALVQSPQMKALACVSAEGVTVEEPASERLKPETQETRPREKPPLPATKAVPTPRQSTVPKLPAVHPARLRKLSFLPTPRTQGSEDVVQAFISEIGIEASDLSSLLEQFEKSEAKKECPPPAPADSLAVGNSGGVDIPQEKRPLDRLQAPELANVAGLTPPATPPHQLWKPLAAVSLLAKAKSPKSTAQEGTLKPEGVTEAKHPAAVRLQEGVHGPSRVHVGSGDHDYCVRSRTPPKKMPALVIPEVGSRWNVKRHQDITIKPVLSLGPAAPPPPCIAASREPLDHRTSSEQADPSAPCLAPSSLLSPEASPCRNDMNTRTPPEPSAKQRSMRCYRKACRSASPSSQGWQGRRGRNSRSVSSGSNRTSEASSSSSSSSSSSRSRSRSLSPPHKRWRRSSCSSSGRSRRCSSSSSSSSSSSSSSSSSSSSRSRSRSPSPRRRSDRRRRYSSYRSHDHYQRQRVLQKERAIEERRVVFIGKIPGRMTRSELKQRFSVFGEIEECTIHFRVQGDNYGFVTYRYAEEAFAAIESGHKLRQADEQPFDLCFGGRRQFCKRSYSDLDSNREDFDPAPVKSKFDSLDFDTLLKQAQKNLRR

SEQ ID NO: 1170 - DNA, 6196 bp, Homo sapien
tgaggaactgcgtgtggagtcagcccagtctggatgcacaggaggatgctggcggcacagtgagtgaggcctggtgccagagctgtgcggaccccttgttggccatggagcagcaggcccagaggccctctccccagccctgcttgcctgcctcggagaggacagaggcctaggcccacgggggagggtgttggcagacagatgccctccaggccctggggcctccttaacggccccttaacgacacgcgtgccaagggtggaggatgccagccaaggggcgctacttcctcaacgagggcgaggagggccctgaccaagatgcgctctacgagaagtaccagctcaccagccagcatgggccgctgctgctcacgctcctgctggtggccgccactgcctgcgtggccctcatcatcattgccttcagccagggggacccctccagacaccaggccattctgggcatggcgttcctggtgctggcggtgtttgcggccctctctgtgctgatgtacgtcgagtgtctcctgcggcgctggctcagggccttggcgctgctcacctgggcctgcttggtggcgctgggctatgtgctggtgttcgacgcatggacaaaggcggcctgtgcgtgggagcaggtgcccttcttcctgttcattgtcttcgtggtgtacacactactgcccttcagcatgcggggcgctgtcgccgttggggccgtctccactgcctcccacctcctggtgctcggttctttgatgggaggcttcacgacacccagtgtccgggtggggctgcagctgctggccaacgcagtcatcttcctgtgtgggaacctgacaggcgccttccacaagcaccaaatgcaggatgcgtcccgggacctcttcacctacactgtgaagtgcatccagatccgccggaagctgcgcatcgagaagcgccagcaggagaacctgctgctgtcagtgcttccggcccacatctccatgggcatgaagctggccatcatcgaacggctcaaggagcatggtgaccgtcgctgcatgcctgacaacaacttccacagcctctacgtcaagaggcaccagaatgtcagcatcctctatgcggacatcgtgggcttcacgcagctggccagcgactgttctcccaaggagctggtggtggtgctgaatgagctctttggcaagttcgaccagatcgccaaggccaacgagtgcatgcgaatcaagatcctcggcgactgctactactgtgtatcgggcctgcccgtgtcgctgcctacccacgcccggaactgcgtgaagatggggctggacatgtgccaggccatcaagcaggtgcgggaggccacgggcgtggacatcaacatgcgtgtgggcatacactcggggaatgtgctgtgcggggtcatcgggctgcgcaagtggcagtatgacgtgtggtcccacgacgtgtccctggccaaccggatggaggcagccggagtacccggccgggtgcacatcacggaggccacgctaaagcacctggacaaggcgtacgaggtggaggatgggcacgggcagcagcgggacccctacctcaaggagatgaacatccgcacctacctggtcatcgacccccggagccagcagccacccccgcccagccaacacctccccaggcccaagggggacgcggccctgaagatgcgggcgtcagtgcgcatgacccggtacctcgagtcctggggggcggcacggccctttgcacatctcaaccaccgtgagagcgtgagcagtggtgagacccacgtccccaacgggcggaggcctaagagcgttccccagcgccaccgccggaccccagacagaagcatgtcccccaaggggcggtcggaggatgactcgtacgatgacgagatgctgtcagccattgaggggctcagctccacgaggccctgctgctccaagtccgatgacttctacacctttgggtccatcttcctggagaagggctttgagcgcgagtaccgcctggcacccatcccccgggcccgccacgactttgcctgcgccagcctgatcttcgtctgcatcctgctcgtccatgtcctgctcatgcccaggacggcggcactgggtgtgtccttcgggctggtggcctgtgtactggggctggtgctgggcctgtgctttgccaccaagttctcgaggtgctgcccagctcgggggacgctctgcactatctctgagagggtggagacacagcccctgctgaggctgaccctggccgtcctgaccatcggcagcctgctcactgtggccatcatcaacctgcccctgatgcctttccaagttccagagctgcctgttggcaatgagacaggcctactggccgcgagcagcaagacaagagccctgtgtgagcccctcccgtactacacctgcagctgtgtcctgggcttcatcgcctgctcggtcttcctgaggatgagcctggagccaaaggttgtgctgctgacagtggccctggtggcctacctggtgctcttcaacctctccccatgctggcagtgggactgctgcggccaaggcctgggcaacctcaccaagcccaacggcaccaccagtggcacccctagctgttcctggaaggacctgaagaccatgaccaatttctacctggtcctgttctacatcaccctgcttacactctccagacagattgactattactgccgcttggactgcctatggaagaagaagttcaagaaggagcacgaggagtttgagaccatggagaacgtgaaccgccttcttctggagaacgtcctgccagcccacgtggctgcccactttatcggtgacaagttaaacgaggactggtaccatcagtcctatgactgcgtctgtgtcatgtttgcctccgtgccggacttcaaagtgttctacacagagtgcgatgtcaacaaagaagggctggagtgcctacgcctgctcaatgagatcattgccgacttcgacgagctcctactgaagcccaagttcagcggcgtggagaagatcaagaccatcggcagcacgtacatggcagctgcagggctcagcgtcgcctcagggcacgagaaccaggagctggagcggcagcatgcccacattggtgtcatggtggagttcagcatcgccctgatgagtaagctggacggcatcaacaggcactccttcaactccttccgcctccgcgtcggcataaaccatgggcctgtgattgctggagtgattggggcccgaaaacctcagtatgacatctggggaaacactgtcaatgtggccagccgaatggaaagcactggagaacttgggaaaatccaggttaccgaggagacctgcaccatcctccagggcctcgggtactcttgtgaatgccgtggcctgatcaacgtcaaaggcaaaggcgagctgaggacttactttgtctgtacggacactgccaagtttcaggggctggggctgaactgagggctcctgctggattccgaaaaggccgggaagccagtctccttccctgaagcaagcccaggagaagactctccgccccacgccaatcccaaaggcatgcagatggctgtgcatgttggcttctttggacctgcactggaggatttctcagacacatgcaccagattctggctcgaagcagccactgagccataatgcgcaggggaggccagaagctctgtgcctggtctgtaacagtttccaggccagctggagaatgttcactggttcggggctgactttgagatctttgttccctgaggtgccaggcaggcaactttagcacatgatgaaaacagacttccacctcagtggcctgtgggcacgcacaagtgaggtctgtttttctagacaccaagggggagtaagctgagctgtctagcacggattggagactccctctccctggtgggcctggcaatgacagcatttctcacagaggcattctggtaaatgaagctgaaaggggtgttttacatctgtaaacggtttcaaacaggtagagagaaaaacaccacaattaacactgttactttttgccttgtctggcatgtttgttttaaatgaatacattaatggggtttttatccttttgaatgacttttcagacactagacataaatctcttccctccagtgtatgctctgcctttttaaccactgacatgtaaggaggactactgtctagcatcagcttatggggtcagctggctgtggggatagagtcctgaggaatgtggtcacagcaagaaggcggggagcagcagagccttgcctttgaatgaggcagcttgtgaggcaagcattctggagagaggtgctttgaaagtaaggtgcggcctttcacctcttccttgattactcacacatctttgcgttctcccctgccgtccttcaactgtatcttacttttcttaccagaaaggaatggagtctgtttagagacaacttggacaacctgtgagtgcatctcttctttcctttagtcttcacagctaactctggagagcttcaaaactagaaggatctactccgcatgggtgcatgcagaggctcctggatctgggaagcccgccccctcacaaatgctgagccgttcttgctctgaaactgcgtgagtcaaggcaaatgcaaaaagccaggttttggggatgtgtcttactgtgcttcaacttcccaaggaattgaaagtcaacctaactgtaacaacagggtgagaaatgaccaaactgcccgtgactttttctgaatggacttcataaccggaagacttaaccggtggcctcatcaccagagcatcgccaggatttctaatgcactcagtttccctacatagcagggattcttagctaggtgtccccatgaaccccgtaaagttctacacaaagtcttgcatacaggagcctttacaagatgattatacagggttgcagattgggtgactgaccagacttgttggggtcctgggatgagttgccccgggctgcaaattaagagtacagctaagtgcgggggtggcggtggagggaacgaaaattgaacctgtctgcctgtgctgtgtcgtgtggctttatcagcccgaggaagggcaggtgtattctaatttgcacaaaggtgctgggtagactagtggcagctctcatgtgctgcacataagtggaatcagtatgaatagaagaacttgctgtataaaggaatttcatggcaacaatgctggtaagggcaattagcctcgcttaagttgccttttttacacaccaaaactttttacatgaagggctggtttcacatgaatactatactgaaatctgtgccacaccaaaactttttacatgaagggctggtttcacatgaatactatactgaaatctgtgctctcaagatctagcagtgaccagggctgcccggcgggggctctcctggcaagtcaggaaggtttctgttgctaatataacatagaaacacattagtgcactgggcctctctgaggtcagcatatttgtactcttggaatatttgtttttttcttcagtaacaacagaaaccccagttgggagtttaacaaataactgactaccactcactcatgcatttttatttccaattaaagcaaagcactgtgctgtgctcagataataatagtttgtaagtaaaagtttttagttttcagtgttcaggttatagaatataactgaccataaaaattacctgcaggtattttctttttatgaacttgtttttaaattaccaagtaattactggtgtcattttgttttatgacagacacacgtatctaacaaacaaacaaacagtgaccttctccatgggtcaaggacttccttacaatttctcctgagttaacttttgtgaaaataatacctaaggttttctggcttattgaggaaatttcctaacaaacaaacaaacaaacaaacagaagagaagatcattaaccactgtatactttgtgtatataataggtcagtgtaaagaaatatgatttgaggtggtgcatgcaagtaactagggtttattctatataatgaatatttatagatctgtaacatttgtttcaaaatgctgtttcatttttataaagtaccagtgtttagctgctttttatacattaaattagcaatttgaaaaactc

SEQ ID NO: 1171 - protein, 1080 aa, Homo sapien
MPAKGRYFLNEGEEGPDQDALYEKYQLTSQHGPLLLTLLLVAATACVALIIIAFSQGDPSRHQAILGMAFLVLAVFAALSVLMYVECLLRRWLRALALLTWACLVALGYVLVFDAWTKAACAWEQVPFFLFIVFVVYTLLPFSMRGAVAVGAVSTASHLLVLGSLMGGFTTPSVRVGLQLLANAVIFLCGNLTGAFHKHQMQDASRDLFTYTVKCIQIRRKLRIEKRQQENLLLSVLPAHISMGMKLAIIERLKEHGDRRCMPDNNFHSLYVKRHQNVSILYADIVGFTQLASDCSPKELVVVLNELFGKFDQIAKANECMRIKILGDCYYCVSGLPVSLPTHARNCVKMGLDMCQAIKQVREATGVDINMRVGIHSGNVLCGVIGLRKWQYDVWSHDVSLANRMEAAGVPGRVHITEATLKHLDKAYEVEDGHGQQRDPYLKEMNIRTYLVIDPRSQQPPPPSQHLPRPKGDAALKMRASVRMTRYLESWGAARPFAHLNHRESVSSGETHVPNGRRPKSVPQRHRRTPDRSMSPKGRSEDDSYDDEMLSAIEGLSSTRPCCSKSDDFYTFGSIFLEKGFEREYRLAPIPRARHDFACASLIFVCILLVHVLLMPRTAALGVSFGLVACVLGLVLGLCFATKFSRCCPARGTLCTISERVETQPLLRLTLAVLTIGSLLTVAIINLPLMPFQVPELPVGNETGLLAASSKTRALCEPLPYYTCSCVLGFIACSVFLRMSLEPKVVLLTVALVAYLVLFNLSPCWQWDCCGQGLGNLTKPNGTTSGTPSCSWKDLKTMTNFYLVLFYITLLTLSRQIDYYCRLDCLWKKKFKKEHEEFETMENVNRLLLENVLPAHVAAHFIGDKLNEDWYHQSYDCVCVMFASVPDFKVFYTECDVNKEGLECLRLLNEIIADFDELLLKPKFSGVEKIKTIGSTYMAAAGLSVASGHENQELERQHAHIGVMVEFSIALMSKLDGINRHSFNSFRLRVGINHGPVIAGVIGARKPQYDIWGNTVNVASRMESTGELGKIQVTEETCTILQGLGYSCECRGLINVKGKGELRTYFVCTDTAKFQGLGLN

SEQ ID NO: 1172 - DNA, 1835 bp, Homo sapien; identical to SEQ ID NO: 69

SEQ ID NO: 1173 - protein, 292 aa, Homo sapien; identical to SEQ ID NO: 68

SEQ ID NO: 1174 - DNA, 1548 bp, Homo sapien
agacttggaaaccccaaagtgtccgcgaccctgcacggcagctcccttccagcttcatgggcaaagtgtggaaacagcagatgtaccctcagtacgccacctactattacccccagtatctgcaagccaagcagtctctggtcccagcccaccccatggcccctcccagtcccagcaccaccagcagtaataacaacagtagcagcagtagcaactcaggatgggatcagctcagcaaaacgaacctctatatccgaggactgcctccccacaccaccgaccaggacctggtgaagctctgtcaaccatatgggaaaatagtctccacaaaggcaattttggataagacaacgaacaaatgcaaaggttatggttttgtcgactttgacagccctgcagcagctcaaaaagctgtgtctgccctgaaggccagtggggttcaagctcaaatggcaaagcaacaggaacaagatcctaccaacctctacatttctaatttgccactctccatggatgagcaagaactagaaaatatgctcaaaccatttggacaagttatttctacaaggatactacgtgattccagtggtacaagtcgtggtgttggctttgctaggatggaatcaacagaaaaatgtgaagctgttattggtcattttaatggaaaatttattaagacaccaccaggagtttctgcccccacagaacctttattgtgtaagtttgctgatggaggacagaaaaagagacagaacccaaacaaatacatccctaatggaagaccatggcatagagaaggagaggctggaatgacacttacttacgacccaactacagctgctatacagaacggattttatccttcaccatacagtattgctacaaaccgaatgatcactcaaacttctattacaccctatattgcatctcctgtatctgcctaccaggtggcaaaggaaaccagagaaaacaagtatcggggctctgctatcaaggtgcaaagtccttcgtggatgcaacctcaaccatatattctacagcaccctggtgccgtgttaactccctcaatggagcacaccatgtcactacagcccgcatcaatgatcagccctctggcccagcagatgagtcatctgtcactaggcagcaccggaacatacatgcctgcaacgtcagctatgcaaggagcctacttgccacagtatgcacatatgcagacgacagcggttcctgttgaggaggcaagtggtcaacagcaggtggctgtcgagacgtctaatgaccattctccatatacctttcaacctaataagtaactgtgagatgtacagaaaggtgttcttacatgaagaagggtgtgaaggctgaacaatcatggatttttctgatcaattgtgctttaggaaattattgacagttttgcacaggttcttgaaaacgttatttataatgaaatcaactaaaactatttttgctataagttctataaggtgcataaaacccttaaattcatctagtagctgttcccccgaacaggtttattttagt

SEQ ID NO: 1175 - protein, 419 aa, Homo sapien
MGKVWKQQMYPQYATYYYPQYLQAKQSLVPAHPMAPPSPSTTSSNNNSSSSSNSGWDQLSKTNLYIRGLPPHTTDQDLVKLCQPYGKIVSTKAILDKTTNKCKGYGFVDFDSPAAAQKAVSALKASGVQAQMAKQQEQDPTNLYISNLPLSMDEQELENMLKPFGQVISTRILRDSSGTSRGVGFARMESTEKCEAVIGHFNGKFIKTPPGVSAPTEPLLCKFADGGQKKRQNPNKYIPNGRPWHREGEAGMTLTYDPTTAAIQNGFYPSPYSIATNRMITQTSITPYIASPVSAYQVAKETRENKYRGSAIKVQSPSWMQPQPYILQHPGAVLTPSMEHTMSLQPASMISPLAQQMSHLSLGSTGTYMPATSAMQGAYLPQYAHMQTTAVPVEEASGQQQVAVETSNDHSPYTFQPNK

SEQ ID NO: 1176 - DNA, 1891 bp, Homo sapien
ccgaggctataagagggcgcacaagtggcgcggcgcaggagccgccgccagtggagggccgggcgctgcggccgcggccggggcgggcgcagggccgagcggacgggggggcgcgggccccccgggaggccgcggccactcccccccgggccggcgcggcgggggaggcggaggatggaaacacccttctacggcgatgaggcgctgagcggcctgggcggcggcgccagtggcagcggcggcacgttcgcgtccccgggccgcttgttccccggggcgcccccgacggccgcggccggcagcatgatgaagaaggacgcgctgacgctgagcctgagtgagcaggtggcggcagcgctcaagcctgcgcccgcgcccgcctcctacccccctgccgccgacggcgcccccagcgcggcaccccccgacggcctgctcgcctctcccgacctggggctgctgaagctggcctcccccgagctcgagcgcctcatcatccagtccaacgggctggtcaccaccacgccgacgagctcacagttcctctaccccaaggtggcggccagcgaggagcaggagttcgccgagggcttcgtcaaggccctggaggatttacacaagcagaaccagctcggcgcgggccgggccgctgccgccgccgccgccgccgccggggggccctcgggcacggccacgggctccgcgccccccggcgagctggccccggcggcggccgcgcccgaagcgcctgtctacgcgaacctgagcagctacgcgggcggcgccgggggcgcggggggcgccgcgacggtcgccttcgctgccgaacctgtgcccttcccgccgccgccacccccaggcgcgttggggccgccgcgcctggctgcgctcaaggacgagccacagacggtgcccgacgtgccgagcttcggcgagagcccgccgttgtcgcccatcgacatggacacgcaggagcgcatcaaggcggagcgcaagcggctgcgcaaccgcatcgccgcctccaagtgccgcaagcgcaagctggagcgcatctcgcgcctggaagagaaagtgaagaccctcaagagtcagaacacggagctggcgtccacggcgagcctgctgcgcgagcaggtggcgcagctcaagcagaaagtcctcagccacgtcaacagcggctgccagctgctgccccagcaccaggtcccggcgtactgagtcgggcatggcggccacctccaaggggcgggctcgcgggggggtgtcgtgggcgccccggacttggagagggtgcggccctccacccccccctccccgagtgtgcccaggaactcagagaggcgcggccccggggattcccccccgaggtgcccaggactcggaaggggcgccccggactcgacaagctggaccccctgctcccgggggcgagcgcatgacccccccgccctcgcgctgcctctttcccccgcgcggccgccccgtgttgcacaaacccgcgcgtctcggctgcccctttgtacaccgcgccgcaagggggctccgagggggcgcacgtcaaaccctgcctttcctttacttttactttttttttttctttggaagagagaagaacagagtgttcgattctgccctatttatgtttctactcggggaacaaacgttggttgtgtgtgtgtgtgttttcttgtgttggttttttaaagaaatgggaagaagaaaaaaaaattctccgcccctttcctcgatctcgctcccccttcggtctttcgaccgtccccccctcccctttttttgttctgttttgttttgttttgctacgagtccacattcctgtttgtaatccttggttcgcccggttttctgttttcagtaaagtctcgttacgcca

SEQ ID NO: 1177 - protein, 347 aa, Homo sapien
METPFYGDEALSGLGGGASGSGGTFASPGRLFPGAPPTAAAGSMMKKDALTLSLSEQVAAALKPAPAPASYPPAADGAPSAAPPDGLLASPDLGLLKLASPELERLIIQSNGLVTTTPTSSQFLYPKVAASEEQEFAEGFVKALEDLHKQNQLGAGRAAAAAAAAAGGPSGTATGSAPPGELAPAAAAPEAPVYANLSSYAGGAGGAGGAATVAFAAEPVPFPPPPPPGALGPPRLAALKDEPQTVPDVPSFGESPPLSPIDMDTQERIKAERKRLRNRIAASKCRKRKLERISRLEEKVKTLKSQNTELASTASLLREQVAQLKQKVLSHVNSGCQLLPQHQVPAY

SEQ ID NO: 1178 - DNA, 3702 bp, Homo sapien
gtttgttagggagtcgtgtgcgtgccttggtcgcttctgtagctccgagggcaggttgcggaagaaagcccaggcggtctgtggcccagaggaaaggcctgcagcaggacgaggacctgagccaggaatgcaggatggcggcggtgaagaaggaagggggtgctctgagtgaagccatgtccctggagggagatgaatgggaactgagtaaagaaaatgtacaacctttaaggcaagggcggatcatgtccacgcttcagggagcactggcacaagaatctgcctgtaacaatactcttcagcagcagaaacgggcatttgaatatgaaattcgattttacactggaaatgaccctctggatgtttgggataggtatatcagctggacagagcagaactatcctcaaggtgggaaggagagtaatatgtcaacgttattagaaagagctgtagaagcactacaaggagaaaaacgatattatagtgatcctcgatttctcaatctctggcttaaattagggcgtttatgcaatgagcctttggatatgtacagttacttgcacaaccaagggattggtgtttcacttgctcagttctatatctcatgggcagaagaatatgaagctagagaaaactttaggaaagcagatgcgatatttcaggaagggattcaacagaaggctgaaccactagaaagactacagtcccagcaccgacaattccaagctcgagtgtctcggcaaactctgttggcacttgagaaagaagaagaggaggaagtttttgagtcttctgtaccacaacgaagcacactagctgaactaaagagcaaagggaaaaagacagcaagagctccaatcatccgtgtaggaggtgctctcaaggctccaagccagaacagaggactccaaaatccatttcctcaacagatgcaaaataatagtagaattactgtttttgatgaaaatgctgatgaggcttctacagcagagttgtctaagcctacagtccagccatggatagcaccccccatgcccagggccaaagagaatgagctgcaagcaggcccttggaacacaggcaggtccttggaacacaggcctcgtggcaatacagcttcactgatagctgtacccgctgtgcttcccagtttcactccatatgtggaagagactgcacaacagccagttatgacaccatgtaaaattgaacctagtataaaccacatcctaagcaccagaaagcctggaaaggaagaaggagattctctacaaagggttcagagccatcagcaagcgtctgaggagaagaaagagaagatgatgtattgtaaggagaagatttatgcaggagtaggggaattctcctttgaagaaattcgggctgaagttttccggaagaaattaaaagagcaaagggaagccgagctattgaccagtgcagagaagagagcagaaatgcagaaacagattgaagagatggagaagaagctaaaagaaatccaaactactcagcaagaaagaacaggtgatcagcaagaagagacgatgcctacaaaggagacaactaaactgcaaattgcttccgagtctcagaaaataccaggaatgactctatccagttctgtttgtcaagtaaactgttgtgccagagaaacttcacttgcggagaacatttggcaggaacaacctcattctaaaggtcccagtgtacctttctccatttttgatgagtttcttctttcagaaaagaagaataaaagtcctcctgcagatcccccacgagttttagctcaacgaagaccccttgcagttctcaaaacctcagaaagcatcacctcaaatgaagatgtgtctccagatgtttgtgatgaatttacaggaattgaacccttgagcgaggatgccattatcacaggcttcagaaatgtaacaatttgtcctaacccagaagacacttgtgactttgccagagcagctcgttttgtatccactccttttcatgagataatgtccttgaaggatctcccttctgatcctgagagactgttaccggaagaagatctagatgtaaagacctctgaggaccagcagacagcttgtggcactatctacagtcagactctcagcatcaagaagctgagcccaattattgaagacagtcgtgaagccacacactcctctggcttctctggttcttctgcctcggttgcaagcacctcctccatcaaatgtcttcaaattcctgagaaactagaacttactaatgagacttcagaaaaccctactcagtcaccatggtgttcacagtatcgcagacagctactgaagtccctaccagagttaagtgcctctgcagagttgtgtatagaagacagaccaatgcctaagttggaaattgagaaggaaattgaattaggtaatgaggattactgcattaaacgagaatacctaatatgtgaagattacaagttattctgggtggcgccaagaaactctgcagaattaacagtaataaaggtatcttctcaacctgtcccatgggacttttatatcaacctcaagttaaaggaacgtttaaatgaagattttgatcatttttgcagctgttatcaatatcaagatggctgtattgtttggcaccaatatataaactgcttcacccttcaggatcttctccaacacagtgaatatattacccatgaaataacagtgttgattatttataaccttttgacaatagtggagatgctacacaaagcagaaatagtccatggtgacttgagtccaaggtgtctgattctcagaaacagaatccacgatccctatgattgtaacaagaacaatcaagctttgaagatagtggacttttcctacagtgttgaccttagggtgcagctggatgtttttaccctcagcggctttcggactgtacagatcctggaaggacaaaagatcctggctaactgttcttctccctaccaggtagacctgtttggtatagcagatttagcacatttactattgttcaaggaacacctacaggtcttctgggatgggtccttctggaaacttagccaaaatatttctgagctaaaagatggtgaattgtggaataaattctttgtgcggattctgaatgccaatgatgaggccacagtgtctgttcttggggagcttgcagcagaaatgaatggggtttttgacactacattccaaagtcacctgaacaaagccttatggaaggtagggaagttaactagtcctggggctttgctctttcagtgagctaggcaatcaagtctcacagattgctgcctcagagcaatggttgtattgtggaacactgaaactgtatgtgctgtaatttaatttaggacacatttagatgcactaccattgctgttctactttttggtacaggtatattttgacgtcactgatattttttatacagtgatatacttactcatggccttgtctaacttttgtgaagaactattttattctaaacagactcattacaaatggttaccttgttatttaacccatttgtctctacttttccctgtacttttcccatttgtaatttgtaaaatgttctcttatgatcaccatgtattttgtaaataataaaatagtatctgttaaaaaaaaaaaaaaaaaaaaaaaaaaaaaaaaaaaaaaaaaaaaaaaaaaaaaa

SEQ ID NO: 1179 - protein, 1050 aa, Homo sapien
MAAVKKEGGALSEAMSLEGDEWELSKENVQPLRQGRIMSTLQGALAQESACNNTLQQQKRAFEYEIRFYTGNDPLDVWDRYISWTEQNYPQGGKESNMSTLLERAVEALQGEKRYYSDPRFLNLWLKLGRLCNEPLDMYSYLHNQGIGVSLAQFYISWAEEYEARENFRKADAIFQEGIQQKAEPLERLQSQHRQFQARVSRQTLLALEKEEEEEVFESSVPQRSTLAELKSKGKKTARAPIIRVGGALKAPSQNRGLQNPFPQQMQNNSRITVFDENADEASTAELSKPTVQPWIAPPMPRAKENELQAGPWNTGRSLEHRPRGNTASLIAVPAVLPSFTPYVEETAQQPVMTPCKIEPSINHILSTRKPGKEEGDSLQRVQSHQQASEEKKEKMMYCKEKIYAGVGEFSFEEIRAEVFRKKLKEQREAELLTSAEKRAEMQKQIEEMEKKLKEIQTTQQERTGDQQEETMPTKETTKLQIASESQKIPGMTLSSSVCQVNCCARETSLAENIWQEQPHSKGPSVPFSIFDEFLLSEKKNKSPPADPPRVLAQRRPLAVLKTSESITSNEDVSPDVCDEFTGIEPLSEDAIITGFRNVTICPNPEDTCDFARAARFVSTPFHEIMSLKDLPSDPERLLPEEDLDVKTSEDQQTACGTIYSQTLSIKKLSPIIEDSREATHSSGFSGSSASVASTSSIKCLQIPEKLELTNETSENPTQSPWCSQYRRQLLKSLPELSASAELCIEDRPMPKLEIEKEIELGNEDYCIKREYLICEDYKLFWVAPRNSAELTVIKVSSQPVPWDFYINLKLKERLNEDFDHFCSCYQYQDGCIVWHQYINCFTLQDLLQHSEYITHEITVLIIYNLLTIVEMLHKAEIVHGDLSPRCLILRNRIHDPYDCNKNNQALKIVDFSYSVDLRVQLDVFTLSGFRTVQILEGQKILANCSSPYQVDLFGIADLAHLLLFKEHLQVFWDGSFWKLSQNISELKDGELWNKFFVRILNANDEATVSVLGELAAEMNGVFDTTFQSHLNKALWKVGKLTSPGALLFQ

SEQ ID NO: 1180 - DNA, 2979 bp, Homo sapien
agcaaaccaatcgcaagcctcgttgagtggaaggggtgggatcttccccggaagttttggttaaagcccctccaatcagcggctcggtgcggcaagtttgaatttcgtggaggctcgggttgtgagggttcctgcttcggagtcggcggtggtcgtccagaccgagtgttctttactttttgtttggttgaggtttcacgctagaaggtggctcaggatgtcttcatcacattttgccagtcgacacaggaaggatataagtactgaaatgattagaactaaaattgctcataggaaatcactgtctcagaaagaaaatagacataaggaatacgaacgaaatagacactttggtttgaaagatgtaaacattccaaccttggaaggtagaattcttgttgaattagatgagacatctcaagagcttgttccagaaaagaccaatgttaagccaagggcaatgaaaactattctaggtgatcaacgaaaacagatgctccaaaaatacaaagaagaaaagcaacttcaaaaattgaaagagcagagagagaaagctaaacgaggaatatttaaagtgggtcgttatagacctgatatgccttgttttcttttatcaaaccagaatgctgtgaaagctgagccaaaaaaggctattccatcttctgtacggattacaaggtcaaaggccaaagaccaaatggagcagactaagattgataacgagagtgatgttcgagcaatccgacctggtccaagacaaacttctgaaaagaaagtgtcagacaaagagaaaaaagttgtgcagcctgtaatgcccacgtcgttgagaatgactcgatcagctactcaagcagcaaagcaggttcccagaacagtctcatctaccacagcaagaaagccagtcacaagagctgctaatgaaaacgaaccagaaggaaaggtgccaagtaaaggaagacctgccaaaaatgtagaaacaaaacccgacaagggtatttcttgtaaagtcgatagtgaagaaaatactttgaattcacaaactaatgcaacaagtggaatgaatccagatggagtcttatcaaaaatggaaaacttacctgagataaatactgcaaaaataaaagggaagaattccttcgcacctaaggattttatgtttcagccactggatggtctgaagacctatcaagtaacacctatgactcccagaagtgccaatgcttttttgacacccagttacacctggactcctttaaaaacagaagttgatgagtctcaagcaacaaaagaaattttggcacaaaaatgtaaaacttactctaccaagacaatacagcaagattcaaataaattgccatgtcctttgggtcctctaactgtttggcatgaagaacatgttttaaataaaaatgaagctactactaaaaatttaaatggccttccaataaaagaagtcccatcacttgaaagaaatgaaggtcgaattgctcagccccaccatggtgtgccatatttcagaaatatcctccagtcagaaactgagaaattaacttcacattgcttcgagtgggacaggaaacttgaattggacattccagatgatgctaaagatcttattcgcacagcagttggtcaaacaagactccttatgaaggaaaggtttaaacagtttgaaggactggttgatgattgtgaatataaacgaggtataaaggagactacctgtacagatctggatggattttgggatatggttagttttcagatagaagatgtaatccacaaattcaacaatctgatcaaacttgaggaatctgggtggcaagtcaataataatatgaatcataatatgaacaaaaatgtctttaggaaaaaagttgtctcaggtatagcaagtaaaccaaaacaggatgatgctggaagaattgcagcgagaaatcgcctagctgccataaaaaatgcaatgagagagagaattaggcaggaagaatgtgctgaaacagcagtttctgtgataccaaaggaagttgataaaatagtgttcgatgctggatttttcagagttgaaagtcctgttaaattattctcaggactttctgtctcttctgaaggcccttctcaaagacttggaacacctaagtctgtcaacaaagctgtatctcagagtagaaatgagatgggcattccacaacaaactacatcaccagaaaatgccggtcctcagaatacgaaaagtgaacatgtgaagaagactttgtttttgagtattcctgaaagcaggagcagcatagaagatgctcagtgtcctggattaccagatttaattgaagaaaaccatgttgtaaataagacagacttgaaggtggattgtttatccagtgagagaatgagtttgcctcttcttgctggtggagtagcagatgatattaatactaacaaaaaagaaggaatttcagatgttgtggaaggaatggaactgaattcttcaattacatcacaggatgttttgatgagtagccctgaaaaaaatacagcttcacaaaatagcatcttagaagaaggggaaactaaaatttctcagtcagaactatttgataataaaagtctcactactgaatgccaccttcttgattcaccaggtctaaactgcagtaatccatttactcagctggagaggagacatcaagaacatgccagacacatttcttttggtggtaacctgattactttttcacctctacaaccaggagaattttgaatttaaaaataaatccaaacattttccttcatattatcaatgcttatatattccttagactattgaaattttggagaaaatgtatttgtgttcacttctatagcatataatgttttaatattctgtgttcatcaaagtgtattttagatatactctttctcaagggaagtggggatattttgtacattttcaacacagaataaaaaatgtactgtgccttg

SEQ ID NO: 1181 - protein, 846 aa, Homo sapien
MSSSHFASRHRKDISTEMIRTKIAHRKSLSQKENRHKEYERNRHFGLKDVNIPTLEGRILVELDETSQELVPEKTNVKPRAMKTILGDQRKQMLQKYKEEKQLQKLKEQREKAKRGIFKVGRYRPDMPCFLLSNQNAVKAEPKKAIPSSVRITRSKAKDQMEQTKIDNESDVRAIRPGPRQTSEKKVSDKEKKVVQPVMPTSLRMTRSATQAAKQVPRTVSSTTARKPVTRAANENEPEGKVPSKGRPAKNVETKPDKGISCKVDSEENTLNSQTNATSGMNPDGVLSKMENLPEINTAKIKGKNSFAPKDFMFQPLDGLKTYQVTPMTPRSANAFLTPSYTWTPLKTEVDESQATKEILAQKCKTYSTKTIQQDSNKLPCPLGPLTVWHEEHVLNKNEATTKNLNGLPIKEVPSLERNEGRIAQPHHGVPYFRNILQSETEKLTSHCFEWDRKLELDIPDDAKDLIRTAVGQTRLLMKERFKQFEGLVDDCEYKRGIKETTCTDLDGFWDMVSFQIEDVIHKFNNLIKLEESGWQVNNNMNHNMNKNVFRKKVVSGIASKPKQDDAGRIAARNRLAAIKNAMRERIRQEECAETAVSVIPKEVDKIVFDAGFFRVESPVKLFSGLSVSSEGPSQRLGTPKSVNKAVSQSRNEMGIPQQTTSPENAGPQNTKSEHVKKTLFLSIPESRSSIEDAQCPGLPDLIEENHVVNKTDLKVDCLSSERMSLPLLAGGVADDINTNKKEGISDVVEGMELNSSITSQDVLMSSPEKNTASQNSILEEGETKISQSELFDNKSLTTECHLLDSPGLNCSNPFTQLERRHQEHARHISFGGNLITFSPLQPGEF

SEQ ID NO: 1182 - DNA, 3305 bp, Homo sapien
  Unsure 844: Unknown base
cttccgagggggtgagtggcttcaccgccggtcccttgcagcgctgcctttcgatctctccacatctcggtggcgcgggatctcaagatgcgcctccacctgctcctgctgctcgcgctgtgcggtgcaggcaccaccgccgcggagctcagttacagcttgcgtggcaactggagcatctgcaatgggaacggctcgctggagctgcccggggcggtccctggctgcgtgcacagcgccttgttccagcagggcctgatccaggattcttactacagatttaatgaccttaaccacagatgggtctctttggataactggacctatagcaaagaatttaaaatcccctttgaaattagcaaatggcaaaaagtaaatttgattcttgagggagtggatacggtttcaaaaatcctgttcaatgaagtcactattggggaaacagacaatatgttcaatagatatagctttgatattaccaacgtggtcagggacgtgaactccattgagctgcgtttccagtcagcggtgttgtatgcagcacagcagagcaaagctcacactcsctaccaggttcccccagactgccctccacttgtgcagaagggtgaatgccatgtcaactttgttcggaaggagcaatgttcctttagttgggactgggggccttcctttcctacccagggaatctggaaagatgttagaattgaagcctataatatttgtcacctgaactacttcacattttccccaatatatgataagagtgcccaggagtggaatctggaaatagagtctacatttgatgttgtcagctcaaagccagttggtggtcaagtgatcntagccatccctaagttgcaaacacaacagacatacagcattgaacttcaacctgggaaaaggattgttgagctatttgtgaacattagcaagaatattactgtagaaacttggtggcctcatggacatggaaaccagactgggtacaacatgactgttctttttgaactggatggaggcttaaatattgaaaaatcagctaaggtttattttaggacagtggaacttatagaagagcctataaaagggtctcctggtttgagtttctatttcaaaattaatggatttcccatatttctaaaaggctcaaactggatcccagcagattcattccaggaccgagtaacctctgagttgttacggctccttttacagtctgttgtggatgctaatatgaatactcttcgggtttggggaggaggaatttatgagcaggatgaattctatgaactctgtgatgaactaggaataatggtatggcaggattttatgtttgcctgtgccctttatccaactgatcagggcttcctggattcagtgacagcagaagttgcctaccagatcaagagactgaaatctcatccttctatcatcatatggagtggcaataatgaaaatgaggaggcgctgatgatgaattggtatcatatcagtttcactgaccggccaatctacatcaaggactatgtgacactctatgtgaaaaacatcagagagctcgtactggcaggagacaagagtcgtccttttattacgtccagtcctacaaatggggctgaaactgttgcagaagcctgggtctctcaaaaccctaatagcaattattttggtgatgtacatttttatgactatatcagtgattgctggaactggaaagttttcccaaaagctcgatttgcatctgaatatggatatcagtcctggccgtccttcagtacattagaaaaggtctcgtctacagaggactggtctttcaatagcaagttttcacttcatcgacaacatcacgaaggtggtaacaaacaaatgctttatcaggctggacttcatttcaaactcccccaaagcacagatccattacgcacatttaaagataccatctaccttactcaggtgatgcaggcccagtgtgtcaaaacagaaactgaattctaccgccgtagtcgcagcgagatagtggatcagcaagggcacacgatgggggcactttattggcagttgaatgacatctggcaagctccttcctgggcttctcttgagtacggaggaaagtggaaaatgcttcattactttgctcagaatttctttgctccactgttgccagtaggctttgagaatgaaaacacgttctatatctatggtgtgtcagatcttcactcggattattcgatgacactcagtgtgagagtccatacatggagctccctggagcccgtgtgctctcgtgtgactgaacgttttgtgatgaaaggaggagaggctgtctgcctttatgaggagccagtgtctgaattgctgaggagatgtgggaattgcacacgggaaagctgtgtggtttccttttacctttcagctgaccatgaactcctgagcccgaccaactaccacttcttgtcctcaccgaaggaggccgtggggctctgcaaggcgcagatcactgccatcatctctcagcaaggtgacatatttgtttttgacctggagacctcagctgtcgctccctttgtttggttggatgtaggaagcatcccagggagatttagtgacaatggtttcctcatgactgagaagacacgaactatattattttacccttgggagcccaccagcaagaatgagttggagcaatcttttcatgtgacctccttaacagatatttactgaaggaatctaggttgtattttcagtggacaatgggaataaagcatttctaaagcaccgactggagaggaaggcaacagagacaaggagagaagccgagagacatgtctgcgtgctgccacgcatttgagcgattgctctgtgaagagttgtacactgaacacttccaggggaggctgtttacccaggcaatgtcctcaaacaagcctgtgccggggtgtcctggaatctgtgccaggactgtgtttttagcccttcacctctcagctttagcaggacatgaaccagttataacaagatggccctgcagctggttacaagaatgtgacatggcaggatctatggaaccaaatggaaggttttgaggtgatgtaggtctttcacagctagctttggggaatacggaatactcaaataaagtgctttgttattatttcagagggaatggcgattgaaatgttacaacagagatttcttggtggtagctatttgggtaaaggtatatgggtatttttctgtacatgtgaaattatataaaaataaaagttatataaattacattgacaactaaaaaaaaaaaa

SEQ ID NO: 1183 - protein, 879 aa, Homo sapien
  unsure 160: unknown amino acid
  unsure 253: unknown amino acid
MRLHLLLLLALCGAGTTAAELSYSLRGNWSICNGNGSLELPGAVPGCVHSALFQQGLIQDSYYRFNDLNHRWVSLDNWTYSKEFKIPFEISKWQKVNLILEGVDTVSKILFNEVTIGETDNMFNRYSFDITNVVRDVNSIELRFQSAVLYAAQQSKAHTXYQVPPDCPPLVQKGECHVNFVRKEQCSFSWDWGPSFPTQGIWKDVRIEAYNICHLNYFTFSPIYDKSAQEWNLEIESTFDVVSSKPVGGQVIXAIPKLQTQQTYSIELQPGKRIVELFVNISKNITVETWWPHGHGNQTGYNMTVLFELDGGLNIEKSAKVYFRTVELIEEPIKGSPGLSFYFKINGFPIFLKGSNWIPADSFQDRVTSELLRLLLQSVVDANMNTLRVWGGGIYEQDEFYELCDELGIMVWQDFMFACALYPTDQGFLDSVTAEVAYQIKRLKSHPSIIIWSGNNENEEALMMNWYHISFTDRPIYIKDYVTLYVKNIRELVLAGDKSRPFITSSPTNGAETVAEAWVSQNPNSNYFGDVHFYDYISDCWNWKVFPKARFASEYGYQSWPSFSTLEKVSSTEDWSFNSKFSLHRQHHEGGNKQMLYQAGLHFKLPQSTDPLRTFKDTIYLTQVMQAQCVKTETEFYRRSRSEIVDQQGHTMGALYWQLNDIWQAPSWASLEYGGKWKMLHYFAQNFFAPLLPVGFENENTFYIYGVSDLHSDYSMTLSVRVHTWSSLEPVCSRVTERFVMKGGEAVCLYEEPVSELLRRCGNCTRESCVVSFYLSADHELLSPTNYHFLSSPKEAVGLCKAQITAIISQQGDIFVFDLETSAVAPFVWLDVGSIPGRFSDNGFLMTEKTRTILFYPWEPTSKNELEQSFHVTSLTDIY

SEQ ID NO: 1184 - DNA, 1731 bp, Homo sapien
gggggaggctgtgatgggttgacaggtgcgtgacagtgggagctgctctcggcacaagcatgtacggcaaaggcaagagtaacagcagcgccgtcccgtccgacagccaggcccgggagaagttagcactctacgtatatgaatatctgctccatgtaggagctcagaaatcagctcaaacatttttatcagagataagatgggaaaaaaacatcacattgggggaaccaccaggattcttacattcttggtggtgtgtattttgggatctctactgtgcagctccagagagacgtgaaacatgtgaacactcaagtgaagcaaaagccttccatgattacagtgctgcagcagctcccagtccagtgctaggaaacattcccccaggagatggcatgccagtaggtcctgtaccaccagggttctttcagccttttatgtcacctcggtaccctggaggtccaaggcccccattgaggatacctaatcaggcacttggaggtgtcccaggaagtcagccattactccccagaggaatggatccaactcgacaacaaggacatccaaatatgggtgggccaatgcagagaatgactcctccaagaggaatggtgcccttaggaccacagaactatggaggtgcaatgagacccccactgaatgctttaggtggccctggaatgcctggaatgaacatgggtccaggtggtggtagaccttggccaaacccaacaaatgccaattcaataccatactcctcagcatctcctgggaattatgtaggtcctccaggaggtggagggccaccaggaacacccatcatgcctagtccagcagattcaaccaactctggtgataacatgtatactttaatgaatgcagtacctcctggacctaacagacctaattttccaatgggccctgggtcagatggtcccatgggtggattaggaggaatggagtcacatcacatgaatggctctttaggctcaggagatatggacagtatttccaagaattctcccaataatatgagcctgagtaatcaaccgggcactccaagggatgatggcgaaatggggggaaatttcttaaatccttttcagagtgagagttactcccctagcatgacaatgagcgtgtgatccattaccaagtctcctcatgaaaaccacagtgagtcagcccttcacagaactactacggaagaaaattattcatcacagtgtacagttaaacaaaggaatctcagtcacaccaaaccaaccttttcatttcctgctctctcccctcttttgtgaagaaagcgggtccagatgtgattcaaacaactgtacggagtggcatattagaattgccctaaactgaactgcaaataattatgtgtgtatgtatatgtgtgggaaagagaatgtactgtatatgtgtatgttatacagacatatacacatacatacattgacccacaggacattgtaaaatattatcacatgacatcttaagtagaaataagtagggacttttattccatcctttttttcacgtttacattttaattattacaagttgctcctgccccctccctgaactattttgtgctgtgtatatcactgctttatataagttattttttaaggtgaactcagatgttatggttttgtatatgtctgcaatcatggataggaataaaatcgcttatttgagagctttcaaaaaaaaaaaaaaaaaaac

SEQ ID NO: 1185 - protein, 361 aa, Homo sapien
MYGKGKSNSSAVPSDSQAREKLALYVYEYLLHVGAQKSAQTFLSEIRWEKNITLGEPPGFLHSWWCVFWDLYCAAPERRETCEHSSEAKAFHDYSAAAAPSPVLGNIPPGDGMPVGPVPPGFFQPFMSPRYPGGPRPPLRIPNQALGGVPGSQPLLPRGMDPTRQQGHPNMGGPMQRMTPPRGMVPLGPQNYGGAMRPPLNALGGPGMPGMNMGPGGGRPWPNPTNANSIPYSSASPGNYVGPPGGGGPPGTPIMPSPADSTNSGDNMYTLMNAVPPGPNRPNFPMGPGSDGPMGGLGGMESHHMNGSLGSGDMDSISKNSPNNMSLSNQPGTPRDDGEMGGNFLNPFQSESYSPSMTMSV

SEQ ID NO: 1186 - DNA, 3694 bp, Homo sapien
gctccgggccgcgctgcccgcgctcctgctgccgttgctgggcctcgccgctgctgccgtcgcggactgtccttcatctacttggattcagttccaagacagttgttacatttttctccaagaagccatcaaagtagaaagcatagaggatgtcagaaatcagtgtactgaccatggagcggacatgataagcatacataatgaagaagaaaatgcttttatactggatactttgaaaaagcaatggaaaggcccagatgatatcctactaggcatgttttatgacacagatgatgcgagtttcaagtggtttgataattcaaatatgacatttgataagtggacagaccaagatgatgatgaggatttagttgacacctgtgcttttctgcacatcaagacaggtgaatggaaaaaaggaaattgtgaagtttcttctgtggaaggaacactatgcaaaacagctatcccatacaaaaggaaatatttatcagataaccacattttaatatcagcattggtgattgctagcacggtaattttgacagttttgggagcaatcatttggttcctgtacaaaaaacattctgattctcgtttcaccacagttttttcaaccgcaccccaatcaccttataatgaagactgtgttttggtagttggagaagaaaatgaatatcctgttcaatttgactaagtttttggtaatcttgcactaagacatcaacaaatgccctggcagagataacttgggaaagattttaatataaaacttgacattggatattagagctttaatggtattccttattccagtaacatttttatgtactcatctgctgtgaaaagtctttaggttcattaaaaaaacaggttttagaaatgatcttagatctaatatagtgattttaagcatcccgtcaaaggcagaatctgtcacttgaatgaaggaaagcttaaagcccaagcagataaaaataaaagcccagcctatttgtcttgcctgctgtatcttccctatttagttgacccactttagtttatatgtttattagtaaacatgaaatggggaataagtgattttaagtacatcccatacatttaaatatctttgataattgttatttttttggcagataattcctctagaatgtgtatctttttatgatttagatgaagaaaattttacaacttttaacaccccacaccaattttagtttcattacttttacacacaccattttatcacaaatgactcaagttttaatgaatgtttataaattatttgaaacaaaatatgatcgctgtgtccaggatggcatagagaaagctggcaattaggttaacacttacatattatagtgcccctttaaggatttctctcttgccaccataccttttgtactttcccctatacaagatgtatctcattctcctcaagcatttataaatttttccttcaatgacatgaaaactgtgcaagcaaaaaccgaagaaaaacacttaagtacaactgtagtgacagtgatcaaagttttcagtgcatttattgtacattttaagaaaaaggtgaaaatcatttggggagtaaaaaaatgaaaaagctgaaacgagtaattttcctcaccatcaataaaccaaaaacaggaaagataaagaatgtataaatttcacgtaaattagtcacgtatcacttatcaatggggatacgttctaagaaatgcatagttagggaatcttgtgtgaaaatcagcttgtatttacacaaacccagatggtagagcctattttgtcccaaacctacacagcatgttactgtgctgaatactgcagacaattgtaacacaatatttgtgtatctaaatatagaaaaggtacagtaaaaatatggtctactaaggaaacactgttctatatgtggtccattactgactgaagtatactgtctagaagtctgaggctcaaagaaaagtaatccctcttctgaatccacaccccatcaattatcttactttcttctggggagatagatagatatactatctcactagcttgactaatggcaacaaagttccagcttgtgtagtctctttttattgaccacatgaatcgaaaacactcatcacaattaatggcactatcattaatgagacatgagtaactaaaaagtgatagaaaactattacagtgcggctacatggtactgaaaatgcaggcattacaccagctgttacacaagcacaagcatgctctgtaagagctttacatttctgagattttgtatagtgattgagatgtctattttattattgatagactattactaatgtcaatattgaacactaccctggaattcctgcctggttttcctacccaaattgtaccactccttgaagaactacaggcacagtaaaaaaatatggcgtattatgtgaactaaaagagttctaaaggagttcttaaaggagtggtagaatttgggtaggaaagtgattaagtccaacttaaaaccaacagtctcaaacgtctacaactacaatgtccaatgagccactagccacatgaggctatttaagtaaatttagtttaaaatccagttttcgaattacattagccacattgtcaagtgttcaaatcacaggtggttagtggctactgtactgggcaacatacattatagaacattttcattataggaagttttattgggcagtgctgctcttaaatcctaccttccactcaactcccatacaactttcttttgtacattttgatactttctacctaatggcagctcttccaaaatagctgctttaaactctgatttaattttcaatatttggtttcatttttcaacaggccaagaggcctctggtaatgaagtgctatatatatatatatatgacggagtctcactgtgctgcccaggctacagtgcagtggctcgatcttggctctctccaatctccgccttgcaggttttcaagcaattctcctgcctcagcctccttagtagctgggaccacagacatctgtcaccacacccagctaactttttgtatttttggtagagacggggtttcgccatattgactgggctggtctcaaactcctgacctcaagtgatccacccaccttggtctcccaaagtgctgggattacatgcgtgagccaccacacttggcctacattttttctttatataccagaacatctataacaggcaccttatctactcattagtgaagagataattggattacacaggcaggcttgtttactacatccagaatgtagaaactgctttcttcaacatcttggttctagctagtaataacaatataattctttggcagatattcagaataacattttaaactacattttcttagaaaattgcattcttgtagtgagcagtgtatggtctcttttgttcagaatttaaaactgataaccaatgaaagccttttctcttattcctctaccgtcatttacatgataatctgaagctaatatgacaatatttaaatactaagtggtactagggaactacaagaatactgtaaagcttaagccattgttatcactgtcatttagcatttaataacaaaactatacagaattatgtgcataccaatgaatgttttgtaccatctagttaaattttttaaataaagttttatgggttaagcag

SEQ ID NO: 1187 - protein, 170 aa, Homo sapien
MISIHNEEENAFILDTLKKQWKGPDDILLGMFYDTDDASFKWFDNSNMTFDKWTDQDDDEDLVDTCAFLHIKTGEWKKGNCEVSSVEGTLCKTAIPYKRKYLSDNHILISALVIASTVILTVLGAIIWFLYKKHSDSRFTTVFSTAPQSPYNEDCVLVVGEENEYPVQFD

SEQ ID NO: 1188 - DNA, 1117 bp, Homo sapien
aacggtgcgctggagcgagtgagcagcgatacctagggcggaagtgctctcggcggaagtgatcgctgtgtgaatcgtgggtgggatggccgcgggccgcctctttctaagtcggcttcgagcacccttcagttccatggccaagagcccactcgagggcgtttcctcctccagaggcctgcacgcggggcgcgggccccgaaggctctccatcgaaggcaacattggtaacatcctcaagcaaatcagaatgagagcacccattcaggaaacctgaacagggaaggtgaacccctgtcctgaccaaaattgggcctgcactgcccaaagtcttggaaacttgctggatatgatgtaccgggagccagcacgatggtcctacacattccagacattttcctttttgagccgcctgaaagtacagctggagcccttccctgagaaactcttacaggccaggaagccagtacagatctttgagaggtctgtgtacagtgacaggtatatctttgcaaagaatctttttgaaaatggttccctcagtgacatcgagtggcatatctatcaggactggcattcttttctcctgtgggagtttgccagccggatcacattacatggcttcatctacctccaggcttctccccaggtttgtttgaagagactgtaccagagggccagggaggaggagaaaggaattgagctggcctatctagagcagctgcatggccaacacgaagcctggcttattcacaagacaacgaagctccactttgaggctctgatgaacattccagtgctggtgttggatgtcaatgatgatttttctgaggaagtaaccaaacaagaagacctcatgagagaggtaaacacctttgtaaagaatctgtaaccaataccatgaagttcaggctgtgatctgggctccctgactttctgaagctagaaaaatgttgtgtctcccaaccacctttccatccccagcccctctcatccctggagcactctgccgctcaagagctggtttgttaattattgttagactttgccattgttttcttttgtacctgaagcattttgaaaataaagtttacttaagttatgcttgtttttctaa

SEQ ID NO: 1189 - protein, 189 aa, Homo sapien
MAAGRLFLSRLRAPFSSMAKSPLEGVSSSRGLHAGRGPRRLSIEGNIAVGKSTFVKLLTKTYPEWHVATEPVATWQNIQAAGTQKACTAQSLGNLLDMMYREPARWSYTFQTFSFLSRLKVQLEPFPEKLLQARKPVQIFERSVYSDRLHFEALMNIPVLVLDVNDDFSEEVTKQEDLMREVNTFVKNL

SEQ ID NO: 1190 - DNA, 1395 bp, Homo sapien
cacagggccgctcagaggccgccgcaatgctcccctctttgcaggagtcgatggatggagatgaaaaggaactagagagcagcgaagagggaggctcagccgaggagcggagactcgagccgccgtccagcagccactactgtctttacagctatcgcggaagcagattggcacagcaacgaggggacagtgaggacggaagcccaagtggcacaaatgcagaaactccctctggtgatgatttcagcctctccttggcagatactaatctaccatccgaagtggagccagagctgcgcagtttcattgctaagcgtctttcaagaggtgcagtctttgaagggctgggtaatgttgcatctgtggagctaaaaattccaggttaccgagttggttgttattactgccttttccaaaatgaaaaactgcttcctgaaacagtaacgatagactctgaacgtaacccttcagaatatgtggtctgttttttaggagggtctgaaaaaggacttgagcttttcaggcttgaattggacaagtacattcaagggctgaaaaataacatgaattgtgaggcaaggggcctggagagtcacataaaatcctatctgagcagctggtttgaggatgttgtatgcccaatccaaagggttgttcttctctttcaggaaaagcttacctttctgctacatgctgctttgagttacactcctgttgaagttaaagaatcagatgaaaaaacaaagagagacattaacaggtttctgagtgtggccagtcttcaaggacttattcatgaaggcaccatgacttctttgtgcatggccatgacagaggagcagcataagtctgtggtcatcgattgcagcagctcccagcctcagttctgcaatgcaggaagtaaccggttttgtgaggattggatgcaagcttttttaaatggtgccaaaggaggtaaccctttttttttccgacaagtactggagaactttaaactaaaggccatacaagacacaaacaatttgaagagatttatccgacaggcagaaatgaatcattatgctttgtttaaatgttacatgttcctaaagaactgtggtagtggagatacttttgaagattgttaaagtggaacatgaagaaatgcctgaagccaaaaatgtgatagctgtccttgaagaattcatgaaagaagctcttgaccaaagtttttgatcatatgttttgagataattgtatgatcaagttgtatatttaagtcttagtgtttgaaattgcagttataattgttcataggattgctatttaagatgatttgaaactcaatccagattttctttttgtattttaccaatttaacttaaataaaaatctgaagaacaaaaaaaaaaaaaa

SEQ ID NO: 1191 - protein, 366 aa, Homo sapien
MLPSLQESMDGDEKELESSEEGGSAEERRLEPPSSSHYCLYSYRGSRLAQQRGDSEDGSPSGTNAETPSGDDFSLSLADTNLPSEVEPELRSFIAKRLSRGAVFEGLGNVASVELKIPGYRVGCYYCLFQNEKLLPETVTIDSERNPSEYVVCFLGGSEKGLELFRLELDKYIQGLKNNMNCEARGLESHIKSYLSSWFEDVVCPIQRVVLLFQEKLTFLLHAALSYTPVEVKESDEKTKRDINRFLSVASLQGLIHEGTMTSLCMAMTEEQHKSVVIDCSSSQPQFCNAGSNRFCEDWMQAFLNGAKGGNPFFFRQVLENFKLKAIQDTNNLKRFIRQAEMNHYALFKCYMFLKNCGSGDTFEDC

SEQ ID NO: 1192 - DNA, 4502 bp, Homo sapien
agggggcgggagggcgtggggggagggtctcgctctcccgactaccagagcccgagggagaccctggcggcggcggcggcgcctgacactcggcgcctcctgccgtgctccggggcggcatgtccgaggctggcggggccgggccgggcggctgcggggcaggagccggggcaggggccgggcccggggcgctgcccccgcagcctgcggcgcttccgcccgcgcccccgcagggctccccctgcgccgctgccgccgggggctcgggcgcctgcggtccggcgacggcagtggctgcagcgggcacggccgaaggaccgggaggcggtggctcggcccgaatcgccgtgaagaaagcgcaactacgctccgctccgcggggccaagaaactggagaaactcggagtgtactccgcctgcaaggccgaggagtcttgtaaatgtaatggctggaaaaaccctaacccctcacccactccccccagagccgacctgcagcaaataattgtcagtctaacagaatcctgtcggagttgtagccatgccctagctgctcatgtttcccacctggagaatgtgtcagaggaagaaatgaacagactcctgggaatagtattggatgtggaatatctctttacctgtgtccacaaggaagaagatgcagataccaaacaagtttatttctatctatttaagcttttgagaaagtctattttacaaagaggaaaacctgtggttgaaggctctttggaaaagaaacccccatttgaaaaacctagcattgaacagggtgtgaataactttgtgcagtacaaatttagtcacctgccagcaaaagaaaggcaaacaatagttgagttggcaaaaatgttcctaaaccgcatcaactattggcatctggaggcaccatctcaacgaagactgcgatctcccaatgatgatatttctggatacaaagagaactacacaaggtggctgtgttactgcaacgtgccacagttctgcgacagtctacctcggtacgaaaccacacaggtgtttgggagaacattgcttcgctcggtcttcactgttatgaggcgacaactcctggaacaagcaagacaggaaaaagataaactgcctcttgaaaaacgaactctaatcctcactcatttcccaaaatttctgtccatgctagaagaagaagtatatagtcaaaactctcccatctgggatcaggattttctctcagcctcttccagaaccagccagctaggcatccaaaacagttatcaatccacctcctgtggctgggacaatttcatacaattcaacctcatcttcccttgagcagccaaacgcagggagcagcagtcctgcctgcaaagcctcttctggacttgaggcaaacccaggagaaaagaggaaaatgactgattctcatgttctggaggaggccaagaaaccccgagttatgggggatattccgatggaattaatcaacgaggttatgtctaccatcacggaccctgcagcaatgcttggaccagagaccaattttctgtcagcacactcggccagggatgaggcggcaaggttggaagagcgcaggggtgtaattgaatttcacgtggttggcaattccctcaaccagaaaccaaacaagaagatcctgatgtggctggttggcctacagaacgttttctcccaccagctgccccgaatgccaaaagaatacatcacacggctcgtctttgacccgaaacacaaaacccttgctttaattaaagatggccgtgttattggtggtatctgtttccgtatgttcccatctcaaggattcacagagattgtcttctgtgctgtaacctcaaatgagcaagtcaagggctatggaacacacctgatgaatcatttgaaagaatatcacataaagcatgacatcctgaacttcctcacatatgcagatgaatatgcaattggatactttaagaaacagggtttctccaaagaaattaaaatacctaaaaccaaatatgttggctatatcaaggattatgaaggagccactttaatgggatgtgagctaaatccacggatcccgtacacagaattttctgtcatcattaaaaagcagaaggagataattaaaaaactgattgaaagaaaacaggcacaaattcgaaaagtttaccctggactttcatgttttaaagatggagttcgacagattcctatagaaagcattcctggaattagagagacaggctggaaaccgagtggaaaagagaaaagtaaagagcccagagaccctgaccagctttacagcacgctcaagagcatcctccagcaggtgaagagccatcaaagcgcttggcccttcatggaacctgtgaagagaacagaagctccaggatattatgaagttataaggttccccatggatctgaaaaccatgagtgaacgcctcaagaataggtactacgtgtctaagaaattattcatggcagacttacagcgagtctttaccaattgcaaagagtacaacccccctgagagtgaatactacaaatgtgccaatatcctggagaaattcttcttcagtaaaattaaggaagctggattaattgacaagtgattttttttcccctctgcttcttagaaactcaccaagcagtgtgcctaaagcaaggtggtttagttttttacaaagaattggacatgatgtattgaagagacttgtaaatgtaataattagcacttttgaaaaaacaaaaaacctccttttagcttttcagatatgtatttaaattgaagtcataggacatttttattttatggaatagattttaatctatttactactattaaggtaaattttctatggcatgtccattagctatttcatgatagatgattaggggtttcctcaaaacctgtgtgtgaggaaattgcacacagtagcaaaatttggggaaatccataacattttcagaccatgaatgaatgtttccatttttttctaatggaatgtgagagtttacttttattttattctgaaggactttaaggaagggatacatgattttaaaaaagcctgtaagaggtgaaatatgtgatgtttgaagtctctttatagactttttatatatattttttaaaacactcatctagatgaggtgctttgagcagttctgaaaaatgcagttccaggaaagcaactgctttggttcctaaggaagaaattctaaataatgcaaacttttaaaataagcatctaggtttttgataattctgtctacttacaacaaacttgttagtacataaccactattttaataattattttctctacacaaatgtgtaatatcatatttgactttgcttatgcaggccataagttccaaaagataatttccctgcccacaaaggcataaacttgaaaacacatgagattgaatcaacatgctttaataggaaaagatgtatggtctatatatgtatcaatctggtgaatcctcgttctaataaaggttctttttcttttctatgatacacacagccacgctgataatatgcaaatgaacattttcctttatgtctctccagataatgtttattgtctgaggtaaattaaattcccaccagggtttgctgtcagtattttaacacccacattagtatatgcgtccagggtcataaccccctaaaatccatcatgcaaccttattaatctgtcttgggattccagtttagtgcttggatttatttcctgattacactacatagaaaagtgagacatctgccattcccaactctgggaaaaccaactaatatacaaccatataaatgaaggccatcttgatggtctcaacactaatttttatgatgcaaatttatacactgatttttgtaaaggacaaagttttaaaagcgtatttaacttgatgttttctatcagcataaataaaatggtcatgaatagtcattaaaaacagttgccagtgataatctgcatgaaggaaaaagaaccctgcaaatggctattgagttggaagtattgtttttgatatgtaagagatattcagaatgctcacactgaaaatgcctcaactttttaaagtgtaagaaaccaccatgagtggtgtctagatttctaatgaagaatcatgatacagtttggattaagtatcttggactggttttaaacagtgctttgtaccggatctgctgaagcatctgtccagctggtatcctgtgaaagtttgttattttctgagtagacattcttatagagtattgtctttaaaatcagattgtctcttctatattgaaagcatttttatgttttctaatttaaaaattaatattttcttatagatattgtgcaataaagctgaagtagaatgtgtggtttttgcaaatgctttaacagctgataaaaattttacatttgtaaaattaatatattgtactggtacaaaatagttttaaattatattttaaaaagcttccaaaaa

SEQ ID NO: 1193 - protein, 872 aa, Homo sapien
GGGRAWGEGLALPTTRARGRPWRRRRRLTLGASCRAPGRHVRGWRGRAGRLRGRSRGRGRARGAAPAACGASARAPAGLPLRRCRRGLGRLRSGDGSGCSGHGRRTGRRWLGPNRRERKRNYAPLRGAKKLEKLGVYSACKAEESCKCNGWKNPNPSPTPPRADLQQIIVSLTESCRSCSHALAAHVSHLENVSEEEMNRLLGIVLDVEYLFTCVHKEEDADTKQVYFYLFKLLRKSILQRGKPVVEGSLEKKPPFEKPSIEQGVNNFVQYKFSHLPAKERQTIVELAKMFLNRINYWHLEAPSQRRLRSPNDDISGYKENYTRWLCYCNVPQFCDSLPRYETTQVFGRTLLRSVFTVMRRQLLEQARQEKDKLPLEKRTLILTHFPKFLSMLEEEVYSQNSPIWDQDFLSASSRTSQLGIQNSYQSTSCGWDNFIQFNLIFPEQPNAGSSSPACKASSGLEANPGEKRKMTDSHVLEEAKKPRVMGDIPMELINEVMSTITDPAAMLGPETNFLSAHSARDEAARLEERRGVIEFHVVGNSLNQKPNKKILMWLVGLQNVFSHQLPRMPKEYITRLVFDPKHKTLALIKDGRVIGGICFRMFPSQGFTEIVFCAVTSNEQVKGYGTHLMNHLKEYHIKHDILNFLTYADEYAIGYFKKQGFSKEIKIPKTKYVGYIKDYEGATLMGCELNPRIPYTEFSVIIKKQKEIIKKLIERKQAQIRKVYPGLSCFKDGVRQIPIESIPGIRETGWKPSGKEKSKEPRDPDQLYSTLKSILQQVKSHQSAWPFMEPVKRTEAPGYYEVIRFPMDLKTMSERLKNRYYVSKKLFMADLQRVFTNCKEYNPPESEYYKCANILEKFFFSKIKEAGLIDK

SEQ ID NO: 1194 - DNA, 6007 bp, Homo sapien
atgagcggcggcggcgacgtggtgtgcaccggctggctgaggaaatcgcctcccgagaagaagttgaggcgctatgcctggaagaaacgctggtttatcctgcggagtggccggatgagcggtgacccagatgttctggaatactacaagaacgatcactccaagaagcctctgcggatcatcaacctgaacttctgtgagcaggtagatgcaggcctgacctttaacaagaaggagctgcaggatagttttgtgtttgacatcaagaccagtgaacgcaccttttacctggtggctgagacagaagaggacatgaataagtgggtccagagcatctgccagatctgtggcttcaatcaggctgaggagagcacagactccctgagaaatgtttcctcagccggtcatggcccccgctcttctccagctgagctcagcagctctagccagcaccttctccgagagcgcaagtcctcagccccatcacactccagccagccaactctgttcacgtttgaaccccctgtgtcaaaccacatgcagcccaccttgtccaccagcgcacctcaggagtatctctacttgcaccagtgcataagccgaagagcagaaaatgcaaggagtgccagcttctctcagggcaccagagcctcttttctcatgaggagtgacacagctgtacaaaaacttgcccagggcaatggacactgtgtcaacgggatcagtggtcaagtccatggcttctatagccttcccaagccgagccggcacaatacagaattcagagacagtacctacgacctcccccgcagcctggcctcccatggccacaccaagggcagcctcacaggctccgagacagataatgaggatgtgtacaccttcaagacgcccagcaacaccctgtgcagggagttcggggacctcctggtagacaatatggatgttccggccaccccactctcagcctaccagatccctaggacattcactctggacaaaaaccacaatgccatgacagtggccactcctggggactcagccatagctcccccaccccgcccccccaagccaagtcaggcagaaacacctcgatggggcagtcctcagcagagaccgccaatcagtgaaaatagcagatctgtcgctgccaccatccccagacgcaacaccctccctgcaatggacaacagccgacttcaccgagcttcttcctgtgagacctacgagtacccacagcgtggtggagagagtgcaggccggtctgctgaatccatgagtgatggagttggctctttcctgccagggaaaatgattgtgggccgatcggacagcaccaattctgaagacaactatgtgcccatgaatccaggttcttccaccctgttggccatggaacgagcaggtgataattcccagagcgtctacatcccaatgagcccaggggcccatcactttgactcacttggctacccatcaacaacccttcctgtgcaccgaggccccagcagaggaagtgagattcagccaccccctgtcaaccgcaacctcaaacctgatcggaaagcaaagccaacaccacttgacctgaggaacaacaccgtcatcgatgaactccccttcaagtcacctatcaccaagtcttggtctagggccaaccacaccttcaactccagctcctcccagtactgccgccccatctccacccagagcatcaccagcacagactcaggagacagcgaagagaactatgtccctatgcaaaacccagtgtctgcatctcccgttcccagtggcacgaacagtcctgcccctaagaagagcaccggcagcgttgattatctggccctggacttccagccgagctccccaagcccccaccgcaagccatctacttcatccgtcacctctgatgagaaggtggactacgttcaggtggacaaggagaagacccaggccctgcagaacaccatgcaggagtggacagacgtgcggcagtcctcagagccttccaagggtgccaagctgtgatgagagggccaccgcagagcccaggaggcagcatctccagagctggcccttcccatctcccctctcccctctcccgttcttcctcccatccacctcctctctactctgccagtctcagccttcaaagcacttgacatcagggaccctgaacccttcccctgggaggtgagggcctgatcaaggcacctcctctgcccactcggggcccagctgtgatttttatcagtaatggccatgcctccacccaccttagttaggagctacttccaaaaagcatccttcagcctcttcctgtcctttagacctgactctctaccagatgtttggagggaagggctggggctctgagccagattccacacctcacgttcagtcacagccctcagctatcttccctccggccactgggctacctctccttcagtcccagaagacaagtctcaccaacccagggagtcaaggaccagcaaaccaaagtggataatggactttttcattcctgtttttcttggcaggagagaagcaaggccactaaaagaggagatggtggagacggaggctcagcagtggtcttgaggggtaaaggacttagatgcccagatgaagagggaaagctgacatctgcagggaacccactttgaggctgaggccatggcaggacagctgctgtggggtgcagaggcagaagatgaaggacaaaaggaagggaaaactgatggccaacctagagcagcaaggagcagggcttggagctcgggtggtggagatgacaaggacactgtggggtctgggtccccagaactctggagctacaggccactctaggcccaagggctagtcctcttccccagtcccctcagaggcccccgccagccccaccttgaaagcagcatacaggggaaggcttggaccaagctgggcgaccaagcacatggggcaggaacacatggtaaaggggtggggaatatgggagggagtgtggtgtggatgggggtgatgcagggactgaggggaaccctgggacaggcacaggctgggcagaggcacagggcagtgcaggggactctgcagtggggtcgggaagtgagtttctttgcagtgagcagtgcagtggaagtcgggcacagaggtagcagacagatgtgaagcagtggtgaaggccatgtagcaagtggggaaatacatccaaagggcctgggagttggggggtgcccaacgcaatccttgggggtgcagggtggagcagaaagtgaaggagggacacgtgcaagagtggtgtgcatggtggtgtgacatgaggaccgttcctaggatgggacagtgggtcaggcaggacaaggagaaagcagggcagaatgatgcctagaggaccacatcaggcatggctgacagcttgtgcccatgggctgtggcgtatgtcagatcgcagggtaggaacgagtctggcctggtgccggcccagtgtttcctcagctcatccgccctctgttgctccctagcattccaggagccatcttggactctcctccccaggtttgaaaggccatcagattagcagggacggggtgtagggcatcacccaaggttccttctcttaaactaagggtgggggatctgaatgtttttatgttgactgttcttgactaaattttcaagagtttcagaagcaacaggacagaccagacgtttcattctaccctggggcgaacagaacttcttcctcccaaacaatgacttcctgccatgtttgatggggacagctaccactgtcctctgcccccattcccctttcagctcccatgagcatgcatagttcaccagaccaatggcctagccattctctaagtcccatcctggaagaagttatttcttcaagagctgcacctctcctcctagcattagtttagatcaactcaaggagtatttattaatggctgctgtctccagtttctggggttaagcactaaggacacaagaatcaatcagaccttctccctgaacttaagatagccacaatcagaaaaaggacaaggacatgagacagtggtgatggccatcagacagagacttcaaatgctgatggagggcagaggaagtacttagggaggttggtgtcagaggcaggagtgggggatcagggaaggtggattctaggaaaagggagtgcctgaggtaggccttagaaggggatgagtcagatttttacagaggaggagggcagggcttgggtccagtggaggaagaaggaaggagaggcttggaaagccttgtgtcttgggaaaaaaaggcctttgagcatatgggtccagccactcagaagtgcaggggccatgccttggtgttccaataagtgaatggaagcagtggtggtagctacactgggcagagttggcagggtgctggttcactctgcccagccctgaatgtgtgccttaaaggccccctacaaggggccccatacgacagagcttttaactggtgccttccctgtacccgcagcagccacaagtgggcccagactattgcagcctcccataaacatgtgagcatgttctgagtgtgccatgatgtgagtggacctggctggaatcttcggagagcgactgaggtgttcaaatcgaatctcccaggaggcttccttccagccccctattctggtaactaccaggaggcttccttccagccccctattctggtaactaccaaaatccctcgggtgcaagtgtaggggtagagatggaaggatgagaggtgaaattgaccttttgaaagcaaagctctggctcacaggccccaaactaccagccgtatctagcatatccccaccctccacccactacctcctccaacaaaggagtcaactcagttgaaaaaactggtcctttggcctatccatgggtcaaagtccacctctcctgggggcctggagaggactgagcctacggaaaggggataccttcccactcagcactgcttcacacaggccccctgcctggggctctccaaggagccttcttcacccacttccagctccacttctgcaaggttaagtcaagtgagaacgatgagaaatagggagatggtgtctccttaagtccttgatctgcctgtctgtggaatgggaggttggattagctgcgctgaggtcccatccacagctggtgctcagctgcttgaaggggagactccctcctctgtaacttctttctgggggattggggtgggcagtacctatccccagtcccctcctagcttgactttagtggtttccaatgtagaagttaacaaagtatgccccattcctgtgacaaaagcacaaccattctgaagttactggagcatgggctcagctcatcctccctctggccccttctcccatggggacatctcggcccagcacccctatcccatttccagagttcttccttccccatctgggccttcataaaatgcaggggaagccagactggtctcaggagcgctaaagcccttccgtggggggtcgtctttctgggactagccctgctgtttaggacctgggaccacaatggggtacctgccgagggggtccccaagagatccaggctgtcatgtgatttatggtggcatgtgttgtgtatttgttggctacttgtgtcttgaaatctagaattatttcacgcagaattgtcactgtttgtcaggaagagaaaatgggctagtggaagcccagtcttgagttcttgtcttgttaccatttaaaattgacatttaattttcaaatcactgttggtgcctaatcacttaagttattaatttattctgttgtattcttttttttaaattgtaacatatttatccggtgggtgggacaggagtgtgttcaagtgggtcatgtttttgctgtggtgacacatggtacaggcttggagcttgcaggtccctttctactgtggtgttggagcaggacaataaagtccactagaaatgcacccca

SEQ ID NO: 1195 - protein, 676 aa, Homo sapien
MSGGGDVVCTGWLRKSPPEKKLRRYAWKKRWFILRSGRMSGDPDVLEYYKNDHSKKPLRIINLNFCEQVDAGLTFNKKELQDSFVFDIKTSERTFYLVAETEEDMNKWVQSICQICGFNQAEESTDSLRNVSSAGHGPRSSPAELSSSSQHLLRERKSSAPSHSSQPTLFTFEPPVSNHMQPTLSTSAPQEYLYLHQCISRRAENARSASFSQGTRASFLMRSDTAVQKLAQGNGHCVNGISGQVHGFYSLPKPSRHNTEFRDSTYDLPRSLASHGHTKGSLTGSETDNEDVYTFKTPSNTLCREFGDLLVDNMDVPATPLSAYQIPRTFTLDKNHNAMTVATPGDSAIAPPPRPPKPSQAETPRWGSPQQRPPISENSRSVAATIPRRNTLPAMDNSRLHRASSCETYEYPQRGGESAGRSAESMSDGVGSFLPGKMIVGRSDSTNSEDNYVPMNPGSSTLLAMERAGDNSQSVYIPMSPGAHHFDSLGYPSTTLPVHRGPSRGSEIQPPPVNRNLKPDRKAKPTPLDLRNNTVIDELPFKSPITKSWSRANHTFNSSSSQYCRPISTQSITSTDSGDSEENYVPMQNPVSASPVPSGTNSPAPKKSTGSVDYLALDFQPSSPSPHRKPSTSSVTSDEKVDYVQVDKEKTQALQNTMQEWTDVRQSSEPSKGAKL

SEQ ID NO: 1196 - DNA, 5035 bp, Homo sapien
gcggcggcggcggcggcggcggcagcggcggccaagcggccaggttggcggccggggctccgggccgcgcgaggccacggccacgccgcgccgctgcgcacaaccaacgaggcagagcgccgcccggcgcgagactgcggccgaagcgtggggcgcgcgtgcggaggaccaggcgcggcgcggctgcggctgagagtggagcctttcaggctggcatggagagcttaaggggcaactgaaggagacacactggccaagcgcggagttctgcttacttcagtcctgctgagatactctctcagtccgctcgcaccgaaggaagctgccttgggatcagagcagacataaagctagaaaaatttcaagacagaaacagtctccgccagtcaagaaaccctcaaaagtattttgccatggatatagaagatgaagaaaacatgagttccagcagcactgatgtgaaggaaaaccgcaatctggacaacgtgtcccccaaggatggcagcacacctgggcctggcgagggctctcagctctccaatgggggtggtggtggccccggcagaaagcggcccctggaggagggcagcaatggccactccaagtaccgcctgaagaaaaggaggaaaacaccagggcccgtcctccccaagaacgccctgatgcagctgaatgagatcaagcctggtttgcagtacacactcctgtcccagactgggcccgtgcacgcgcctttgtttgtcatgtctgtggaggtgaatggccaggtttttgagggctctggtcccacaaagaaaaaggcaaaactccatgctgctgagaaggccttgaggtctttcgttcagtttcctaatgcctctgaggcccacctggccatggggaggaccctgtctgtcaacacggacttcacatctgaccaggccgacttccctgacacgctcttcaatggttttgaaactcctgacaaggcggagcctcccttttacgtgggctccaatggggatgactccttcagttccagcggggacctcagcttgtctgcttccccggtgcctgccagcctagcccagcctcctctccctgtcttaccaccattcccacccccgagtgggaagaatcccgtgatgatcttgaacgaactgcgcccaggactcaagtatgacttcctctccgagagcggggagagccatgccaagagcttcgtcatgtctgtggtcgtggatggtcagttctttgaaggctcggggagaaacaagaagcttgccaaggcccgggctgcgcagtctgccctggccgccatttttaacttgcacttggatcagacgccatctcgccagcctattcccagtgagggtcttcagctgcatttaccgcaggttttagctgacgctgtctcacgcctggtcctgggtaagtttggtgacctgaccgacaacttctcctcccctcacgctcgcagaaaagtgctggctggagtcgtcatgacaacaggcacagatgttaaagatgccaaggtgataagtgtttctacaggaacaaaatgtattaatggtgaatacatgagtgatcgtggccttgcattaaatgactgccatgcagaaataatatctcggagatccttgctcagatttctttatacacaacttgagctttacttaaataacaaagatgatcaaaaaagatccatctttcagaaatcagagcgaggggggtttaggctgaaggagaatgtccagtttcatctgtacatcagcacctctccctgtggagatgccagaatcttctcaccacatgagccaatcctggaagggtctcgctcttacacccaggctggagtgcagtggtgcaatcatggctcactgcagcctcgacctcctgggctcttaagcgatccttccacctcaaccttccaaggagctgggactacagaaccagcagatagacacccaaatcgtaaagcaagaggacagctacggaccaaaatagagtctggtgaggggacgattccagtgcgctccaatgcgagcatccaaacgtgggacggggtgctgcaaggggagcggctgctcaccatgtcctgcagtgacaagattgcacgctggaacgtggtgggcatccagggatccctgctcagcattttcgtggagcccatttacttctcgagcatcatcctgggcagcctttaccacggggaccacctttccagggccatgtaccagcggatctccaacatagaggacctgccacctctctacaccctcaacaagcctttgctcagtggcatcagcaatgcagaagcacggcagccagggaaggcccccaacttcagtgtcaactggacggtaggcgactccgctattgaggtcatcaacgccacgactgggaaggatgagctgggccgcgcgtcccgcctgtgtaagcacgcgttgtactgtcgctggatgcgtgtgcacggcaaggttccctcccacttactacgctccaagattaccaagcccaacgtgtaccatgagtccaagctggcggcaaaggagtaccaggccgccaaggcgcgtctgttcacagccttcatcaaggcggggctgggggcctgggtggagaagcccaccgagcaggaccagttctcactcacgccctgacccgggcagacatgatggggggtgcagggggctgtgggcatccagcgtcatcctccagaacctcacatctgaactgggggcaggtgcataccttggggagggagtagggggacacgggggaccaccaggtgtccacggttgtccccagcatctcacatcagacctggggcaggtgcgcagtgtggggaggggatggggtgcgtcagggcccagcatcgccgcctggcatctctctgccgcagcatttccccttctgaaccgtccagtgactgctttcaatctcggtttacgtttagaaattgagttctactgagtagggcttccttaagtttaggaaaatagaaattactttgtgtgaaattcttgaataaataatttattcagagctaggaatgtggtttataaaataggaagtaattgtgtcaggtcacttttatgccacattattttaattgcaaaaaagcatctatatatggaggagggtgggaaaatagaggtaggaaatagtagcctaaaggaaatcgccacacgtctgtctaaacttaggtctcttttctccgtaggtacctccctgggtagttccacacactaggttgtaacagtctctccctgaggagcagactcccagcatggtgtagcgtggccctgtcatgcacatggggtcccgcagcagtgactgtgtgtcctgcagaggcgtgacccaggcccctgtagccctcagcctcctctagaagcttctgtactccttgtaggatcagatcatggaaaacttttctcagtttacttctaagtaatcacagataatacatggccagtaatcccaggctggccattcattcaggttttttaaaggatatttaacttttatggactagaaggaatcacgagggctactgcacaatacatggcctaagttccctctgttccttcctctgaatcgaatggatgtgggtgaccgcccgaaggccttcacaggatggaagtagaatgatttcagtagatactcattcttggaaaatgccatagttttaaattattgtttccagctttatcaaagacatgtttgaaaaataaaaagcatccaagtgagagctggtgagaccacgtgctgctggcgtagtgtaggccagacattgacagtcctgacgggagctcagggctgcccagcgcccagcgtgcacgggacggccccacgacagagggagtcagcccgggaggtcaggagcgcggcgggcgagggccctgtgtggaccacctccaccaagctcagagatttgcaaccaggtgccttgttgcctccgctcaggatgaaagaggagctgagagaagtgctctgcctgccagtgcagtgcccagctccaaggctctagagggtgttcaggtacactgaggaggggacggctccgtcttcacattgtgcacagatctgaggatgggattagcgaagctgtggagactgcacatccggacctgcccatgtctcaaaacaaacacatgtacagtggctctttttccttctcaaacactttaccccagaagcaggtggtctgccccaggcataaagaaggaaaattggccatctttcccacctctaaattctgtaaaattatagacttgctcaaaagattcctttttatcatccccacgctgtgtaagtggaaagggcattgtgttccgtgtgtgtccagtttacagcgtctctgccccctagcgtgttttgtgacaatctcccctgggtgaggagtgggtgcacccagccccgaggccagtggttgctcggggccttccgtgtgagttctagtgttcacttgatgccggggaatagaattagagaaaactctgacctgccgggttccagggactggtggaggtggatggcaggtccgactcgaccatgacttagttgtaagggtgtgtcggctttttcagtctcatgtgaaaatcctcctgtctctggcagcactgtctgcactttcttgtttactgtttgaagggacgagtaccaagccacaaggaacacttcttttggccacagcataagctgatggtatgtaaggaaccgatgggccattaaacatgaactgaacggttaaaagcacagtctatggaacgctaatggagtcagcccctaaagctgtttgctttttcaggctttggattacatgcttttaatttgattttagaatctggacactttctatgaatgtaattcggctgagaaacatgttgctgagatgcaatcctcagtgttctctgtatgtaaatctgtgtatacaccacacgttacaactgcatgagcttcctctcgcacaagaccagctggaactgagcatgagacgctgtcaaatacagacaaaggatttgagatgttctcaataaaaagaaaatgtttcact

SEQ ID NO: 1197 - protein, 741 aa, Homo sapien
MDIEDEENMSSSSTDVKENRNLDNVSPKDGSTPGPGEGSQLSNGGGGGPGRKRPLEEGSNGHSKYRLKKRRKTPGPVLPKNALMQLNEIKPGLQYTLLSQTGPVHAPLFVMSVEVNGQVFEGSGPTKKKAKLHAAEKALRSFVQFPNASEAHLAMGRTLSVNTDFTSDQADFPDTLFNGFETPDKAEPPFYVGSNGDDSFSSSGDLSLSASPVPASLAQPPLPVLPPFPPPSGKNPVMILNELRPGLKYDFLSESGESHAKSFVMSVVVDGQFFEGSGRNKKLAKARAAQSALAAIFNLHLDQTPSRQPIPSEGLQLHLPQVLADAVSRLVLGKFGDLTDNFSSPHARRKVLAGVVMTTGTDVKDAKVISVSTGTKCINGEYMSDRGLALNDCHAEIISRRSLLRFLYTQLELYLNNKDDQKRSIFQKSERGGFRLKENVQFHLYISTSPCGDARIFSPHEPILEGSRSYTQAGVQWCNHGSLQPRPPGLLSDPSTSTFQGAGTTEPADRHPNRKARGQLRTKIESGEGTIPVRSNASIQTWDGVLQGERLLTMSCSDKIARWNVVGIQGSLLSIFVEPIYFSSIILGSLYHGDHLSRAMYQRISNIEDLPPLYTLNKPLLSGISNAEARQPGKAPNFSVNWTVGDSAIEVINATTGKDELGRASRLCKHALYCRWMRVHGKVPSHLLRSKITKPNVYHESKLAAKEYQAAKARLFTAFIKAGLGAWVEKPTEQDQFSLTP

SEQ ID NO: 1198 - DNA, 423 bp, Homo sapien
ccggaagtgactgcggacgaatcggcgtttgccgaggctggcatagatttggctgtctccgctcatagctgcttttggcgcgaaagatgccgggtctggttgactcaaaccctgccccgcctgagtctcaggagaagaagccgctgaagccctgctgcgcttgcccggagaccaagaaggcgcgcgatgcgtgtatcatcgagaaaggagaagaacactgtggacatctaattgaggcccacaaggaatgcatgagagccctaggatttaaaatatgaaatggtggtctgctgtgtgaataaataattcctgaagaatgaagaagattaattttgggagttctttgacgaactttgatatgtggaaaaagtatttataatttattgtaagaagaaagtaaaatattactagtggaagatcttc

SEQ ID NO: 1199 - protein, 63 aa, Homo sapien
MPGLVDSNPAPPESQEKKPLKPCCACPETKKARDACIIEKGEEHCGHLIEAHKECMRALGFKI

SEQ ID NO: 1200 - DNA, 3496 bp, Homo sapien
ctgggccgggggctggagagtgaccgtggtctgagtgacctggggcggctgcgtgggccggggtgggcctcaaagccgggcaccagacgggaggggcggcgctcgggccgcgcgctgcccgcgccgggtcctggcgggcggcgaggctggggctgactcctgcctcaggatgccgggggaggaagaggagcgggccttcctggtggcccgcgaggagctggcgagcgccctgaggagggattccgggcaggcgttttccctggagcagctccggccgctactagccagctctctgccgctagccgcccgctacctgcagctggacgccgcacgccttgtccgctgcaacgctcatggggagccccgaaactacctcaacaccctgtccacggctctgaacatcctggagaaatacggccgcaaccttctcagccctcagcggcctcggtactggcgtggtgtcaagtttaataaccctgtctttcgcagcacggtggatgctgtgcaggggggccgagatgtgctgcgattatatggctacacagaggagcaaccagatgggttgagcttccccgaagggcaggaggagccagatgagcaccaggttgctacagtcacactggaagtactgctgcttcggacagagctcagcctgctattgcagaatactcatccaagacagcaggcactggagcagctgttggaagacaaggttgaagatgatatgctgcagctttcagaatttgaccccctattgagagagattgctcctggccccctcaccacaccctctgtcccaggctccactcctggtccctgcttcctctgtggttctgccccaggcacactgcactgcccatcctgtaaacaggccctgtgtccagcctgtgaccacctgttccatggacacccatcccgtgctcatcacctccgccagaccctgcctggggtcctgcagggtacccacctgagccccagtttacctgcctcagcccaaccacggccccagtcgacctccctgctggccctgggagacagctctctttcttcccctaatcctgcaagtgctcatttgccctggcactgtgctgcctgtgccatgctaaatgagccttgggcagtgctctgtgtggcctgtgatcggccccgaggctgtaaggggttggggttgggaactgagggtccccaaggaactggaggcctagaacctgatcttgcacggggtcggtgggcctgccagagctgtacctttgagaatgaggcagctgctgtgctatgttccatatgtgagcgacctcggctggcccagcctcccagcttggtggtggattcccgagatgctggcatttgcctgcaaccccttcagcagggggatgctttgctggcctctgcccagagtcaagtctggtactgtattcactgtaccttctgcaactcgagccctggctgggtgtgtgttatgtgcaaccggactagtagccccattccagcacaacatgccccccggccctatgccagctctttggaaaagggaccccccaagcctgggcccccacgacgccttagtgcccccctgcccagttcctgtggagatcctgagaagcagcgccaagacaagatgcgggaagaaggcctccagctagtgagcatgatccgggaaggggaagccgcaggtgcctgtccagaggagatcttctcggctctgcagtactcgggcactgaggtgcctctgcagtggttgcgctcagaactgccctacgtcctggagatggtggctgagctggctggacagcaggaccctgggctgggtgccttttcctgtcaggaggcccggagagcctggctggatcgtcatggcaaccttgatgaagctgtggaggagtgtgtgaggaccaggcgaaggaaggtgcaggagctccagtctctaggctttgggcctgaggaggggtctctccaggcattgttccagcacggaggtgatgtgtcacgggccctgactgagctacagcgccaacgcctagagcccttccgccagcgcctctgggacagtggccctgagcccaccccttcctgggatgggccagacaagcagagcctggtcaggcggcttttggcagtctacgcactccccagctggggccgggcagagctggcactgtcactgctgcaggagacacccaggaactatgagttgggggatgtggtagaagctgtgaggcacagccaggaccgggccttcctgcgccgcttgcttgcccaggagtgtgccgtgtgtggctgggccctgccccacaaccggatgcaggccctgacttcctgtgagtgcaccatctgtcctgactgcttccgccagcacttcaccatcgccttgaaggagaagcacatcacagacatggtgtgccctgcctgtggccgccccgacctcaccgatgacacacagttgctcagctacttctctacccttgacatccagcttcgcgagagcctagagccagatgcctatgcgttgttccataagaagctgaccgagggtgtgctgatgcgggaccccaagttcttgtggtgtgcccagtgctcctttggcttcatatatgagcgtgagcagctggaggcaacttgtccccagtgtcaccagaccttctgtgtgcgctgcaagcgccagtgggaggagcagcaccgaggtcggagctgtgaggacttccagaactggaaacgcatgaacgacccagaataccaggcccagggcctagcaatgtatcttcaggaaaacggcattgactgccccaaatgcaagttctcgtacgccctggcccgaggaggctgcatgcactttcactgtacccagtgccgccaccagttctgcagcggctgctacaatgccttttacgccaagaataaatgtccagagcctaactgcagggtgaaaaagtccctgcacggccaccaccctcgagactgcctcttctacctgcgggactggactgctctccggcttcagaagctgctacaggacaataacgtcatgtttaatacagagcctccagctggggcccgggcagtccctggaggcggctgccgagtgatagagcagaaggaggttcccaatgggctcagggacgaagcttgtggcaaggaaactccagctggctatgccggcctgtgccaggcacactacaaagagtatcttgtgagcctcatcaatgcccactcgctggacccagccaccttgtatgaggtggaagagctggagacggccactgagcgctacctgcacgtacgcccccagcctttggctggagaggatccccctgcttaccaggcccgcttgttacagaagctgacagaagaggtacccttgggacagagtatcccccgcaggcggaagtagctgagggcaagggtcccgatgagggtcccatggcctgctccctcaggaacagctccagcaccaataaagaggcatcttaccaccaaaaaaaaaaaaaaaaaaaaaaaa

SEQ ID NO: 1201 - protein, 1072 aa, Homo sapien
MPGEEEERAFLVAREELASALRRDSGQAFSLEQLRPLLASSLPLAARYLQLDAARLVRCNAHGEPRNYLNTLSTALNILEKYGRNLLSPQRPRYWRGVKFNNPVFRSTVDAVQGGRDVLRLYGYTEEQPDGLSFPEGQEEPDEHQVATVTLEVLLLRTELSLLLQNTHPRQQALEQLLEDKVEDDMLQLSEFDPLLREIAPGPLTTPSVPGSTPGPCFLCGSAPGTLHCPSCKQALCPACDHLFHGHPSRAHHLRQTLPGVLQGTHLSPSLPASAQPRPQSTSLLALGDSSLSSPNPASAHLPWHCAACAMLNEPWAVLCVACDRPRGCKGLGLGTEGPQGTGGLEPDLARGRWACQSCTFENEAAAVLCSICERPRLAQPPSLVVDSRDAGICLQPLQQGDALLASAQSQVWYCIHCTFCNSSPGWVCVMCNRTSSPIPAQHAPRPYASSLEKGPPKPGPPRRLSAPLPSSCGDPEKQRQDKMREEGLQLVSMIREGEAAGACPEEIFSALQYSGTEVPLQWLRSELPYVLEMVAELAGQQDPGLGAFSCQEARRAWLDRHGNLDEAVEECVRTRRRKVQELQSLGFGPEEGSLQALFQHGGDVSRALTELQRQRLEPFRQRLWDSGPEPTPSWDGPDKQSLVRRLLAVYALPSWGRAELALSLLQETPRNYELGDVVEAVRHSQDRAFLRRLLAQECAVCGWALPHNRMQALTSCECTICPDCFRQHFTIALKEKHITDMVCPACGRPDLTDDTQLLSYFSTLDIQLRESLEPDAYALFHKKLTEGVLMRDPKFLWCAQCSFGFIYEREQLEATCPQCHQTFCVRCKRQWEEQHRGRSCEDFQNWKRMNDPEYQAQGLAMYLQENGIDCPKCKFSYALARGGCMHFHCTQCRHQFCSGCYNAFYAKNKCPEPNCRVKKSLHGHHPRDCLFYLRDWTALRLQKLLQDNNVMFNTEPPAGARAVPGGGCRVIEQKEVPNGLRDEACGKETPAGYAGLCQAHYKEYLVSLINAHSLDPATLYEVEELETATERYLHVRPQPLAGEDPPAYQARLLQKLTEEVPLGQSIPRRRK

SEQ ID NO: 1202 - DNA, 6059 bp, Homo sapien
gggcgggcgggaggcgcggaggcagcggaggctgctcggccgcaaggaggcaggcgggaggccaggggtgcagaattggggcggggggctcccttcacccccgcagccctccgcccgggtccgtgtggccaggcctcacgtgcccgcaggcctggggaaggtggagacaggggcgggggtccgcgcagaggcctgcacggcgcggccaggtgatggtgggcctctgtgtttctccagacgaaaggggacccccggagcggccgtgcccctgggctgcccccgcgaggcgttttgacatcagccatagggaagtcggggagccctgagcctgcctgtttccgttaagtgtccttaggatgcagtgattaaggaattaggctctccctccgggaggggcactgcctgtgctagggaactcgggggcagagaaacaggacaggatgatgctgtccgagcaagcccaaaagtggtttccaacccacgtgcaggtcacagtgctccaagccaaagatctgaagccaaaaggcaaaagtggtaccaatgacacatacactataattcagctgggcaaggaaaagtactccacctctgtagctgagaaaacccttgagccagtttggaaggaggaggcctctttcgagctacctggattgctaattcagggaagtccagagaaatacattcttttccttatagttatgcacaggtccctggtgggtctggataaatttttagggcaggtggcaatcaatctcaatgacatctttgaggacaaacaaagaaggaaaacagagtggtttagattagaatccaaacaaggaaaacgaatcaaaaacaggggtgagataaaggtcaatattcagtttatgaggaacaatatgaccgcaagtatgtttgacttatcaatgaaggacaaaaccagatctccttttgcaaagttaaaagataagatgaagggtagaaaaaatgatggaacattttctgatacgtcttctgcaatcattccaagtactcacatgcccgatgccaatagtgaattttcaagtggtgaaatacagatgaaatccaaaccaaaaaagccttttctcttgggtcctcagcgactctcgtcagcgcattcaatgtctgatttatctgggtcccatatgtcttctgagaaactgaaggctggcaccataggtcaaacacatcttctcggacaccagttagattcctttggaacagttccagaaagtggaagtctcaaatctccacacagaagaacattaagctttgatacttctaaaatgaaccaacctgacagcattgtggatgaaggtgaattgtgtttcggaagacaaaatgacccatttacaaatgtgactgcttcattaccccaaaaatttgcaacactgccaaggaagaaaaatccatttgaagaaagcagcgaaacatgggacagcagcatgaatttattttcaaaaccaattgaaataagaaaagaaaataaaagagagaaaagggagaaagttagcctgtttgaaagagtgactggaaaaaaagatagcagaagatctgataaacttaacaatgggggatctgatagcccttgtgacttgaaatcacctaatgcatttagtgaaaatcgccaggactattttgattatgagtcaaccaatccatttacagcaaaattcagggcttcaaatataatgccatcttcaagttttcatatgagtccaacaagcaatgaagacctcaggaaaatcccggacagcaacccctttgatgccactgcagggtatcgtagtctgacctatgaagaggttctacaggagctggtgaaacacaaagaactccttaggaggaaagacacccacatccgggaactcgaggactacatcgacaacctccttgtaagggtaatggaagaaacgcccagtattctcagagtgccatatgaaccatccaggaaagctggcaaattctctaacagttaataaagccaattgtattgtattgataattggacaaagagagagaaagaaagaaggaaggaaggaaaaacttgttactgaaagagactacactatcaggtttcattacatattctcctttattgtgaagagtagttttacctgtaaatattagcagggactatcaagagtgacctttgaagcaagctaaatcatttaaatgtttaaattgaaaatgggccagattctcaatgaataagtggttccttaggactcactcaggtgctggtactgacccactaatctgccataggcccagaaatatcttcagaagtacgtgagttgttcctcaggaatagatttttcataaagcagaattgatcctgtggctggtttctcagaaatcagtttgtagaaatatttagcttcaggaatactgctcgttataaacactactaaaaaaacagtttatattttatatacacatatgtacatgaatatatatatattcatgtatcttgtatataaaatataggcatatacctcatatatacatgtgtttttagaacatttagaaacaattgattgcctctaaagttaggctaccaatttcttgatttgaaaatgtgtgtgctctattgatgcaagacaagtcatccttcctactgtcatggtttgttatagagaagctgcttcaaatcactcttgactacatggaccttggtttcaaagtgagctgctatatattattctagcatcaaagtttttctctttccccaaaagtgatgatctcaagtccttttttaaagaatgacaaattttaggagacttcattaacttcataacagcatgaatttatttgaattaattaacatttgagtttgtttaaggtataagcagaagataagctaatatagcttgttttgttgaaattctgcatgcctttaaatcactagcaaagcaaatattataaagttatatctgaaaataattgtgggaagtatgtgattgcctggtgtgtctgataacccaaagcagcgggcagattccaggaatgaagaattaggcttggtttcaggttacataaataatagagcagatggttgcctttgggtcttgaaccaaaataagacttactaaaggaagagtgagtttttagaagagaactttacgagcgtgacattatgcattactccacatccaccctttaagaattgatttattacaaaattatgttctattttaaagtccactcccccaaaatactgatttcttccatggattatttttatatgatttgtacaaattttttctgaaatttaagttgacaagcaatgttataaaaatattgctaatcttctgcttatttttcagcctttaaagtctgaaatactataaaacactgagagtatctatgtctttctgaatttaaaatgaaaattcatgtccatatggagacttacatattccccaatctttccatgaattgcatttttttctaatacttatctctgttaagactccattgaaagttaaacaaaaagccgatataatagtttgggttttttttttttgcttattttagtattttgaatcagagaatacttggccaagctcgtatttgtaaactaaaaccccttgttatttgtatcttctgcatttcagttttactgtaagaacatacattttgaaattatgaacatttttttcataaaaattaaatgctttaagaaatggagaaggaaaaatagcttttatcaatttttttctcctcaagattctgtaataaacctcaaagtctggtgtagaatggtattttcccgtttgaggtcttggtagttttttttttttttttaaacatggtgccacttttaattaactaaatgttacaaaattctcagcatttgtttttgtctggtagtattattgagtcttttcatacacttcttaaaatgtgaaaatctatgttttcagtattatgacagtatctgcagatactataataatatgctttggccaaatttgctgtttatagagtgaaccaagatgtcagttttgtattggggatatgttttacataaatagaactcatttaaaagtatggttcaagtactgctcttctttttatggggaaattgatttttaaggagcgattcttttcctatataaaagctattgaggcttagctttattcatacatgagtgatttggttataactcaatcaaaatttttatctttaaatctgagacaagtattatatttaaaactagatctattaatacattcatcactgcctgaaaatttgctgttctaatgtttgtgaattttcactcattacctagagtaaacttattgcatattttcataatcagtcaaaataataaaactaaaaacaaaaagtaaaaattagttcccaagtaaatatatcagtgtttcctgtgtttgggcagaagtgcaaagtagttttaatttctcacgttgtagaaaaagaggccaaaaaggtcaccttagtttatttttccaaaacataactttaggtattctaatgtattttgttagttgcttagaaatggaaataaaatatatgtgcttattaaataatgcacagtacactagattatagagtttatttttgcttttatgctttaaagaatgcatgcccaaaacactactaccaacaggaggattttttaaaatcacagaattgatatttatctcaagactatcttaagctaatgtacttctgttacataattaaactatttctgctattatttttaaagcagtattattttataaccaattctaaaattcagctttaaaaatattgaacataccttcctaccacttacgcttcaagtttcatttattgaataccagggtcatatcttagaattgtatataaaacaacatgtaacccattcatgaaaaacgtttttaagtattgctttttgctgctatgttctgcattgagcctagttttgccattgtcccctgaatgtagtattatctatagattatacataactacatctattgcttttggtggtaaatcaagatttagttgtaattttccagctgtgaaaatgttgccttgtatttaaaagggtttcatgaatggaaacctaagtaaaactaagctcattagtgacagacttgttttcttcttgttattcctccagcaactccctcaccaccacgcctccctgcctaccatccccggaagggtgcttattctttaacaaagagaatctaaaaaaaaaaacaaaaaactgttgtctaatatatctacagtaaatgttacactagagcttttattttcctctgtagcttttcagaagaagcaatttaccttggatttgtaaatcaagctgaaacttttttgatgttcatgtactcatatgtcttgtaggtggtaggtgtcacttgtgtgtatgtgtaagtgaagtatgatgcatgctcattcacttggtccctttgaaataagggaaaggatcacagtgctgctgggccatgatggtatgtagaagggtctgtcagcacacatggaaagcccccatttgcacagatgtagaactttaataatccagatgcaatcattggaagtatttaatatgcaattggtagcaccttagctaattaatctgcatatgaagcattttctgatatatttaataagaggtatagaagctcttcaagcattaaaatagagttgatgtttcattccatttgttttatccatcaaaaaatgcactctcacagtggagttgaagtctaatacatgatacatgtgggcctgttagtcttcgaagcttccagatggtttgtgttttgaggtacaaaaaaatgctgcagatctagaaatgcatatatttagcgggtatttgaaagatagaagcattatttataactgaagagtataacacttatcttcttaagtaaatgctctcataacttgtatacatttttgcaggtacaaattcaaaagtatgtaagcattgtataatgtgacaattgtataatttatgtaatctgatgcatgaatcagaatttttatataatatatgattattgacttatagttgattaaagtgtttaaactt

SEQ ID NO: 1203 - protein, 512 aa, Homo sapien
MMLSEQAQKWFPTHVQVTVLQAKDLKPKGKSGTNDTYTIIQLGKEKYSTSVAEKTLEPVWKEEASFELPGLLIQGSPEKYILFLIVMHRSLVGLDKFLGQVAINLNDIFEDKQRRKTEWFRLESKQGKRIKNRGEIKVNIQFMRNNMTASMFDLSMKDKTRSPFAKLKDKMKGRKNDGTFSDTSSAIIPSTHMPDANSEFSSGEIQMKSKPKKPFLLGPQRLSSAHSMSDLSGSHMSSEKLKAGTIGQTHLLGHQLDSFGTVPESGSLKSPHRRTLSFDTSKMNQPDSIVDEGELCFGRQNDPFTNVTASLPQKFATLPRKKNPFEESSETWDSSMNLFSKPIEIRKENKREKREKVSLFERVTGKKDSRRSDKLNNGGSDSPCDLKSPNAFSENRQDYFDYESTNPFTAKFRASNIMPSSSFHMSPTSNEDLRKIPDSNPFDATAGYRSLTYEEVLQELVKHKELLRRKDTHIRELEDYIDNLLVRVMEETPSILRVPYEPSRKAGKFSNS

SEQ ID NO: 1204 - DNA, 891 bp, Homo sapien
gcgaggcgcccgaagccgtcgcggcggggaccatgttgcttccgaacatcctgctcaccggtacaccaggggttggaaaaaccacactaggcaaagaacttgcgtcaaaatcaggactgaaatacattaatgtgggtgatttagctcgagaagagcaattgtatgatggctatgatgaagagtatgactgtcccattttagatgaagacagagtagttgatgagttagataaccaaatgagagaaggtggagttattgttgattaccatggttgtgatttcttccctgaacgctggtttcatatagtttttgtgctgagaacagataccaatgtattgtacgaaagacttgaaacaaggggttataatgagaagaaactaacagacaatattcagtgtgagatttttcaagttctttatgaagaagccacagcatcctacaaggaagaaatcgtgcatcagctgcccagtaataaaccagaagagctagaaaataatgtagatcagatcttgaaatggattgagcagtggatcaaagatcataactcttgacttataaggctagctacttaataatcactcttgttgatatctctgccgacatcatagaaattgttcaagtgtcagtaacactttattaaaatcatgttgcagaaccagcaggtggatagtatataggtttatgcctgtgtttctttttctccatgagaaagctaaacatgaaatataatgaatatagtattattaaggattgagacaaaaactgtgattttaatacttaaattgctaaagaataaataaatctgacaaaatgggtggatatcttttaagtttattacagaaaaaaatgcagatgatctcttaaaataaaactaaagataaagcaaaaaaa

SEQ ID NO: 1205 - protein, 172 aa, Homo sapien
MLLPNILLTGTPGVGKTTLGKELASKSGLKYINVGDLAREEQLYDGYDEEYDCPILDEDRVVDELDNQMREGGVIVDYHGCDFFPERWFHIVFVLRTDTNVLYERLETRGYNEKKLTDNIQCEIFQVLYEEATASYKEEIVHQLPSNKPEELENNVDQILKWIEQWIKDHNS

SEQ ID NO: 1206 - DNA, 4148 bp, Homo sapien
gacctccatcctgcgcaagcaggctgaggaggaggccatcaagcgctcacgctcactctccgagagctatgagctctcctcggacctgcaggacaagtaggtggagatgctagaacgaaagtatggggggcgcctggtaacccgccatgcggcccgcaccatccagacggcgtttcgccagtaccagatgaacaagaacttcgagcgcttgcgcagctccatgtcagagaaccgcatgtcacgccggattgtgctgtccaacatgaggatgcagttctcctttgaggggcctgagaaagtgcacagctcctacttcgaggggaagcaggtctcagtgactaacgacggctcccagctgggagccctggtgtcccctgagtgtggtgacctcagcgagcccaccaccctcaagtctccggccccctccagtgactttgcggacgccatcaccgagctggaggacgccttctctaggcaagtgaaatcactggccgagtccatcgacgatgccctcaactgccgcagcctgcacactgaggaggcaccggccctggatgcggcgcgggcccgggacaccgaaccccagacagccctgcacggcatggaccaccgcaaactggacgagatgacggcctcgtacagtgatgtcaccctgtacatcgatgaggaggagctgtcgccccctctgcccctctcgcaggcaggggaccggccgtccagcaccgagtcggacctgcggctacgggctgggggcgcagccccagactactgggccctggcccacaaagaggacaaggctgacacggacacgagctgccggagcacgccgtcgctggagcggcaggagcagcggctgcgggtggagcatctgccgctgctcaccatcgagccacccagcgacagctctgtggaccttagtgaccgctcggagcgggggtcactcaagaggcagagtgcttacgagcgcagccttggcgggcagcagggcagtcccaagcatggtccccacagcggcgcccccaagagcctcccccgggaggagcctgagttgcggccccggccccccaggcccctggacagccacttggccatcaatggctcagccaaccggcagagcaagtctgagtcggactactcagacggtgacaatgacagcatcaacagcacgtccaactccaacgataccatcaactgcagctccgagtcatcgtcccgtgacagcctgcgggagcagacgctcagcaagcagacctaccacaaggaggcccgcaacagctgggactcgcctgcctttagcaacgatgtcatccgcaagaggcactaccgcatcggcctgaacctcttcaacaagaagcctgagaagggagtccagtacctcatcgagcgtggctttgtgcccgacacgcccgtcggggtggcccacttcctgctgcagcgcaagggcctcagccggcagatgatcggcgagttcctgggcaaccggcagaagcagttcaaccgtgacgtgctcgactgcgtcgtggacgagatggacttctctaccatggagctggatgaggccctcaggaaattccaggcgcacatccgtgtccaaggggaggctcagaaagtggagcggctcatagaggcgttcagccagcgctactgcatctgcaaccctggggtggtgcggcaattccggaacccagacaccattttcatcctggccttcgccatcatcctgctgaacaccgacatgtacagccccaatgtcaagcccgagcggaaaatgaagctagaggacttcatcaagaacctccgaggtgtggacgatggtgaggacattccccgtgagatgctgatggggatctatgaacggatccgtaagcgagagctaaagaccaatgaggaccatgtgtcccaggtgcagaaggtggagaagctcattgtggggaaaaagccgatcggatccctgcatcccgggctcggctgtgtgctctctctgccccaccgtcggttggtctgctactgccggctctttgaggttccagacccaaacaagccccagaaactcggactacaccagcgagaaatcttcctgttcaacgacctcctggtggtcaccaagatcttccagaagaagaagaactcggtgacgtacagcttccgacagtccttctccttgtacggcatgcaggtcctgctcttcgagaaccagtactaccccaatggcatccggctcacctcgtctgtccccggagcagatatcaaagtgttaataaacttcaacgcccccaaccctcaagaccggaagaaattcaccgatgacctgcgggagtccattgcggaagtccaagagatggagaagcacaggatagagtcggagctcgagaagcagaaaggcgtcgtgcggcccagcatgtcccagtgctctagcctcaaaaaggagtcgggcaacggaacactgagccgggcctgcctggacgacagctatgccagcggtgagggcctcaagcgcagcgccctcagcagctccctgcgggacctctcggaagccgggaagcgagggcgtcgcagcagtgcgggatcgctagagagcaatgtggaatttcagcctttcgagccactgcagccgtcagtgctgtgctcctaagccatgggacccgaggactgccccccggcgcctgcccaggcggaggccctttcagaaagggcgaagctcacgcctgactctgcgggccgcggggccgcgttcccagtggacagcgtggtgagccgtggccggacggcaggaggagaggggagccccctctggctgtgtgtcaccttggctggctggctggccagggttttgccgatttccctcctcacatccctcccaccctcggtcatatcattgagatcaccgtaccagcaaatctgcaaaccaagcactttgttaatctccagagagagcaaatacagcaatctagagtttagcctttttaaaaatgtgactttaacccgcccacctgtgtcctcccattggcgtggcatttctttggtgtctgctcagaaagaaacagcatgggaccgtgtgattgggtccaggctgggctgtcagggaagcgccctggtgtctccgactcatcaattctcgggttttttttaaaagccaggctccccaaagcactctttgtctcgcaattttgaggaggttgttccgacctggaagcgttaaactgctgcatgtcatctggcgtcagctgtgaggctgcgctctgcgtgttgtgcgtttgcaaaatgtattggcgtgactgtaaacacatcgttgaagtaaagcgattacatattgagtatgtcagcttttctcaccctcttctgtgctgggaggagagtctaactgtaacctttaggttgttccagaaaagattcaggccgtttggcacagaattgctctttctgaagggtagcagtaatgaataggaacagacagaaaaccccaggaggggctttcaggaaactctccctctccatcgccatcctgcaagctccacagcctcgggctgccagcctgtggcactgtcctcggtgtgtcctggagctgtgctgggcagcagggcctcgcgtaaggaactgctggaacccactgagcccttcccggggtttcccgccgcacttagtgtgttccttcaggctagtgaggtttcattctgtttatttgcaagcttatcaaaagtttgtggaagatacattgttgggttccagaggctggagtcatgctgcccacatcttgtttgggaaagcaaaagctcccagtgagctggtgtccccgtgtgtctttcatgggactgtcccctttagagatcccacctgtcagagccacagcttcggggtcctgtcatcacatcccctgggaggggaggcaggaggaggccgagggccccaggatgtctgcctggtcccttctcactgtgaggacgcccttggcacacctttctcaagtcacacaaattattgcagttacatacagaattgctgacaggagcaggagacgctgagggaaacagctggcaatgtgacaaaagtcttttctgggacaacaatcaaatcatgtatttgtatttttttaagtttaccaatgaattgtacaacaatgtaaaaataaagttcatcctaatatgctgtgc

SEQ ID NO: 1207 - protein, 841 aa, Homo sapien
MLERKYGGRLVTRHAARTIQTAFRQYQMNKNFERLRSSMSENRMSRRIVLSNMRMQFSFEGPEKVHSSYFEGKQVSVTNDGSQLGALVSPECGDLSEPTTLKSPAPSSDFADAITELEDAFSRQVKSLAESIDDALNCRSLHTEEAPALDAARARDTEPQTALHGMDHRKLDEMTASYSDVTLYIDEEELSPPLPLSQAGDRPSSTESDLRLRAGGAAPDYWALAHKEDKADTDTSCRSTPSLERQEQRLRVEHLPLLTIEPPSDSSVDLSDRSERGSLKRQSAYERSLGGQQGSPKHGPHSGAPKSLPREEPELRPRPPRPLDSHLAINGSANRQSKSESDYSDGDNDSINSTSNSNDTINCSSESSSRDSLREQTLSKQTYHKEARNSWDSPAFSNDVIRKRHYRIGLNLFNKKPEKGVQYLIERGFVPDTPVGVAHFLLQRKGLSRQMIGEFLGNRQKQFNRDVLDCVVDEMDFSTMELDEALRKFQAHIRVQGEAQKVERLIEAFSQRYCICNPGVVRQFRNPDTIFILAFAIILLNTDMYSPNVKPERKMKLEDFIKNLRGVDDGEDIPREMLMGIYERIRKRELKTNEDHVSQVQKVEKLIVGKKPIGSLHPGLGCVLSLPHRRLVCYCRLFEVPDPNKPQKLGLHQREIFLFNDLLVVTKIFQKKKNSVTYSFRQSFSLYGMQVLLFENQYYPNGIRLTSSVPGADIKVLINFNAPNPQDRKKFTDDLRESIAEVQEMEKHRIESELEKQKGVVRPSMSQCSSLKKESGNGTLSRACLDDSYASGEGLKRSALSSSLRDLSEAGKRGRRSSAGSLESNVEFQPFEPLQPSVLCS

SEQ ID NO: 1208 - DNA, 2545 bp, Homo sapien
atccaatacaggagtgacttggaactccattctatcactatgaagaaaagtggtgttcttttcctcttgggcatcatcttgctggttctgattggagtgcaaggaaccccagtagtgagaaagggtcgctgttcctgcatcagcaccaaccaagggactatccacctacaatccttgaaagaccttaaacaatttgccccaagcccttcctgcgagaaaattgaaatcattgctacactgaagaatggagttcaaacatgtctaaacccagattcagcagatgtgaaggaactgattaaaaagtgggagaaacaggtcagccaaaagaaaaagcaaaagaatgggaaaaaacatcaaaaaaagaaagttctgaaagttcgaaaatctcaacgttctcgtcaaaagaagactacataagagaccacttcaccaataagtattctgtgttaaaaatgttctattttaattataccgctatcattccaaaggaggatggcatataatacaaaggcttattaatttgactagaaaatttaaaacattactctgaaattgtaactaaagttagaaagttgattttaagaatccaaacgttaagaattgttaaaggctatgattgtctttgttcttctaccacccaccagttgaatttcatcatgcttaaggccatgattttagcaatacccatgtctacacagatgttcacccaaccacatcccactcacaacagctgcctggaagagcagccctaggcttccacgtactgcagcctccagagagtatctgaggcacatgtcagcaagtcctaagcctgttagcatgctggtgagccaagcagtttgaaattgagctggacctcaccaagctgctgtggccatcaacctctgtatttgaatcagcctacaggcctcacacacaatgtgtctgagagattcatgctgattgttattgggtatcaccactggagatcaccagtgtgtggctttcagagcctcctttctggctttggaagccatgtgattccatcttgcccgctcaggctgaccactttatttctttttgttcccctttgcttcattcaagtcagctcttctccatcctaccacaatgcagtgcctttcttctctccagtgcacctgtcatatgctctgatttatctgagtcaactcctttctcatcttgtccccaacaccccacagaagtgctttcttctcccaattcatcctcactcagtccagcttagttcaagtcctgcctcttaaataaacctttttggacacacaaattatcttaaaactcctgtttcacttggttcagtaccacatgggtgaacactcaatggttaactaattcttgggtgtttatcctatctctccaaccagattgtcagctccttgagggcaagagccacagtatatttccctgtttcttccacagtgcctaataatactgtggaactaggttttaataattttttaattgatgttgttatgggcaggatggcaaccagaccattgtctcagagcaggtgctggctctttcctggctactccatgttggctagcctctggtaacctcttacttattatcttcaggacactcactacagggaccagggatgatgcaacatccttgtctttttatgacaggatgtttgctcagcttctccaacaataagaagcacgtggtaaaacacttgcggatattctggactgtttttaaaaaatatacagtttaccgaaaatcatataatcttacaatgaaaaggactttatagatcagccagtgaccaaccttttcccaaccatacaaaaattccttttcccgaaggaaaagggctttctcaataagcctcagctttctaagatctaacaagatagccaccgagatccttatcgaaactcattttaggcaaatatgagttttattgtccgtttacttgtttcagagtttgtattgtgattatcaattaccacaccatctcccatgaagaaagggaacggtgaagtactaagcgctagaggaagcagccaagtcggttagtggaagcatgattggtgcccagttagcctctgcaggatgtggaaacctccttccaggggaggttcagtgaattgtgtaggagaggttgtctgtggccagaatttaaacctatactcactttcccaaattgaatcactgctcacactgctgatgatttagagtgctgtccggtggagatcccacccgaacgtcttatctaatcatgaaactccctagttccttcatgtaacttccctgaaaaatctaagtgtttcataaatttgagagtctgtgacccacttaccttgcatctcacaggtagacagtatataactaacaaccaaagactacatattgtcactgacacacacgttataatcatttatcatatatatacatacatgcatacactctcaaagcaaataatttttcacttcaaaacagtattgacttgtataccttgtaatttgaaatattttctttgttaaaatagaatggtatcaataaatagaccattaatcag

SEQ ID NO: 1209 - protein, 125 aa, Homo sapien
MKKSGVLFLLGIILLVLIGVQGTPVVRKGRCSCISTNQGTIHLQSLKDLKQFAPSPSCEKIEIIATLKNGVQTCLNPDSADVKELIKKWEKQVSQKKKQKNGKKHQKKKVLKVRKSQRSRQKKTT

SEQ ID NO: 1210 - DNA, 1610 bp, Homo sapien
ggcacgaggctgcggccgcagtagccggagccggagccgcagccaccggtgccttcctttcccgccgccgcccagccgccgtccggcctccctcgggcccgagcgcagaccaggctccagccgcgcggcgccggcagcctcgcgctccctctcgggtctctctcgggcctcgggcaccgcgtcctgtgggcggccgcctgcctgcccgcccgcccgcagccccttgcctgccggcccctgggcggcccgtgccatgggcaccgacagccgcgcggccaaggcgctcctggcgcgggcccgcaccctgcacctgcagacggggaacctgctgaactggggccgcctgcggaagaagtgcccgtccacgcacagcgaggagcttcatgattgtatccaaaaaaccttgaatgaatggagttcccaaatcaacccagatttggtcagggagtttccagatgtcttggaatgcactgtatctcatgcagtagaaaagataaatcctgatgaaagagaagaaatgaaagtttctgcaaaactgttcattgtagaatcaaactcttcatcatcaactagaagtgcagttgacatggcctgttcagtccttggagttgcacagctggattctgtgatcattgcttcacctcctattgaagatggagttaatctttccttggagcatttacagccttactgggaggaattagaaaacttagttcagagcaaaaagattgttgccataggtacctctgatctagacaaaacacagttggaacagctgtatcagtgggcacaggtaaaaccaaatagtaaccaagttaatcttgcctcctgctgtgtgatgccaccagatttgactgcatttgctaaacaatttgacatacagctgttgactcacaatgatccaaaagaactgctttctgaagcaagtttccaagaagctcttcaggaaagcattcctgacattcaagcgcacgagtgggtgccgctgtggctactgcggtattcggtcattgtgaaaagtagaggaattatcaaatcaaaaggctacattttacaagctaaaagaaggggttcttaactgacttaggagcataacttacctgtaatttccttcaatatgagagaaaattgagatgtgtaaaatctagttactgcctgtaaatggtgtcattgaggcagatattctttcgtcatatttgacagtatgttgtctgtcaagttttaaatacttatcttgcctccatatcaatccattctcatgaacctctgtattgctttccttaaactattgttttctaattgaaattgtctataaagaaaatacttgcaatatatttttcctttatttttatgactaatataaatcaagaaaatttgttgttagatatattttggcctaggtatcagggtaatgtatatacatattttttatttccaaaaaaaattcattaattgcttcttaactcttattataaccaagcaatttaattacaattgttaaaactgaaatactggaagaagatatttttcctgtcattgatgagatatatcagagtaactggagtagctgggatttactagtagtgtaaataaaattcactcttcaatac

SEQ ID NO: 1211 - protein, 274 aa, Homo sapien
MGTDSRAAKALLARARTLHLQTGNLLNWGRLRKKCPSTHSEELHDCIQKTLNEWSSQINPDLVREFPDVLECTVSHAVEKINPDEREEMKVSAKLFIVESNSSSSTRSAVDMACSVLGVAQLDSVIIASPPIEDGVNLSLEHLQPYWEELENLVQSKKIVAIGTSDLDKTQLEQLYQWAQVKPNSNQVNLASCCVMPPDLTAFAKQFDIQLLTHNDPKELLSEASFQEALQESIPDIQAHEWVPLWLLRYSVIVKSRGIIKSKGYILQAKRRGS

SEQ ID NO: 1212 - DNA, 1008 bp, Homo sapien
cccgaattttccggctcgaatgcccggcagccgtggcggctagagcgttcctccccagctcgaatgcccggcggcgaggcggctagagcgtcgcctcctcccggggaaccgcgtgtgaccttccagcccgcggaccgatgctgccggcggccgctcgccccctgtgggggccttgccttgggcttcgggccgctgcgttccgccttgccaggcgacaggtgccatgtgtctgtaccgtgcgacatatgaggagcagcggccatcagaggtgtgaggccctcgctggtgcacccctggataacgcccccaaggagtacccccccaagatacagcagctggtccaggacatcgccagcctcactctcttggaaatctcagacctcaacgagctcctgaagaaaacgttgaagatccaggatgtcgggcttgtgccgatgggtggtgtgatgtctggggctgtccctgctgcagcagcccaggaggcggtggaagaagatatccccatagcgaaagaacggacacatttcaccgtccgcctgaccgaggcgaagcccgtggacaaagtgaagctgatcaaggaaatcaagaactacatccaaggcatcaacctcgtccaggcaaagaagctggtggagtccctgccccaggaaatcaaagccaatgtcgccaaagctgaggcggagaagatcaaggcggccctggaggcggtgggcggcaccgtggttctggagtagcctccagctcggaggacttgtgttcaggggtcctgggccccggcgaggtcccgccctcccgtggtcactggctccgcccccagcaccaggcgcccagtggagccgtttgggagaattgcctgcgccacgcagcgggccggacaggccgcacagacctactgtggcgggagggaggggcggctgctgcctggtgacggcacccggaagcccaccaggacgcgccaccggtcaatgtgcctctggtggctgctgagaaaaatacactgtgcagctc

SEQ ID NO: 1213 - protein, 198 aa, Homo sapien
MLPAAARPLWGPCLGLRAAAFRLARRQVPCVCTVRHMRSSGHQRCEALAGAPLDNAPKEYPPKIQQLVQDIASLTLLEISDLNELLKKTLKIQDVGLVPMGGVMSGAVPAAAAQEAVEEDIPIAKERTHFTVRLTEAKPVDKVKLIKEIKNYIQGINLVQAKKLVESLPQEIKANVAKAEAEKIKAALEAVGGTVVLE

SEQ ID NO: 1214 - DNA, 598 bp, Homo sapien
gagcccggaaggtccggcgcccagagctaacgggagtcccaggttaaacactttaagatgagaaaaattgatctctgtctgagctctgaagggtccgaagtgattttagctacatcaagtgatgaaaaacacccacctgaaaatatcattgatgggaatccagaaacgttttggaccaccacaggaatgtttccccaggaattcattatttgtttccacaaacatgtaaggattgaaaggcttgtaatccaaagttactttgtacagaccttgaagattgaaaaaacacgtctaaagagccagttgattttgagcaatggattgaaaaagatttggtacacacagaggggcagcttcaaaatgaagaaattgtggcacatgatggctccgctacttacttgagattcattattgtatcagcctttgatcattttgcatctgtgcatagcgtttctgcagaaggaacagtagtctcaaatctttcctcataatgataacaaaatgctcttgcatgattttttaacaatatatttaaacaggaagttgtcactgatatactttattaaaaggatttttatcaaaaaaaaaaaaaaaaaaa

SEQ ID NO: 1215 - protein, 114 aa, Homo sapien
MRKIDLCLSSEGSEVILATSSDEKHPPENIIDGNPETFWTTTGMFPQEFIICFHKHVRIERLVIQSYFVQTLKIEKTRLKSQLILSNGLKKIWYTQRGSFKMKKLWHMMAPLLT

SEQ ID NO: 1216 - DNA, 1426 bp, Homo sapien
ggatccgcgtgctaaagaaaaatcgccgttaaagcagttttctttttcactgtctttttcttttcgcggggaacccagctgttcctgcgagggccacctcctcaggaagaccccgcagctctcccgcggcgcttctgcaggaggcagcgacagtttcgagaacccgggccttcccctcccagtgcctccgggggttcgcgtttcaggcgctcgtgttttccgggaagggcaggcgcgctgggccttggggagctgcgctcggcgggcggaccgggggatcatggaagctgataaagatgacacacaacaaattcttaaggagcattcgccagatgaatttataaaagatgaacaaaataagggactaattgatgaaattacaaagaaaaatattcagctaaagaaggagatccaaaagcttgaaacggagttacaagaggctaccaaagaattccagattaaagaggatattcctgaaacaaagatgaaattcttatcagttgaaactcctgagaatgacagccagttgtcaaatatctcctgttcgtttcaagtgagctcgaaagttccttatgagatacaaaaaggacaagcacttatcacctttgaaaaagaagaagttgctcaaaatgtggtaagcatgagtaaacatcatgtacagataaaagatgtaaatctggaggttacggccaagccagttccattaaattcaggagtcagattccaggtttatgtagaagtttctaaaatgaaaatcaatgttactgaaattcctgacacactgcgtgaagatcaaatgagagacaaactagagctgagcttttcaaagttccgaaatggaggcggagaggtggaccgcgtggactatgacagacagtccgggagtgcagtcatcacgtttgtggagattggagtggctgacaagattttgaaaaagaaagaataccctctttatataaatcaaacctgccatagagttactgtttctccatacacagaaatacacttgaaaaagtatcagatattttcaggaacatctaagaggacagtgcttctgacaggaatggaaggcattcaaatggatgaagaaattgtggaggatttaattaacattcactttcaacgggcaaagaatggaggtggagaagtagatgtggtcaagtgttctctaggtcaacctcacatagcatactttgaagaatagacttaacagaatcatgaaaactatagctttttaacccggattactgtaaatgtttgacaagaatgaatatgcttttccttaaaaaatgaaaactttaatttttaccatccatttatgtttagatacaaaacttatttccatgtttctgaatcttctttgtttcaaatggtgctgcatgttttcaactacaataagtgcactgtaataaaaagttttgtttat

SEQ ID NO: 1217 - protein, 307 aa, Homo sapien
MEADKDDTQQILKEHSPDEFIKDEQNKGLIDEITKKNIQLKKEIQKLETELQEATKEFQIKEDIPETKMKFLSVETPENDSQLSNISCSFQVSSKVPYEIQKGQALITFEKEEVAQNVVSMSKHHVQIKDVNLEVTAKPVPLNSGVRFQVYVEVSKMKINVTEIPDTLREDQMRDKLELSFSKFRNGGGEVDRVDYDRQSGSAVITFVEIGVADKILKKKEYPLYINQTCHRVTVSPYTEIHLKKYQIFSGTSKRTVLLTGMEGIQMDEEIVEDLINIHFQRAKNGGGEVDVVKCSLGQPHIAYFEE

SEQ ID NO: 1218 - DNA, 2653 bp, Homo sapien
gagcgcggctggagtttgctgctgccgctgtgcagtttgttcaggggcttgtggtggtgagtccgagaggctgcgtgtgagagacgtgagaaggatcctgcactgaggaggtggaaagaagaggattgctcgaggaggcctggggtctgtgaggcagcggagctgggtgaaggctgcgggttccggcgaggcctgagctgtgctgtcgtcatgcctcaaacccgatcccaggcacaggctacaatcagttttccaaaaaggaagctgtctcgggcattgaacaaagctaaaaactccagtgatgccaaactagaaccaacaaatgtccaaaccgtaacctgttctcctcgtgtaaaagccctgcctctcagccccaggaaacgtctgggcgatgacaacctatgcaacactccccatttacctccttgttctccaccaaagcaaggcaagaaagagaatggtccccctcactcacatacacttaagggacgaagattggtatttgacaatcagctgacaattaagtctcctagcaaaagagaactagccaaagttcaccaaaacaaaatactttcttcagttagaaaaagtcaagagatcacaacaaattctgagcagagatgtccactgaagaaagaatctgcatgtgtgagactattcaagcaagaaggcacttgctaccagcaagcaaagctggtcctgaacacagctgtcccagatcggctgcctgccagggaaagggagatggatgtcatcaggaatttcttgagggaacacatctgtgggaaaaaagctggaagcctttacctttctggtgctcctggaactggaaaaactgcctgcttaagccggattctgcaagacctcaagaaggaactgaaaggctttaaaactatcatgctgaattgcatgtccttgaggactgcccaggctgtattcccagctattgctcaggagatttgtcaggaagaggtatccaggccagctgggaaggacatgatgaggaaattggaaaaacatatgactgcagagaagggccccatgattgtgttggtattggacgagatggatcaactggacagcaaaggccaggatgtattgtacacgctatttgaatggccatggctaagcaattctcacttggtgctgattggtattgctaataccctggatctcacagatagaattctacctaggcttcaagctagagaaaaatgtaagccacagctgttgaacttcccaccttataccagaaatcagatagtcactattttgcaagatcgacttaatcaggtatctagagatcaggttctggacaatgctgcagttcaattctgtgcccgcaaagtctctgctgtttcaggagatgttcgcaaagcactggatgtttgcaggagagctattgaaattgtagagtcagatgtcaaaagccagactattctcaaaccactgtctgaatgtaaatcaccttctgagcctctgattcccaagagggttggtcttattcacatatcccaagtcatctcagaagttgatggtaacaggatgaccttgagccaagaaggagcacaagattccttccctcttcagcagaagatcttggtttgctctttgatgctcttgatcaggcagttgaaaatcaaagaggtcactctggggaagttatatgaagcctacagtaaagtctgtcgcaaacagcaggtggcggctgtggaccagtcagagtgtttgtcactttcagggctcttggaagccaggggcattttaggattaaagagaaacaaggaaacccgtttgacaaaggtgtttttcaagattgaagagaaagaaatagaacatgctctgaaagataaagctttaattggaaatatcttagctactggattgccttaaattcttctcttacaccccacccgaaagtattcagctggcatttagagagctacagtcttcattttagtgctttacacattcgggcctgaaaacaaatatgaccttttttacttgaagccaatgaattttaatctatagattctttaatattagcacagaataatatctttgggtcttactatttttacccataaaagtgaccaggtagaccctttttaattacattcactacttctaccacttgtgtatctctagccaatgtgcttgcaagtgtacagatctgtgtagaggaatgtgtgtatatttacctcttcgtttgctcaaacatgagtgggtatttttttgtttgttttttttgttgttgttgtttttgaggcgcgtctcaccctgttgcccaggctggagtgcaatggcgcgttctctgctcactacagcacccgcttcccaggttgaagtgattctcttgcctcagcctcccgagtagctgggattacaggtgcccaccaccgcgcccagctaattttttaatttttagtagagacagggttttaccatgttggccaggctggtcttgaactcctgaccctcaagtgatctgcccaccttggcctccctaagtgctgggattataggcgtgagccaccatgctcagccattaaggtattttgttaagaactttaagtttagggtaagaagaatgaaaatgatccagaaaaatgcaagcaagtccacatggagatttggaggacactggttaaag

SEQ ID NO: 1219 - protein, 560 aa, Homo sapien
MPQTRSQAQATISFPKRKLSRALNKAKNSSDAKLEPTNVQTVTCSPRVKALPLSPRKRLGDDNLCNTPHLPPCSPPKQGKKENGPPHSHTLKGRRLVFDNQLTIKSPSKRELAKVHQNKILSSVRKSQEITTNSEQRCPLKKESACVRLFKQEGTCYQQAKLVLNTAVPDRLPAREREMDVIRNFLREHICGKKAGSLYLSGAPGTGKTACLSRILQDLKKELKGFKTIMLNCMSLRTAQAVFPAIAQEICQEEVSRPAGKDMMRKLEKHMTAEKGPMIVLVLDEMDQLDSKGQDVLYTLFEWPWLSNSHLVLIGIANTLDLTDRILPRLQAREKCKPQLLNFPPYTRNQIVTILQDRLNQVSRDQVLDNAAVQFCARKVSAVSGDVRKALDVCRRAIEIVESDVKSQTILKPLSECKSPSEPLIPKRVGLIHISQVISEVDGNRMTLSQEGAQDSFPLQQKILVCSLMLLIRQLKIKEVTLGKLYEAYSKVCRKQQVAAVDQSECLSLSGLLEARGILGLKRNKETRLTKVFFKIEEKEIEHALKDKALIGNILATGLP

SEQ ID NO: 1220 - DNA, 2653 bp, Homo sapien; identical to SEQ ID NO: 1218

SEQ ID NO: 1221 - protein, 560 aa, Homo sapien; identical to SEQ ID NO: 1219

SEQ ID NO: 1222 - DNA, 1804 bp, Homo sapien
gcggtggtggacacgtcgagccgggtagaagtggaggggccgttcgaagagtcgtgagggggtgacgggttaagattcggagagagaggtgctagtggctggacttgacctggaaagaatcttctgctgactctcaacttttcctggaaaaaatggatcattcccaccatatggggatgagctatatggactccaacagtaccatgcaaccttctcaccatcacccaaccacttcagcctcacactcccatggtggaggagacagcagcatgatgatgatgcctatgaccttctactttggctttaagaatgtggaactactgttttccggtttggtgatcaatacagctggagaaatggctggagcttttgtggcagtgtttttactagcaatgttctatgaaggactcaagatagcccgagagagcctgctgcgtaagtcacaagtcagcattcgctacaattccatgcctgtcccaggaccaaatggaaccatccttatggagacacacaaaactgttgggcaacagatgctgagctttcctcacctcctgcaaacagtgctgcacatcatccaggtggtcataagctacttcctcatgctcatcttcatgacctacaacgggtacctctgcattgcagtagcagcaggggccggtacaggatacttcctcttcagctggaagaaggcagtggtagtggatatcacagagcattgccattgacatcaaactctatggcgtggccttatcgattgcagtgggaagttgttgaagacttgaagacgtgattcctgctccaatcatcccttcttgctcctctttgtgcacgtacacacacacacacacacacacacacacacacacacccctgctcaacagaggtttagtttacagtctctgaactaaagtagtaacctcccaaattgttttttctaataagctgagattcccatttctcttaaggagaagccacccatgagatgtcttttccttctccatcatcttagagccaagttatatgttcttgtctaatccatgtagctttttgttcaatgacttgatcatctgcttcctttttgaatttttaacagatagtaagtaaatttggtggttttttcccctgggtcagtgatggaaaggggttaacttcagccaggattgatggcagctgagggaaattcttgcccaactaaacccagaactcaaacttaacattagaaaataaggtccagggccggacacagtggcccatgcctgtaatcccagcactttggggggccaaggcaggctggatcacctgaggacaggagttcgagaccagtctggccaacatggggaaaccccgtctctactaaaaatacaaaaattagccgggcatggtggtgggcgcctgtaatcccagctactcagaaggctgaggcaggagaatcacttgaacctaggaggcggaggttgcagtgagccaagatggcgccattgcactccagcctgggtgacaagagtgaaactccatctcaaaaaaaaagaaaagaaggtccagcttttggattcaatgagtgggaaatacattgtgcctttctctagatgtgatacgttataccaaaatctttgtagtgtgcagagcggtggtttgagactaaatacaggcttagaacttgcagagtgtgtattcttggatggctgatgcatcgacttgcattcccacttaacactttgattagccatgaacttgccaatcaaaaaatgacaatcaatttgagaaaatagaaatagatatttttaaataaaaccattcacagttt

SEQ ID NO: 1223 - protein, 190 aa, Homo sapien
MDHSHHMGMSYMDSNSTMQPSHHHPTTSASHSHGGGDSSMMMMPMTFYFGFKNVELLFSGLVINTAGEMAGAFVAVFLLAMFYEGLKIARESLLRKSQVSIRYNSMPVPGPNGTILMETHKTVGQQMLSFPHLLQTVLHIIQVVISYFLMLIFMTYNGYLCIAVAAGAGTGYFLFSWKKAVVVDITEHCH

SEQ ID NO: 1224 - DNA, 3111 bp, Homo sapien
ggagtgcggggcgcccggcgccaggggagccgccacagccatggattgcaaagatagaccagcttttccagttaagaagttaatacaagcccgtctgccgtttaagcgcctgaatcttgtcccaaaggggaaagccgatgacatgtcagacgatcagggtacttctgtgcaaagtaaaagccccgatttagaggcctctttggacaccttggaaaacaactgtcatgtgggttctgacatagactttagaccgaaacttgtcaacgggaagggtcccttagataactttttaagaaatagaatcgaaaccagtattggccagagcacagtcatcattgatttgacagaggactcgaatgagcagccagacagtcttgtggaccacaataaactaaattctgaagcctctccctccagggaggcaataaatggccagcgagaagacactggggatcagcaggggttgttgaaggccattcagaacgacaagttggcatttcctggagagaccctttcagacattccttgcaaaacagaggaggagggtgttggctgtggaggtgcagggaggagaggcgactcccaggaatgttcgccacggagctgcccggagctgacgagtggcccgagaatgtgccccagaaaggagcaggacagttggagtgaagctgggggcatcctgttcaaagggaaggtgcctatggtggtcttgcaggacatcttggctgtgagaccaccgcaaatcaagtcccttccagccacaccccaaggcaagaacatgacccctgagagtgaggtgctggaatctttccccgaagaagactctgtactcagccattcgtccctgagctctccctcttccaccagctcgcccgaggggccgcctgctcccccaaagcagcacagcagtaccagtcccttccccacctccacgcccctccgcagaataactaagaaattcgtcaaaggctctacagagaagaacaagctcagactgcaaagagatcaggagcgtctgggcaagcagctcaagttacgtgcagaaagggaagaaaaggagaagctgaaagaggaggccaagcgggccaaggaggaggccaagaagaagaaggaggaagagaaggagcttaaggaaaaggagaggcgggagaagcgggagaaggatgagaaggagaaggcggagaagcagcggctcaaggaggagcggcgcaaggagagacaggaagccctggaggctaaacttgaggaaaaaaggaaaaaggaagaagagaaacggttaagagaagaagagaagcgcattaaagcagagaaggccgaaatcacgaggttcttccagaaaccaaagactccacaggcccccaagaccctggccggctcctgtgggaagtttgccccctttgaaattaaagagcacatggtcctggcccctcggcgtcggaccgctttccatccagacctctgcagtcagctggaccagctcctccagcagcagagcggcgagttctccttcttgaaagacctcaaaggccggcagcccctgaggtccggacccacgcacgtttccacccggaatgcagatatttttaacagtgatgtcgtcatcgtggagcgtgggaagggcgacggtgttcccgagaggaggaagtttggcaggatgaagctcctgcagttctgtgagaaccaccggcctgcctactggggtacctggaataagaagacggcactcatccgcgcgcgagacccctgggcccaggacacgaagctcctggactatgaggtggacagtgatgaggagtgggaagaagaggagcctggggagtccctgtcccacagtgagggggatgatgatgacgacatgggagaggatgaagatgaggacgatggtttctttgtgccccatgggtacctgtctgaggacgaaggtgtgacagaggagtgtgccgaccctgagaaccataaggtccgccagaaactgaaggccaaggagtgggacgagttcctggctaaggggaagcgctttcgcgtcctgcaacctgtgaagatcggctgcgtgtgggcggctgacagagactgcgcaggcgatgacctgaaggtactgcagcagttcgcagcctgcttcctggagaccctgccggcccaggaggagcagacgcccaaggcctccaagcgggagaggagagacgagcagatcctggcccagctgctgccgctcctgcacggcaatgtgaacgggagcaaggtcatcatccgggagttccaggagcactgccgccggggactgctcagcaaccacaccggcagcccgcggacgccctccaccacctacctgcacacccccacccccagcgaggatgccgccatcccctctaagtcccggctcaagcggctcatttccgagaactcagtgtatgagaagcggcctgacttcaggatgtgctggtacgtgcacccgcaggtgctacagagcttccagcaggagcacctgcccgtgccgtgccagtggagctatgtgacatcggtgccctcggcccccaaagaggacagtggcagcgtcccctccacggggcccagccagggcactcccatctcgctgaagaggaagtcagcgggcagcatgtgcatcacccaattcatgaagaagcgcaggcacgacggccagattggtgctgaagacatggacggcttccaggcagacacggaggaggaggaagaggaggagggcgactgtatgatcgtggatgtcccggatgctgtggaggtccaagccccgtgtggagccgcttccggagctgggggtggtgtgggggtggacaccggcaaggccaccctgaccgcgagcccactgggtgcatcctgagagcaggggtgacgtatgtagaacgcttagggtgtcctccccacagagcagatacttgaaccgactcaattcctgtgtaaagagcactttgtcctgcttcacggacctccccaaagtgtgcagagttctatataggatgctggattagttcctttgatatttgtaaaaattcccccaagagccgcatatgaatctgccctttaataaagcattattgagattgctggcctattggggaagctgcgggcacagga

SEQ ID NO: 1225 - protein, 938 aa, Homo sapien
MDCKDRPAFPVKKLIQARLPFKRLNLVPKGKADDMSDDQGTSVQSKSPDLEASLDTLENNCHVGSDIDFRPKLVNGKGPLDNFLRNRIETSIGQSTVIIDLTEDSNEQPDSLVDHNKLNSEASPSREAINGQREDTGDQQGLLKAIQNDKLAFPGETLSDIPCKTEEEGVGCGGAGRRGDSQECSPRSCPELTSGPRMCPRKEQDSWSEAGGILFKGKVPMVVLQDILAVRPPQIKSLPATPQGKNMTPESEVLESFPEEDSVLSHSSLSSPSSTSSPEGPPAPPKQHSSTSPFPTSTPLRRITKKFVKGSTEKNKLRLQRDQERLGKQLKLRAEREEKEKLKEEAKRAKEEAKKKKEEEKELKEKERREKREKDEKEKAEKQRLKEERRKERQEALEAKLEEKRKKEEEKRLREEEKRIKAEKAEITRFFQKPKTPQAPKTLAGSCGKFAPFEIKEHMVLAPRRRTAFHPDLCSQLDQLLQQQSGEFSFLKDLKGRQPLRSGPTHVSTRNADIFNSDVVIVERGKGDGVPERRKFGRMKLLQFCENHRPAYWGTWNKKTALIRARDPWAQDTKLLDYEVDSDEEWEEEEPGESLSHSEGDDDDDMGEDEDEDDGFFVPHGYLSEDEGVTEECADPENHKVRQKLKAKEWDEFLAKGKRFRVLQPVKIGCVWAADRDCAGDDLKVLQQFAACFLETLPAQEEQTPKASKRERRDEQILAQLLPLLHGNVNGSKVIIREFQEHCRRGLLSNHTGSPRTPSTTYLHTPTPSEDAAIPSKSRLKRLISENSVYEKRPDFRMCWYVHPQVLQSFQQEHLPVPCQWSYVTSVPSAPKEDSGSVPSTGPSQGTPISLKRKSAGSMCITQFMKKRRHDGQIGAEDMDGFQADTEEEEEEEGDCMIVDVPDAVEVQAPCGAASGAGGGVGVDTGKATLTASPLGAS

SEQ ID NO: 1226 - DNA, 3592 bp, Homo sapien
ggcggggggcgcacagagccagaggggcttgcgagcggcggctgagggaccgcggggagggggcgccgagcggctccagcgcagagactctcactgcacgccggaggccccttcctcgctccgcccgcgcgaccgcgcgccccagtcccgccccgccccgctaaccgccccagacacagcgctcgccgagggtcgcttggaccctgatcttacccgtgggcaccctgcgctctgcctgccgcgaagaccggctccccgacccgcagaagtcaggagagagggtgaagcggagcagcccgaggcggggcagcctcccggagcagcgccgcgcagagcccgggacaatggggccgcggcggctgctgctggtggccgcctgcttcagtctgtgcggcccgctgttgtctgcccgcacccgggcccgcaggccagaatcaaaagcaacaaatgccaccttagatccccggtcatttcttctcaggaaccccaatgataaatatgaaccattttgggaggatgaggagaaaaatgaaagtgggttaactgaatacagattagtctccatcaataaaagcagtcctcttcaaaaacaacttcctgcattcatctcagaagatgcctccggatatttgaccagctcctggctgacactctttgtcccatctgtgtacaccggagtgtttgtagtcagcctcccactaaacatcatggccatcgttgtgttcatcctgaaaatgaaggtcaagaagccggcggtggtgtacatgctgcacctggccacggcagatgtgctgtttgtgtctgtgctcccctttaagatcagctattacttttccggcagtgattggcagtttgggtctgaattgtgtcgcttcgtcactgcagcattttactgtaacatgtacgcctctatcttgctcatgacagtcataagcattgaccggtttctggctgtggtgtatcccatgcagtccctctcctggcgtactctgggaagggcttccttcacttgtctggccatctgggctttggccatcgcaggggtagtgcctctcgtcctcaaggagcaaaccatccaggtgcccgggctcaacatcactacctgtcatgatgtgctcaatgaaaccctgctcgaaggctactatgcctactacttctcagccttctctgctgtcttcttttttgtgccgctgatcatttccacggtctgttatgtgtctatcattcgatgtcttagctcttccgcagttgccaaccgcagcaagaagtcccgggctttgttcctgtcagctgctgttttctgcatcttcatcatttgcttcggacccacaaacgtcctcctgattgcgcattactcattcctttctcacacttccaccacagaggctgcctactttgcctacctcctctgtgtctgtgtcagcagcataagctcgtgcatcgaccccctaatttactattacgcttcctctgagtgccagaggtacgtctacagtatcttatgctgcaaagaaagttccgatcccagcagttataacagcagtgggcagttgatggcaagtaaaatggatacctgctctagtaacctgaataacagcatatacaaaaagctgttaacttaggaaaagggactgctgggaggttaaaaagaaaagtttataaaagtgaataacctgaggattctattagtccccacccaaactttattgattcacctcctaaaacaacagatgtacgacttgcatacctgctttttatgggagctgtcaagcatgtatttttgtcaattaccagaaagataacaggacgagatgacggtgttattccaagggaatattgccaatgctacagtaataaatgaatgtcacttctggatatagctaggtgacatatacatacttacatgtgtgtatatgtagatgtatgcacacacatatattatttgcagtgcagtatagaataggcactttaaaacactctttccccgcaccccagcaattatgaaaataatctctgattccctgatttaatatgcaaagtctaggttggtagagtttagccctgaacatttcatggtgttcatcaacagtgagagactccatagtttgggcttgtaccacttttgcaaataagtgtattttgaaattgtttgacggcaaggtttaagttattaagaggtaagacttagtactatctgtgcgtagaagttctagtgttttcaattttaaacatatccaagtttgaattcctaaaattatggaaacagatgaaaagcctctgttttgatatgggtagtattttttacattttacacactgtacacataagccaaaactgagcataagtcctctagtgaatgtaggctggctttcagagtaggctattcctgagagctgcatgtgtccgcccccgatggaggactccaggcagcagacacatgccagggccatgtcagacacagattggccagaaaccttcctgctgagcctcacagcagtgagactggggccactacatttgctccatcctcctgggattggctgtgaactgatcatgtttatgagaaactggcaaagcagaatgtgatatcctaggaggtaatgaccatgaaagacttctctacccatcttaaaaacaacgaaagaaggcatggacttctggatgcccatccactgggtgtaaacacatctagtagttgttctgaaatgtcagttctgatatggaagcacccattatgcgctgtggccactccaataggtgctgagtgtacagagtggaataagacagagacctgccctcaagagcaaagtagatcatgcatagagtgtgatgtatgtgtaataaatatgtttcacacaaacaaggcctgtcagctaaagaagtttgaacatttgggttactatttcttgtggttataacttaatgaaaacaatgcagtacaggacatatattttttaaaataagtctgatttaattgggcactatttatttacaaatgttttgctcaatagattgctcaaatcaggttttcttttaagaatcaatcatgtcagtctgcttagaaataacagaagaaaatagaattgacattgaaatctaggaaaattattctataatttccatttacttaagacttaatgagactttaaaagcattttttaacctcctaagtatcaagtatagaaaatcttcatggaattcacaaagtaatttggaaattaggttgaaacatatctcttatcttacgaaaaaatggtagcattttaaacaaaatagaaagttgcaaggcaaatgtttatttaaaagagcaggccaggcgcggtggctcacgcctgtaatcccagcactttgggaggctgaggcgggtggatcacgaggtcaggagatcgagaccatcctggctaacacggtgaaacccgtctctactaaaaatgcaaaaaaaattagccgggcgtggtggcaggcacctgtagtcccagctactcgggaggctgaggcaggagactggcgtgaacccaggaggcggaccttgtagtgagccgagatcgcgccactgtgctccagcctgggcaacagagcaagactccatctc

SEQ ID NO: 1227 - protein, 425 aa, Homo sapien
MGPRRLLLVAACFSLCGPLLSARTRARRPESKATNATLDPRSFLLRNPNDKYEPFWEDEEKNESGLTEYRLVSINKSSPLQKQLPAFISEDASGYLTSSWLTLFVPSVYTGVFVVSLPLNIMAIVVFILKMKVKKPAVVYMLHLATADVLFVSVLPFKISYYFSGSDWQFGSELCRFVTAAFYCNMYASILLMTVISIDRFLAVVYPMQSLSWRTLGRASFTCLAIWALAIAGVVPLVLKEQTIQVPGLNITTCHDVLNETLLEGYYAYYFSAFSAVFFFVPLIISTVCYVSIIRCLSSSAVANRSKKSRALFLSAAVFCIFIICFGPTNVLLIAHYSFLSHTSTTEAAYFAYLLCVCVSSISSCIDPLIYYYASSECQRYVYSILCCKESSDPSSYNSSGQLMASKMDTCSSNLNNSIYKKLLT

SEQ ID NO: 1228 - DNA, 887 bp, Homo sapien
tctttggtgacttgtccactccagtgtggcatcatgtggcagctgctcctcccaactgctctgctacttctagtttcagctggcatgcggactgaagatctcccaaaggctgtggtgttcctggagcctcaatggtacagcgtgcttgagaaggacagtgtgactctgaagtgccagggagcctactcccctgaggacaattccacacagtggtttcacaatgagagcctcatctcaagccaggcctcgagctacttcattgacgctgccacagtcaacgacagtggagagtacaggtgccagacaaacctctccaccctcagtgacccggtgcagctagaagtccatatcggctggctgttgctccaggcccctcggtgggtgttcaaggaggaagaccctattcacctgaggtgtcacagctggaagaacactgctctgcataaggtcacatatttacagaatggcaaagacaggaagtattttcatcataattctgacttccacattccaaaagccacactcaaagatagcggctcctacttctgcagggggcttgttgggagtaaaaatgtgtcttcagagactgtgaacatcaccatcactcaaggtttggcagtgtcaaccatctcatcattctctccacctgggtaccaagtctctttctgcttggtgatggtactcctttttgcagtggacacaggactatatttctctgtgaagacaaacatttgaagctcaacaagagactggaaggaccataaacttaaatggagaaaggaccctcaagacaaatgacccccatcccatgggagtaataagagcagtggcagcagcatctctgaacatttctctggatttgcaaccccatcatcctcaggcctctc

SEQ ID NO: 1229 - protein, 233 aa, Homo sapien
MWQLLLPTALLLLVSAGMRTEDLPKAVVFLEPQWYSVLEKDSVTLKCQGAYSPEDNSTQWFHNESLISSQASSYFIDAATVNDSGEYRCQTNLSTLSDPVQLEVHIGWLLLQAPRWVFKEEDPIHLRCHSWKNTALHKVTYLQNGKDRKYFHHNSDFHIPKATLKDSGSYFCRGLVGSKNVSSETVNITITQGLAVSTISSFSPPGYQVSFCLVMVLLFAVDTGLYFSVKTNI

SEQ ID NO: 1230 - DNA, 1977 bp, Homo sapien
cactccagtgtggcatcatgtggcagctgctcctcccaactgctctgctacttctagtttcagctggcatgcggactgaagatctcccaaaggctgtggtgttcctggagcctcaatggtacagggtgctcgagaaggacagtgtgactctgaagtgccagggagcctactcccctgaggacaattccacacagtggtttcacaatgagaacctcatctcaagccaggcctcgagctacttcattgacgctgccacagtcgacgacagtggagagtacaggtgccagacaaacctctccaccctcagtgacccggtgcagctagaagtccatgtcggctggctgttgctccaggcccctcggtgggtgttcaaggaggaagaccctattcacctgaggtgtcacagctggaagaacactgctctgcataaggtcacatatttacagaatggcaaagacaggaagtattttcatcataattctgacttccacattccaaaagccacactcaaagatagcggctcctacttctgcagggggcttgttgggagtaaaaatgtgtcttcagagactgtgaacatcaccatcactcaaggtttggcagtgtcaaccatctcatcattctctccacctgggtaccaagtctctttctgcttggtgatggtactcctttttgcagtggacacaggactatatttctctgtgaagacaaacatttgaagctcaacaagagactggaaggaccataaacttaaatggagaaaggaccctcaagacaaatgacccccatcccatgggagtaataagagcagtggcagcagcatctctgaacatttctctggatttgcaaccccatcatcctcaggcctctctacaagcagcaggaaacatagaactcagagccagatcctttatccaactctcgatttttccttggtctccagtggaagggaaaagcccatgatcttcaagcagggaagccccagtgagtagctgcattcctagaaattgaagtttcagagctacacaaacactttttctgtcccaaccattccctcacagtaaaacaacaatacaggctagggatggtaatcctttaaacatacaaaaattgctcgtattataaattacccagtttagaggggaaaaaagaaaataattattcctaaacaaatggataagtagaattaatgattgaggcaggaccctacagagtgtgggaactgctggggatctagagaattcagtgggaccaatgaaagcatggctgagaaatagcagggtagtccaggatagtctaagggaggtgttcccatctgagcccagagataagggtgtcttcctagaacattagccgtagtggaattaacaggaaatcatgagggtgacgtagaattgagtcttccaggggactctatcagaactggaccatttccaagtatataacgatgagccctctaatgctaggagtagcaaatggtcctaggaaggggactgaggattggggtgggggtggggtggaaaagaaagtacagaacaaaccctgtgtcactgtcccaagttaagctaagtgaacagaactatctcagcatcagaatgagaatgagaaagcctgagaagaaagaaccaaccacaagcacacaggaaggaaagcgcaggaggtgaaaatgctttcttggccagggtagtaagaattagaggttaatgcagggactgtaaaaccaccttttctgcttcaatgtctagttcctgtatagctttgttcattgcatttattaaacaaatgttgtataaccaatactaaatgtactactgagcttcactgagttacgctgtgaaactttcaaatccttcttcagtcagttccaatgaggtggggatggagaagacaattgttgcttatgaaaaaaagctttagctgtctcctgttttgtaagctttcagtgcaacatttcttggttccaataaagcattttac

SEQ ID NO: 1231 - protein, 233 aa, Homo sapien
MWQLLLPTALLLLVSAGMRTEDLPKAVVFLEPQWYRVLEKDSVTLKCQGAYSPEDNSTQWFHNENLISSQASSYFIDAATVDDSGEYRCQTNLSTLSDPVQLEVHVGWLLLQAPRWVFKEEDPIHLRCHSWKNTALHKVTYLQNGKDRKYFHHNSDFHIPKATLKDSGSYFCRGLVGSKNVSSETVNITITQGLAVSTISSFSPPGYQVSFCLVMVLLFAVDTGLYFSVKTNI

SEQ ID NO: 1232 - DNA, 3404 bp, Homo sapien
gcagttcagacccccccacacccatcaaagagccgctcctcccccccgcaggcgccttcgccgcctccctcccttcctttcctttccgctcctcttccgacctgtccacccgggaggaagggagctggaaagggggcggaaacctctcccctccaaaaagcacaacaaaactgttcagtgcggaggagccgggttcgcccctgccggacagcggggggctttgttccccgcagttgtttcctgcccatttgacctgtcagctgctggggaaacgctgctgttgacctttggttgaactgctaaggcgattttgctgatttttctttctttttccgcgagggctgtcttttgctcctccaaatgagcccagtccccctcccttctccccaaagcgctccaagagaaagtgccaggaaggggcttgtcccggaaggcctggcggctgagcggggccaggtcctggttaggccaccagggtgggcgtccgcgccattgtttgagcttgtcggcgctggtgggagagatgagggcaattcctctgggacgcaagtcccctcgaatggccggggctggccgggatgttccccgcacggcgctgccctcgagtccccccgatggagagcgcgggcgcgccttccttcgctggcgtccaaacccgggaccagctagaacacagcagggctgggactgggttccagccccacgtggagtctggatttgttttgttgtgttttgctttccttcctggaagaaatcccgaggggaccgccctagagcggcagctccaggacctcggcccttgggcttccgggggtgcagccacttaggccccgctcccggggagagagggattattttttaagatttatccccagggcgcgcggcatttccctgtccctcgtgaatcccgttgagagtcctccctccccaacctcctccatttccccagccagaccgattcgagagccctggagattctgggcgaggctagtgactgggtagtacaggcctctagccccaccattgctctctctgtcttcagttccccaggagggcaatggcatcaaacagcacagctctgggggatgtcaatattgcataccttttctacctaaagggaaaatgactcgcttttctgcttgcaaatatggtagtttctgcttacaaatgtaatacaatgcccatgacagccaaggactggaagcataagttgctaggtcttacaggtgattttttacaatgaagcaaactcactatgttagacaccatttacattggatgtctccaactaacaaaagtaactaaagacagatgtaggtgtaaattgagagtgaaatttgaccctttagaccgtcacaacttccttgggcttatcctgggtgcttataggagaggtgggctccacccacaaaaatggactgctcagaaaaatgagggagagagaaagggtggccactttcccgagccaagaaattccttgaaaaaaaatcagaacatctgaaaccagagagccgatttccttaccgggaggcagttcctggctaacgaagaggaagcacgatgggaagaaaagttcactccaacggaagccagtttgctgaacatagcagatcgcccaggaggactgggagagactgcaaaccagttcgagcccccagcatggcgttaggtgtcagccagctggcaggaaggtccaggtgtctgtgttcagagtctcaaggcggctatgagaggttttcctccgagtacccagaattctgttctaaaaccaaggccctggcagccatcccacccccggttccccccagtgccacagagcccttggacctgggctgcagctcctgtgggaccccactacacgaccaggggggtcctgtggagatccttcccttcctctacctcggcagtgcctaccatgctgcccggagagacatgctggacgccctgggcatcacggctctgttgaatgtctcctcggactgcccaaaccactttgaaggacactatcagtacaagtgcatcccagtggaagataaccacaaggccgacatcagctcctggttcatggaagccatagagtacatcgatgccgtgaaggactgccgtgggcgcgtgctggtgcactgccaggcgggcatctcgcggtcggccaccatctgcctggcctacctgatgatgaagaaacgggtgaggctggaggaggccttcgagttcgttaagcagcgccgcagcatcatctcgcccaacttcagcttcatggggcagctgctgcagttcgagtcccaggtgctggccacgtcctgtgctgcggaggctgctagcccctcgggacccctgcgggagcggggcaagacccccgccacccccacctcgcagttcgtcttcagctttccggtctccgtgggcgtgcactcggcccccagcagcctgccctacctgcacagccccatcaccacctctcccagctgttagagccgccctgggggccccagaaccagagctggctcccagcaagggtaggacgggccgcatgcgggcagaaagttgggactgagcagctgggagcaggcgaccgagctccttccccatcatttctccttggccaacgacgaggccagccagaatggcaataaggactccgaatacataataaaagcaaacagaacactccaacttagagcaataacggctgccgcagcagccagggaagaccttggtttggtttatgtgtcagtttcacttttccgatagaaatttcttacctcatttttttaagcagtaaggcttgaagtgatgaaacccacagatcctagcaaatgtgcccaaccagctttactaaagggggaggaagggagggcaaagggatgagaagacaagtttcccagaagtgcctggttctgtgtacttgtccctttgttgtcgttgttgtagttaaaggaatttcattttttaaaagaaatcttcgaaggtgtggttttcatttctcagtcaccaacagatgaataattatgcttaataataaagtatttattaagactttcttcagagtatgaaagtacaaaaagtctagttacagtggatttagaatatatttatgttgatgtcaaacagctgagcaccgtagcatgcagatgtcaaggcagttaggaagtaaatggtgtcttgtagatatgtgcaaggtagcatgatgagcaacttgagtttgttgccactgagaagcaggcgggttgggtgggaggaggaagaaagggaagaattaggtttgaattgctttttaaaaaaaaaagaaaagaaaaagacagcatctcactatgttgccaaggctcatcttgagaagcaggcgggttgggtgggaggaggaagaaagggaagaattaggtttgaattgcttttttaaaaaaaaa

SEQ ID NO: 1233 - protein, 303 aa, Homo sapien
MGRKVHSNGSQFAEHSRSPRRTGRDCKPVRAPSMALGVSQLAGRSRCLCSESQGGYERFSSEYPEFCSKTKALAAIPPPVPPSATEPLDLGCSSCGTPLHDQGGPVEILPFLYLGSAYHAARRDMLDALGITALLNVSSDCPNHFEGHYQYKCIPVEDNHKADISSWFMEAIEYIDAVKDCRGRVLVHCQAGISRSATICLAYLMMKKRVRLEEAFEFVKQRRSIISPNFSFMGQLLQFESQVLATSCAAEAASPSGPLRERGKTPATPTSQFVFSFPVSVGVHSAPSSLPYLHSPITTSPSC

SEQ ID NO: 1234 - DNA, 2241 bp, Homo sapien
ctttgcggccacttctgcaggcgtcccttcttagctctcgcccgcccctttctgcagcctaggcggcccgggttctcttctcttcctcgcgcgcccagccgcctcggttcccggcgaccatggtgacgatggaggagctgcgggagatggactgcagtgtgctcaaaaggctgatgaaccgggacgagaatggcggcggcgcgggcggcagcggcagccacggcaccctggggctgccgagcggcggcaagtgcctgctgctggactgcagaccgttcctggcgcacagcgcgggctacatcctaggttcggtcaacgtgcgctgtaacaccatcgtgcggcggcgggctaagggctccgtgagcctggagcagatcctgcccgccgaggaggaggtacgcgcccgcttgcgctccggcctctactcggcggtcatcgtctacgacgagggcagcccgcgcgccgagagcctccgcgaggacagcaccgtgtcgctggtggtgcaggcgctgcgccgcaacgccgagcgcaccgacatctgcctgctcaaaggcggctatgagaggttttcctccgagtacccagaattctgttctaaaaccaaggccctggcagccatcccacccccggttccccccagcgccacagagcccttggacctgggctgcagctcctgtgggaccccactacacgaccaggggggtcctgtggagatccttcccttcctctacctcggcagtgcctaccatgctgcccggagagacatgctggacgccctgggcatcacggctctgttgaatgtctcctcggactgcccaaaccactttgaaggacactatcagtacaagtgcatcccagtggaagataaccacaaggccgacatcagctcctggttcatggaagccatagagtacatcgatgccgtgaaggactgccgtgggcgcgtgctggtgcactgccaggcgggcatctcgcggtcggccaccatctgcctggcctacctgatgatgaagaaacgggtgaggctggaggaggccttcgagttcgttaagcagcgccgcagcatcatctcgcccaacttcagcttcatgggacagctgctgcagttcgagtcccaggtgctggccacgtcctgtgctgcggaggctgctagcccctcgggacccctgcgggagcggggcaagacccccgccacccccacctcgcagttcgtcttcagctttccggtctccgtgggcgtgcactcggcccccagcagcctgccctacctgcacagccccatcaccacctctcccagctgttagagccgccctgggggccccagaaccagagctggctcccagcaagggtaggacgggccgcatgcgggcagaaagttgggactgagcagctgggagcaggcgaccgagctccttccccatcatttctccttggccaacgacgaggccagccagaatggcaataaggactccgaatacataataaaagcaaacagaacactccaacttagagcaataacggctgccgcagcagccagggaagaccttggtttggtttatgtgtcagtttcacttttccgatagaaatttcttacctcatttttttaagcagtaaggcttgaagtgatgaaacccacagatcctagcaaatgtgcccaaccagctttactaaagggggaggaagggagggcaaagggatgagaagacaagtttcccagaagtgcctggttctgtgtacttgtccctttgttgtcgtcgttgtagttaaaggaatttcattttttaaaagaaatcttcgaaggtgtggttttcatttctcagtcaccaacagatgaataattatgcttaataataaagtatttattaagactttcttcagagtatgaaagtacaaaaagtctagttacagtggatttagaatatatttatgttgatgtcaaacagctgagcaccgtagcatgcagatgtcaaggcagttaggaagtaaatcggtgtcttgtagatatgtgcaaggtagcatgatgagcaacttgagtttgttgccactgagaagcaggcgggttgggtgggaggaggaagaaarggaagaattaggtttgaattgctttttaaaaaaaaaagaaaagaaaaagacagcatctcactatgttgccaaggctcatcttgagaagcaggcgggttgggtgggaggaggaagaaagggaagaattaggtttgaattgcttttttaaaaaaaaagaag

SEQ ID NO: 1235 - protein, 394 aa, Homo sapien [sequence omitted]

SEQ ID NO: 1236 - DNA, 575 bp, Homo sapien
actcttctggtccccacagactcagagagaacccaccatggtgctgtctcctgccgacaagaccaacgtcaaggccgcctggggtaaggtcggcgcgcacgctggcgagtatggtgcggaggccctggagaggatgttcctgtccttccccaccaccaagacctacttcccgcacttcgacctgagccacggctctgcccaggttaagggccacggcaagaaggtggccgacgcgctgaccaacgccgtggcgcacgtggacgacatgcccaacgcgctgtccgccctgagcgacctgcacgcgcacaagcttcgggtggacccggtcaacttcaagctcctaagccactgcctgctggtgaccctggccgcccacctccccgccgagttcacccctgcggtgcacgcctccctggacaagttcctggcttctgtgagcaccgtgctgacctccaaataccgttaagctggagcctcggtagccgttcctcctgcccgctgggcctcccaacgggccctcctcccctccttgcaccggcccttcctggtctttgaataaagtctgagtgggcggc

SEQ ID NO: 1237 - protein, 142 aa, Homo sapien
MVLSPADKTNVKAAWGKVGAHAGEYGAEALERMFLSFPTTKTYFPHFDLSHGSAQVKGHGKKVADALTNAVAHVDDMPNALSALSDLHAHKLRVDPVNFKLLSHCLLVTLAAHLPAEFTPAVHASLDKFLASVSTVLTSKYR

SEQ ID NO: 1238 - DNA, 1982 bp, Homo sapien
gcggacgcgtgggctggaaacaacccaattgtctatcaacagtgactggaaggacaaattgtgctatgtccacacattagaataccagttggcagtcaaaaaggaagagctgatctgtgcagcaatttgagtctcagtaatttcatgtgaataaccctataccttccaatttgaaatcagaagcaaaaaaggctgccaaaatattaagagaattcacagaaataacttccagaaatggacctgataagatcattcctgctcacgtaattgcgaaggctaaaggccttgcaattctgtctgtgatcaaagccgggttcctggtgactgccagaggaggcagcgggattgtagtggcgcgccttccagatggaaaatggtctgcaccctcagccattgggatagctggccttggtggaggatttgaaataggaattgagacacatttacagctacatattccctctgagcattgccctggctgccttccataagtgtggagtgccactccagctttcttaggttgccatctgcatgacacatctttctccatccttttactgtcaatctaatggtatcagacttggtgataattctgaattatgaccgtgctgtagaagcttttgcaaaaggcggaaatctgaccctcggagggaacttgactgtggcggttgggcccttgggaaggaacttggaaggaaacgtggccctgagaagctccgctgccgtcttcacgtactgcaagtcaaggggactctttgcaggcgtgtctttagaagggagctgtttgattgaaaggaaagaaactaatagaaaattttattgtcaagatatccgagcttatgacattttatttggagatacaccgcggcctgctcaagccgaagatctttatgaaattcttgattcctttactgaaaagtatgaaaatgaaggacaacgaatcaatgcaagaaaagcagcaagggagcagaggaagtcttctgctaaagaattacctccaaagccattgtcaagaccacagcagtcatctgcaccagtccagctgaactctggctctcaaagcaacagaaatgaatataagctctatcctggactttccagctatcatgagagagttggcaatttgaatcaacccatagaagtgacagcgctgtattcatttgaaggacagcagcctggggatttgaattttcaagctggagacagaatcacagttatatcaaaaacagattcacattttgattggtgggaaggaaaacttcgaggtcaaactggcatttttccagccaactacgtaaccatgaattaaagcgtatactattttcttctttgagaattacaaaaaaattatttctacactgacaggatttactagttaagcaatgtttaatataaattttaaaaaacttctgttctacaaaatttccattccgtatgtaaaagattttgtttttctatataaaaagagctgactgacatatctttaaatactttgtactaactttatcacacttactgtgtcatagaatatcatacagtttatacgctcatagttctcttgtgaacacttcaaacatcgctaagcatttgatctggccatgtatatggtagctgtgttttaatttgagaatcttgagggtagagccacaaatttcaattcttacatttccatttgcaaagtgactagagaaaaagaaatcagcttaaatgaggtattaagtaatgtttagagttgtaggtattaactagaatataaatccttagaaattgtctttataccttcaaaaattatactatgcatttatcatagaaatgtgattacaaagaagtctgactaccatgtctttaaacatatggcatctctcaacttttcttccttatggggctacatttgttcatttccagcagtagcataaacttacggtgacatggtagacttgtctctaaataaaatttttaaatgttaaaaaaaaaaaaaaaaa

SEQ ID NO: 1239 - protein, 246 aa, Homo sapien
MVSDLVIILNYDRAVEAFAKGGNLTLGGNLTVAVGPLGRNLEGNVALRSSAAVFTYCKSRGLFAGVSLEGSCLIERKETNRKFYCQDIRAYDILFGDTPRPAQAEDLYEILDSFTEKYENEGQRINARKAAREQRKSSAKELPPKPLSRPQQSSAPVQLNSGSQSNRNEYKLYPGLSSYHERVGNLNQPIEVTALYSFEGQQPGDLNFQAGDRITVISKTDSHFDWWEGKLRGQTGIFPANYVTMN

SEQ ID NO: 1240 - DNA, 1446 bp, Homo sapien
ctgccatttaggacaagctggatgatgatggtttgatagctccaggggttcgtgtataggagatgatgaatctgcttcatccagaatcacaatcttaaaaggcgggaactgaggcgactgtggggacatcagtgatcgtaagtctcctgggcccgttattctcagattaggtgacggagctaagacttcgagaccatctcgtcctttttgtatcgcggaaacctgaggaacgagccggcggcggtgacctgcacgagaagccaggctaactgggtgaagtaccatgcaagcatttcttaaaggtacatccatcagtactaaacccccgctgaccaaggatcgaggagtagctgccagtgcgggaagtagcggagagaacaagaaagccaaacccgttccctgggtggaaaaatatcgcccaaaatgtgtggatgaagttgctttccaggaagaagtggttgcagtgctgaaaaaatctttagaaggagcagatcttcctaatctcttgttttacggaccacctggaactggaaaaacatccactattttggcagcagctagagaactctttgggcctgaacttttccgattaagagttcttgagttaaatgcatctgatgaacgtggaatacaagtagttcgagagaaagtgaaaaattttgctcaattaactgtgtcaggaagtcgctcagatgggaagccgtgtccgccttttaagattgtgattctggatgaagcagattctatgacctcagctgctcaggcagctttaagacgtaccatggagaaggagtcgaaaaccacccgattctgtcttatctgtaactatgtcagtcgaataattgaacccctgacctctagatgttcaaaattccgcttcaagcctctgtcagataaaattcaacagcagcgattactagacattgccaagaaggaaaatgtcaaaattagtgatgagggaatagcttatcttgttaaagtgtcagaaggagacttaagaaaagccattacatttcttcaaagcgctactcgattaacaggtggaaaggagatcacagagaaagtgattacagacattgctggggtaataccagctgagaaaattgatggagtatttgctgcctgtcagagtggctcttttgacaaactagaagctgtggtcaaggatttaatagatgagggtcatgcagcaactcagctcgtcaatcaactccatgatgtggttgtagaaaataacttatctgataaacagaagtctattatcacagaaaaacttgccgaagttgacaaatgcctagcagatggtgctgatgaacatttgcaactcatcagcctttgtgcaactgtgatgcagcagttatctcagaattgttaacgtgatatatctggatggggggttttgtaaataatgaagttgtaataaaaataaaatgaccaaaagcaccg

SEQ ID NO: 1241 - protein, 363 aa, Homo sapien
MQAFLKGTSISTKPPLTKDRGVAASAGSSGENKKAKPVPWVEKYRPKCVDEVAFQEEVVAVLKKSLEGADLPNLLFYGPPGTGKTSTILAAARELFGPELFRLRVLELNASDERGIQVVREKVKNFAQLTVSGSRSDGKPCPPFKIVILDEADSMTSAAQAALRRTMEKESKTTRFCLICNYVSRIIEPLTSRCSKFRFKPLSDKIQQQRLLDIAKKENVKISDEGIAYLVKVSEGDLRKAITFLQSATRLTGGKEITEKVITDIAGVIPAEKIDGVFAACQSGSFDKLEAVVKDLIDEGHAATQLVNQLHDVVVENNLSDKQKSIITEKLAEVDKCLADGADEHLQLISLCATVMQQLSQNC

SEQ ID NO: 1242 - DNA, 1658 bp, Homo sapien
ggcacgagctcggctcctggaaagatggaggcagcggagacagaggcggaagctgcagccctagaggtcctggctgaggtggcaggcatcttggaacctgtaggcctgcaggaggaggcagaactgccagccaagatcctggttgagtttgtggtggactctcagaagaaagacaagctgctctgcagccagcttcaggtagcggatttcctgcagaacatcctggctcaggaggacactgctaagggtctcgaccccttggcttctgaagacacgagccgacagaaggcaattgcagctaaggaacaatggaaagagctgaaggccacctacagggagcacgtagaggccatcaaaattggcctcaccaaggccctgactcagatggaggaagcccagaggaaacggacacaactccgggaagcctttgagcagctccaggccaagaaacaaatggccatggagaaacgcagagcagtccagaaccagtggcagctacaacaggagaagcatctgcagcatctggcggaggtttctgcagaggtgagggagcgtaagacagggactcagcaggagcttgacagggtgtttcagaaacttggaaacctgaagcagcaggcagaacaggagcgggacaagctgcagaggtatcagaccttcctccagcttctgtataccctgcagggtaagctgttgttccctgaggctgaggctgaggcagagaatcttccagatgataaaccccagcagccgactcgaccccaggagcagagtacaggagacaccatggggagagaccctggtgtgtccttcaaggctgttggtctacaacctgctggagatgtaaatttgccatgacttcctggaggacagcagcatggagaaagatcctagaaaaggcctctgacttccctcacctcccaaccatcattacaggaaagactgtgaactcctgagttcagcttgatttctgactacatcccagcaagctctggcatctgtggattaaaatccctggatctctctcagttgtgtatttgttcatcttcatatgctggcaggaacaactattaatacagatactcagaagccaataacatgacaggagctgggactggtttgaacacagggtgtgcagatggggagggggtactggccttgggcctcctatgatgcagacatggtgaatttaattcaaggaggaggagaatgttttaggcaggtggttatatgtgggaagataattttattcatggatccaaatgtttgttgagtcctttctttgtgctaaggttcttgcggtgaaccagaattataacagtgagctcatctgactgttttaggatgtacagcctagtgttaacattcttggtatctttttgtgccttatctaaaacatttctcgatcactggtttcagatgttcatttattatattcttttcaaagattcagagattggcttttgtcatccactattgtatgttttgtttcattgacctctagtgataccttgatctttcccactttctgttttcggattggagaagatgtaccttttttgtcaactcttacttttatcagatgatcaactcacgtatttggatctttatttgttttctcaaataaatatttaaggttaaaaaaaaaaaaaaaaaaa

SEQ ID NO: 1243 - protein, 277 aa, Homo sapien
MEAAETEAEAAALEVLAEVAGILEPVGLQEEAELPAKILVEFVVDSQKKDKLLCSQLQVADFLQNILAQEDTAKGLDPLASEDTSRQKAIAAKEQWKELKATYREHVEAIKIGLTKALTQMEEAQRKRTQLREAFEQLQAKKQMAMEKRRAVQNQWQLQQEKHLQHLAEVSAEVRERKTGTQQELDRVFQKLGNLKQQAEQERDKLQRYQTFLQLLYTLQGKLLFPEAEAEAENLPDDKPQQPTRPQEQSTGDTMGRDPGVSFKAVGLQPAGDVNLP

SEQ ID NO: 1244 - DNA, 2372 bp, Homo sapien
cgaagctagggcggggcccgcgggctgaggcagcggctgtggcggcgacgctgggcgtgaggtggcggcggccgcgccctggttgggtccccactgctctcgggggcgccatggacgaggccgtgggcgacctgaagcaggcgcttccctgtgtggccgagtcgccaacggtccacgtggaggtgcatcagcgcggcagcagcactgcaaagaaagaagacataaacctgagtgttagaaagctactcaacagacataatattgtgtttggtgattacacatggactgagtttgatgaaccttttttgaccagaaatgtgcagtctgtgtctattattgacacagaattaaaggttaaagactcacagcccatcgatttgagtgcatgcactgttgcacttcacattttccagctgaatgaagatggccccagcagtgaaaatctggaggaagagacagaaaacataattgcagcaaatcactgggttctacctgcagctgaattccatgggctttgggacagcttggtatacgatgtggaagtcaaatcccatctcctcgattatgtgatgacaactttactgttttcagacaagaacgtcaacagcaacctcatcacctggaaccgggtggtgctgctccacggtcctcctggcactggaaaaacatccctgtgtaaagcgttagcccagaaattgacaattagactttcaagcaggtaccgatatggccaattaattgaaataaacagccacagcctcttttctaagtggttttcggaaagtggcaagctggtaaccaagatgtttcagaagattcaggatttgattgatgataaagacgccctggtgttcgtgctgattgatgaggtggagagtctcacagccgcccgaaatgcctgcagggcgggcaccgagccatcagatgccatccgcgtggtcaatgctgtcttgacccaaattgatcagattaaaaggcattccaatgttgtgattctgaccacttctaacatcaccgagaagatcgacgtggccttcgtggacagggctgacatcaagcagtacattgggccaccctctgcagcagccatcttcaaaatctacctctcttgtttggaagaactgatgaagtgtcagatcatataccctcgccagcagctgctgaccctccgagagctagagatgattggcttcattgaaaacaacgtgtcaaaattgagccttcttttgaatgacatttcaaggaagagcgagggcctcagcggccgggtcctgagaaaactcccctttctggctcatgcgctgtatgtccaggcccccaccgtcaccatagaggggttcctccaggccctgtctctggcagtggacaagcagtttgaagagagaaagaagcttgcagcttacatctgatcctgggcttccccatctggtgcttttcccatggagaacacacaaccagtaagtgaggttgccccacacagccgtctcccagggaatcccttctgcaaaccaaacgttacttagactgcaagctagaaagccaccaaggccaggctttgttaaaagaagtgtattctatttatgttgttttaaaatgcatactgagagacaaacatcttgtcattttcactgtttgtaaaagataattcagattgtttgtctccttgtgaagaaccatcgaaacctgtttgttcccagcccacccccagtggatgggatgcataatgccagcaagttttgtttaacagcaaaaaaggaagattaatgcaggtgttatagaagccagaagagaaactgtgtcaccctaaagaagcatataatcatagcattaaaaatgcacacattactccaggtggaaggtggcaattgctttctgatatcagctcgtttgatttagtgcaaaaatgttttcaagactatttaatggatgtaaaaaagcctatttctacattataccaactgagaaaaaaatggtcggtaaagtgttctttcataataaataatcagacatggtcccatttgcaggaaaagtgcagactctgagtgttccagggaaacacatgctggacatcccttgtaacccggtatgggcgcccctgcattgctgggatgtttctgcccacggttttgtttgtgcaataacgttatcacatttctaatgaggattcacattaatataatataaaataaataggtcagttactggtctctttctccgaatgttatgttttgcttttatctcacagtaaaataaatataattaatggtttgcatgtgaaattcacttttgaaagaacatgttaccttaccttttgttttagaagttttcaagtattaaaatattttttagaaaaaaaaaaaaaaaaaaaaaaa

SEQ ID NO: 1245 - protein, 432 aa, Homo sapien
MDEAVGDLKQALPCVAESPTVHVEVHQRGSSTAKKEDINLSVRKLLNRHNIVFGDYTWTEFDEPFLTRNVQSVSIIDTELKVKDSQPIDLSACTVALHIFQLNEDGPSSENLEEETENIIAANHWVLPAAEFHGLWDSLVYDVEVKSHLLDYVMTTLLFSDKNVNSNLITWNRVVLLHGPPGTGKTSLCKALAQKLTIRLSSRYRYGQLIEINSHSLFSKWFSESGKLVTKMFQKIQDLIDDKDALVFVLIDEVESLTAARNACRAGTEPSDAIRVVNAVLTQIDQIKRHSNVVILTTSNITEKIDVAFVDRADIKQYIGPPSAAAIFKIYLSCLEELMKCQIIYPRQQLLTLRELEMIGFIENNVSKLSLLLNDISRKSEGLSGRVLRKLPFLAHALYVQAPTVTIEGFLQALSLAVDKQFEERKKLAAYI

SEQ ID NO: 1246 - DNA, 1023 bp, Homo sapien
agcggtggctgccgggcgtggtgtcggtgggtcggttggtttttgtctcaccgttggtgtccgtgccgttcagttgcccgccatggctgagctggatccgttcggcgcccctgccggcgcccctggcggtcccgcgctggggaacggagtggccggcgccggcgaagaagacccggctgcggccttcttggcgcagcaagagagcgagattgcgggcatcgagaacgacgaggccttcgccatcctggacggcggcgcccccgggccccagccgcacggcgagccgccggggggtccggatgctgttgatggagtaatgaatggtgaatactaccaggaaagtaatggtccaacagacagttatgcagctatttcacaagtggatcgattgcagtcagagcctgaaagtatccgtaaatggagagaagaacaaatggaacgcttggaagcccttgatgccaattctcggaagcaagaagcagagtggaaagaaaaggcaataaaggagctagaagaatggtatgcaagacaggacgagcagctacagaaaacaaaagcaaacaacagggcagcagaagaagcctttgtaaatgacattgacgagtcgtccccaggcactgagtgggaacgggtggcccggctgtgtgactttaaccccaagtctagcaagcaggccaaagatgtctcccgcatgcgctcagtcctcatctccctcaagcaggccccgctggtgcactgaagagccaccctgtggaaacactacatctgcaatatcttaatcctactcagtgaagctcttcacagtcattggattaattatgttgagttcttttggaccaaacctttttgtctttagagttgttcattgtttgtgattgcatgtttccttccttcaactgtgttctccctggcattcagagaggagggagaggaggaagaggaaggggagggaagcttcccaagagtagcctcaacctgtgcttctgtgcattattctgagaataaatttctgtttcaaactgt

SEQ ID NO: 1247 - protein, 218 aa, Homo sapien
MAELDPFGAPAGAPGGPALGNGVAGAGEEDPAAAFLAQQESEIAGIENDEAFAILDGGAPGPQPHGEPPGGPDAVDGVMNGEYYQESNGPTDSYAAISQVDRLQSEPESIRKWREEQMERLEALDANSRKQEAEWKEKAIKELEEWYARQDEQLQKTKANNRAAEEAFVNDIDESSPGTEWERVARLCDFNPKSSKQAKDVSRMRSVLISLKQAPLVH

SEQ ID NO: 1248 - DNA, 3160 bp, Homo sapien
cctcccctcgcccggcgcggtcccgtccgcctctcgctcgcctcccgcctcccctcggtcttccgaggcgcccgggctcccggcgcggcggcggagggggcgggcaggccggcgggcggtgatgtggcaggactctttatgcgctgcggcaggatacgcgctcggcgctgggacgcgactgcgctcagttctctcctctcggaagctgcagccatgatggaagtttgagagttgagccgctgtgaggcgaggccgggctcaggcgagggagatgagagacggcggcggccgcggcccggagcccctctcagcgcctgtgagcagccgcgggggcagcgccctcggggagccggccggcctgcggcggcggcagcggcggcgtttctcgcctcctcttcgtcttttctaaccgtgcagcctcttcctcggcttctcctgaaagggaaggtggaagccgtgggctcgggcgggagccggctgaggcgcggcggcggcggcggcggcacctcccgctcctggagcgggggggagaagcggcggcggcggcggccgcggcggctgcagctccagggagggggtctgagtcgcctgtcaccatttccagggctgggaacgccggagagttggtctctccccttctactgcctccaacacggcggcggcggcggcggcacatccagggacccgggccggttttaaacctcccgtccgccgccgccgcaccccccgtggcccgggctccggaggccgccggcggaggcagccgttcggaggattattcgtcttctccccattccgctgccgccgctgccaggcctctggctgctgaggagaagcaggcccagtcgctgcaaccatccagcagccgccgcagcagccattacccggctgcggtccagagccaagcggcggcagagcgaggggcatcagctaccgccaagtccagagccatttccatcctgcagaagaagccccgccaccagcagcttctgccatctctctcctcctttttcttcagccacaggctcccagacatgacagccatcatcaaagagatcgttagcagaaacaaaaggagatatcaagaggatggattcgacttagacttgacctatatttatccaaacattattgctatgggatttcctgcagaaagacttgaaggcgtatacaggaacaatattgatgatgtagtaaggtttttggattcaaagcataaaaaccattacaagatatacaatctttgtgctgaaagacattatgacaccgccaaatttaattgcagagttgcacaatatccttttgaagaccataacccaccacagctagaacttatcaaacccttttgtgaagatcttgaccaatggctaagtgaagatgacaatcatgttgcagcaattcactgtaaagctggaaagggacgaactggtgtaatgatatgtgcatatttattacatcggggcaaatttttaaaggcacaagaggccctagatttctatggggaagtaaggaccagagacaaaaagggagtaactattcccagtcagaggcgctatgtgtattattatagctacctgttaaagaatcatctggattatagaccagtggcactgttgtttcacaagatgatgtttgaaactattccaatgttcagtggcggaacttgcaatcctcagtttgtggtctgccagctaaaggtgaagatatattcctccaattcaggacccacacgacgggaagacaagttcatgtactttgagttccctcagccgttacctgtgtgtggtgatatcaaagtagagttcttccacaaacagaacaagatgctaaaaaaggacaaaatgtttcacttttgggtaaatacattcttcataccaggaccagaggaaacctcagaaaaagtagaaaatggaagtctatgtgatcaagaaatcgatagcatttgcagtatagagcgtgcagataatgacaaggaatatctagtacttactttaacaaaaaatgatcttgacaaagcaaataaagacaaagccaaccgatacttttctccaaattttaaggtgaagctgtacttcacaaaaacagtagaggagccgtcaaatccagaggctagcagttcaacttctgtaacaccagatgttagtgacaatgaacctgatcattatagatattctgacaccactgactctgatccagagaatgaaccttttgatgaagatcagcatacacaaattacaaaagtctgaatttttttttatcaagagggataaaacaccatgaaaataaacttgaataaactgaaaatggacctttttttttttaatggcaataggacattgtgtcagattaccagttataggaacaattctcttttcctgaccaatcttgttttaccctatacatccacagggttttgacacttgttgtccagttgaaaaaaggttgtgtagctgtgtcatgtatatacctttttgtgtcaaaaggacatttaaaattcaattaggattaataaagatggcactttcccgttttattccagttttataaaaagtggagacagactgatgtgtatacgtaggaattttttccttttgtgttctgtcaccaactgaagtggctaaagagctttgtgatatactggttcacatcctacccctttgcacttgtggcaacagataagtttgcagttggctaagagaggtttccgaaaggttttgctaccattctaatgcatgtattcgggttagggcaatggaggggaatgctcagaaaggaaataattttatgctggactctggaccatataccatctccagctatttacacacacctttctttagcatgctacagttattaatctggacattcgaggaattggccgctgtcactgcttgttgtttgcgcatttttttttaaagcatattggtgctagaaaaggcagctaaaggaagtgaatctgtattggggtacaggaatgaaccttctgcaacatcttaagatccacaaatgaagggatataaaaataatgtcataggtaagaaacacagcaacaatgacttaaccatataaatgtggaggctatcaacaaagaatgggcttgaaacattataaaaattgacaatgatttattaaatatgttttctcaattgtaaaaaaaaaa

SEQ ID NO: 1249 - protein, 403 aa, Homo sapien [sequence omitted]

SEQ ID NO: 1250 - DNA, 5807 bp, Homo sapien
gcgcgcgcgagggcgttgggcgccgccgcgaggcggggaagcgcggggccgcggcggtgcgggttctagggcggcggccgtcgccgtcgcagcagcgccccgagcggggagggccgaggaggcccgacgagctggggatggagagtaccgggcccctcactgcctcagagcgcgtgtgcggctctgggcgcgcacagtgacggtgacggcacccctggcccggcagcgccgaggccgcttcgccagacagccagcggccggcggcaggccgggccatgagcggcaggggccgggccgggcctcgctgaccctggctccgcgcggcagcttccccagtttccgctccggtctctcggcatgagagtccgcccgggcccggggctgcggctgccccagacccgccgcacgctggcgcgctccgggcccgcggagccgcggtgctgatacctgcgccgcactgcgccgcccgcccgtccgctgtgtgccccgggggcgcggccatggaggtggtgggtgacttcgagtacagcaagagggatctcgtgggacacggggccttcgccgtggtcttccgggggcggcaccgccagaaaactgattgggaggtagctattaaaagtattaataaaaagaacttgtcaaaatcacaaatactgcttggaaaggaaattaaaatcttaaaggaacttcagcatgaaaatattgtagcactctatgatgttcaggaattacccaactctgtctttttggtgatggagtattgcaatggtggagacctcgcagattatttgcaagcgaaagggactctcagtgaagacacgatcagagtgtttctgcatcagattgctgctgccatgcgaatcctgcacagcaaaggaatcatccacagagatctcaaaccacagaacatcttgctgtcctatgccaatcgcagaaaatcaagtgtcagtggtattcgcatcaaaatagcggattttggttttgctcgttacctacatagtaacatgatggctgcaacactgtgtggatccccgatgtacatggctcctgaggttattatgtctcaacattatgatgctaaggctgacttgtggagcataggaacagtgatataccaatgcctagttggaaaaccaccttttcaggccaatagtcctcaagacttaaggatgttttatgaaaaaaacaggagcttaatgcctagtattcccagagaaacatcaccttatttggctaatctccttttgggtttgcttcagagaaaccaaaaagatagaatggactttgaagcgttttttagccatccttttcttgagcaaggtccagtaaaaaaatcttgcccagttccagtgcccatgtattctggttctgtctctggaagctcctgtggcagctctccatcttgtcgttttgcttctccaccatcccttccagatatgcagcatattcaggaagaaaacttatcttccccaccattgggtcctcccaactatctacaagtttccaaagattctgccagtactagtagcaagaactcttcttgtgacacggatgactttgttttggtgccacacaacatctcgtcagaccactcatgtgatatgccaatggggactgctggcagacgtgcttcaaatgaattcttggtgtgtggagggcagtgtcagcctactgtgtcacctcacagcgaaacagcaccaattccagttcctactcaaataaggaattatcagcgcatagagcagaatcttacatctactgccagctcaggcacaaatgtacatggttctccaagatctgcagtggtacgaaggtccaacaccagccccatgggcttcctccggccgggatcatgctccccagtaccagcagacacagcacagacagttggacgaaggctctccactgggtcttctaggccttactcaccttcccctttggttggtaccattcctgagcaattcagtcagtgctgctgtgggcatcctcagggccatgactccaggagtagaaactcctcaggttctccagtgccacaagctcagtccccacagtctctcttatcgggtgctagactgcagagcgcccccaccctcactgacatctatcagaacaagcagaagctcagaaaacagcactctgaccccgtgtgcccatcccatactggggctgggtacagctactcgcctcagcccagtcggcctggcagccttggaacttctcccaccaagcacttggggtcctctccacggagttctgactggttctttaaaactcctttgccaacaatcattggctctcctactaagaccacagctcctttcaaaatccctaaaactcaagcatcttccaacctgttagccttggttactcgtcatgggcctgctgaagaacagtcgaaagatgggaatgagccacgggaatgtgcccattgcctcttagtgcaaggaagtgagaggcagcgggccgagcagcagagcaaggcagtgtttggcagatctgtcagtaccgggaagttatcagatcaacaaggaaagactcctatatgtcgacatcagggcagcacagacagtttaaatacagaacgaccaatggatatagctccggcaggagcctgtggtggtgttctggcacctcctgcaggtacagcagcaagttccaaggctgtcctcttcactgtagggtctcctccacacagtgcggcagcccccacttgtacccacatgttccttcgaacaagaacaacctcagtggggcccagcaactccgggggctctctttgtgccatgagtggccgcgtgtgcgtggggtccccgcctggcccaggcttcggctcttcccctccaggagcagaggcagctcccagcctgagatacgtgccttacggtgcttcaccccccagcctagaggggctcatcacctttgaagcccctgaactgccggaggagacgctgatggagcgggaacacacagacaccttacgccatctgaatgtgatgctgatgttcactgagtgtgtgctggacctgacagccatgaggggaggaaaccctgagctgtgcacatctgctgtgtccttgtaccagatccaggagagtgtggtggtggaccagatcagtcagctgagcaaagactgggggtgggtggagcagctggtgttgtacatgaaagcagcacagctgcttgcggcttctctgcatcttgccaaagcccagatcaagtccgggaaactgagcccatccacagctgtgaaacaagttgtcaagaatctgaacgaacgatataaattctgcatcaccatgtgcaagaaacttacagaaaagctgaatcgattcttctctgacaaacagaggtttattgatgaaatcaacagtgtgactgcagagaaactcatctataattgtgctgtagaaatggttcagtctgcagccctggatgagatgtttcagcagaccgaagatattgtttatcgctatcataaggcagcccttcttttggaaggcctaagtaggattctacaggaccctgcagatattgaaaatgtgcataaatataaatgtagtattgagagaagactgtcggcgctctgccatagcaccgcaaccgtgtgagcagcaggctcatcccgtggaccggtggtgggaacgtgaggtgatgcctttgggattacagcttgagttctgtcaccccatccccaggaaactgtagcttcttaactggtgactaccaaagaacaagcagtgatttgaaaaaggaaaaacaatccaaaaactacatatttgtaggaaatctgccttattggagaaaatcaccctttccctttttctttgtagaagcaggagcaagagtgtttggctcccagtttggacttggtgaataaatgtaccttagaactaggataatcggtacagttattcttaaagataattaaaaatgaaacaaagtgagtgctcgtcactgggttcatcagagcagtgtgtgaaattccatgtgtttgctgaggtgtaaaggtaaatgtattcacccctcatccaggcagtttgatatttggagtaagtttgtttaaatctgagcatgcatctttaaacagctcaggaagaaatagcttaagaagaagtgaaacatggatcttggaagaaattttgaaatcttcaatttgatcctaatatggatacatgttaatcttccaaaatctttcatattgcactaatttattaaaacaactgtgtattggattttgtaatttaactaaggcacaatggacttgtttaaaatattttacttgattgtatacatagaccctttccagaattcacatgtaatctccagtgaacttttaagtggttaaaacttgtattcatgtgaacctttgcacattttttttttttacttctttatctacacctacagattttctcagtaatgtttttgttagcttttggttccattttttattgtgcatgcagaatgtacattgatgcctgtgaccttaggtttattaaaggctaggtttatttgggcagtattagaaacaaaatcatggatcaagagatactcttgataatttgaatagggccaaaacaaagttggtgacctaaaggcttgttagtgatgtggagttcctacatgcagtgagtggaaaatgaagttcgttttctcttaggaaaatgggcagctgtcttctgcctaatgtgtatttttcatgttaattctgacagttcaccaaatagctagtcatggagaatgcaggcagttaacttaatatccctccaggaatggttcctacgttgtgtattatttggtttcttttacttacctgcttgaatacttgaataaaccattcaccaattttaatccttttattttaatccttttacataaaataatctgaactctttgacaaattgcacagagctctttggcattaatctaattttaatgtactgataaaaacaaacatggttgtcctttactttgacaaagtaatgtaatttttaccttatttatctgtatgaaattccagtagttaatttgaacatttatttatatgacgtttgtatttttaggtctttaatacagtgtttctacctctcatttgtaactgcatgcattattcttgaaactaggtaaaactcactgaattgttgtgtaatagcctttttattattgcctgtacaaatgtatattaaggtaaaataaaactgacaaagtgtttctagggtgtagctgggtacatattaagtggcttgttgagccaggtacttccttagtgagtttagagacttggccatgaatatcctttgtcctgccccaggatttagatcttggctactgtcatgcaggcttccaggaacatagactgttttacctccacaaccctatttgttattagtgatactttattttatataatattttttattcacagtgaaatttcattcatgttctttcagttatcacctgtgttatctcagttgtaggtttattctatcctctcctcttcctctcccatttcttttttaacacaggatgaaacaggttcagagaggggaagtgattggcctaaagtcaggaactaggcaagtggtcaagccatgctttgtgactttcaagttaattcttcttgttcttgtatattaaaggtcttggggtagatggtgtgtgtgaaacagtgaagtctcaacagcagaaaagaacaaaatgtaaattcatgaataatggttctggttatacttccattatcaaggctaattaagagattttgccttgagtatagcaataataaacaaatgctttatgtttccctg

SEQ ID NO: 1251 - protein, 1036 aa, Homo sapien
MEVVGDFEYSKRDLVGHGAFAVVFRGRHRQKTDWEVAIKSINKKNLSKSQILLGKEIKILKELQHENIVALYDVQELPNSVFLVMEYCNGGDLADYLQAKGTLSEDTIRVFLHQIAAAMRILHSKGIIHRDLKPQNILLSYANRRKSSVSGIRIKIADFGFARYLHSNMMAATLCGSPMYMAPEVIMSQHYDAKADLWSIGTVIYQCLVGKPPFQANSPQDLRMFYEKNRSLMPSIPRETSPYLANLLLGLLQRNQKDRMDFEAFFSHPFLEQGPVKKSCPVPVPMYSGSVSGSSCGSSPSCRFASPPSLPDMQHIQEENLSSPPLGPPNYLQVSKDSASTSSKNSSCDTDDFVLVPHNISSDHSCDMPMGTAGRRASNEFLVCGGQCQPTVSPHSETAPIPVPTQIRNYQRIEQNLTSTASSGTNVHGSPRSAVVRRSNTSPMGFLRPGSCSPVPADTAQTVGRRLSTGSSRPYSPSPLVGTIPEQFSQCCCGHPQGHDSRSRNSSGSPVPQAQSPQSLLSGARLQSAPTLTDIYQNKQKLRKQHSDPVCPSHTGAGYSYSPQPSRPGSLGTSPTKHLGSSPRSSDWFFKTPLPTIIGSPTKTTAPFKIPKTQASSNLLALVTRHGPAEEQSKDGNEPRECAHCLLVQGSERQRAEQQSKAVFGRSVSTGKLSDQQGKTPICRHQGSTDSLNTERPMDIAPAGACGGVLAPPAGTAASSKAVLFTVGSPPHSAAAPTCTHMFLRTRTTSVGPSNSGGSLCAMSGRVCVGSPPGPGFGSSPPGAEAAPSLRYVPYGASPPSLEGLITFEAPELPEETLMEREHTDTLRHLNVMLMFTECVLDLTAMRGGNPELCTSAVSLYQIQESVVVDQISQLSKDWGRVEQLVLYMKAAQLLAASLHLAKAQIKSGKLSPSTAVKQVVKNLNERYKFCITMRKKLTEKLNRFFSDKQRFIDEINSVTAEKLIYNCAVEMVQSAALDEMFQQTEDIVYRYHKAALLLEGLSRILQDPADIENVHKYKCSIERRLSALCHSTATV

SEQ ID NO: 1252 - DNA, 2820 bp, Homo sapien
ccgcggagttacgggaaagttggtccgagttcccagagtttccctctgtggtgccctaggcttcggcccggtgccccggctcctttcctcctttcggccttcgccgtccaccaggtccctctctctgtcccggccgccatggagcagccgccggcgcctaagagtaaactaaaaaagctgagtgaagacagtttgactaagcagcctgaagaagtttttgatgtattagagaagcttggagaagggtcttatggaagtgtatttaaagcaatacacaaggaatccggtcaagttgtcgcaattaaacaagtacctgttgaatcagatcttcaggaaataatcaaagaaatttccataatgcagcaatgtgacagcccatatgttgtaaagtactatggcagttattttaagaatacagacctctggattgttatggagtactgtggcgctggctctgtctcagacataattagattacgaaacaagacattaatagaagatgaaattgcaaccattcttaaatctacattgaaaggactagaatatttgcactttatgagaaaaatacacagagatataaaagctggaaatattctcctcaatacagaaggacatgcaaaattggcagattttggagtggctggtcagttaacagatacaatggcaaaacgcaatactgtaataggaactccattttggatggctcctgaggtgattcaagaaataggctataactgtgtggccgacatctggtcccttggcattacttctatagaaatggctgaaggaaaacctccttatgctgatatacatccaatgagggctatttttatgattcccacaaatccaccaccaacattcagaaagccagaactttggtccgatgatttcaccgattttgttaaaaagtgtttggtgaagaatcctgagcagagagctactgcaacacaacttttacagcatccttttatcaagaatgccaaacctgtatcaatattaagagacctgatcacagaagctatggagatcaaagctaaaagacatgacgaacagcaacgagaattggaagaggaagaagaaaattcggatgaagatgagctggattcccacaccatggtgaagactagtgtgggagagtgtggcaccatgcgggccacaagcacgatgagtgaaggggcccagaccatgattgaacataatagcacgatgttggaatccgacttggggaccatggtgataaacagtgaggatgaggaagaagaagatggaactatgaaaagaaatgcaacctcaccacaagtacaaagaccatctttcatggactactttgataagcaagacttcaagaataagagtcacgaaaactgtaatcagaacatgcatgaacccttccctatgtccaaaaacgtttttcctgataactggaaagttcctcaagatggagactttgactttttgaaaaatctaagtttagaagaactacagatgcggttaaaagcactggaccccatgatggaacgggagatagaagaacttcgtcagagatacactgcgaaaagacagcccattctggatgcgatggatgcaaagaaaagaaggcagcaaaacttttgagtctaatttcctctctgtttttaactattctggagaccaagaaaccactaggaattgaaggaatatttggatatttttaatcctaagattttgccctacaattaggcagaggtcaaaaagtgacaatggtacatgcccaggtaaattcccaaaaggcagaattgacagttgtatctgctgtgcattcactctaagatgaggagaacaaaagaagtgtattctcttgttctgtcagctgcataccagtaataaaactgttatgaaatggattttcaaggtctctaaaccttgaaaatccaaaggctattgttgcattgtacagcactgaaagggctttatgttacaatattctttattcctatctagtatactaggctatttattgtccccttaggtaaacttatttatttatgctattttggctttgtttcattttttaaggacaagatcaggatagctttggtgaaggtagggtcatattaatatgatgataatgtgcaaccaatttatactttctgcagggagctatggggtacattccttgatttccaggatagtttttcaaataggaaagcaataatggcagtagttctcaaatgggctaggccttttttatattgaagcaataattccatttttaccctttgaaattttgtttttttgatttttgatgtttggtacaaatagaactatatatatttaggtaaaatagatctatcgtgtttaaaaccaaagaaatcaatggaacccttgcacaaaaaagtgtgataaatatttttaaataaaaacttaatacaaatgtaatttgttaatattgtttcatgttttatgtgtagatctaatagctgaactgattcaaactgtaataagctcatcaatttcatttctatgaaaatgtgctctgttgtcacaggatgtttctgttgattttattcatttcctgggaattggtaaacatcatgttcctgatgataacccagtagcaaaaacatttgtactgagtggtacaagccttggggactgaaaaaaaaaaaagattaaaaccattaaaaagaaactcatttttacgctgaatgaacatttatatgattgcattgggaccagtcatttcctaagctacatatggccatcttgacagtgttttttcttttgtgtgtttaattattatgtgtaaatcataaagacaaataaatttcactgtgccac

SEQ ID NO: 1253 - protein, 491 aa, Homo sapien
MEQPPAPKSKLKKLSEDSLTKQPEEVFDVLEKLGEGSYGSVFKAIHKESGQVVAIKQVPVESDLQEIIKEISIMQQCDSPYVVKYYGSYFKNTDLWIVMEYCGAGSVSDIIRLRNKTLIEDEIATILKSTLKGLEYLHFMRKIHRDIKAGNILLNTEGHAKLADFGVAGQLTDTMAKRNTVIGTPFWMAPEVIQEIGYNCVADIWSLGITSIEMAEGKPPYADIHPMRAIFMIPTNPPPTFRKPELWSDDFTDFVKKCLVKNPEQRATATQLLQHPFIKNAKPVSILRDLITEAMEIKAKRHDEQQRELEEEEENSDEDELDSHTMVKTSVGECGTMRATSTMSEGAQTMIEHNSTMLESDLGTMVINSEDEEEEDGTMKRNATSPQVQRPSFMDYFDKQDFKNKSHENCNQNMHEPFPMSKNVFPDNWKVPQDGDFDFLKNLSLEELQMRLKALDPMMEREIEELRQRYTAKRQPILDAMDAKKRRQQNF

SEQ ID NO: 1254 - DNA, 10709 bp, Homo sapien
agggggcggcgctcccggcccatcccttagccccgcggcggccgtgtgggccggaggctgcctgcaccgcgtcagggaggccggcctagaaaccctccctcccagaagaaagccgatcccagttcaggtggggtcttcctcggttgcgtacctggctggagccgagctggtgggcggccggcagccggcgtttctggtgatgacagccccgaaatgaaagcagcgcggccgccgcctccgagggctgcagggagatcagcgtccagcaaataagaagcaagtcctggacccggaggaggaggagcggccgagcatctctctctgctccgccgtgtcctttagatgagcactcccggccggagccggaggtggatccgcagagctgcctctgggcgcctgaccccgcgctgacatcacaacctgtgacaggcgcatcacgcccggtacctgctcccggccgctgcccgtcctcccagcctctttgtatgccgcagacatggccagccagcaggattcgggcttctttgagatcagtatcaaatatttactgaaatcctggagtaatacttctcccgttggcaacggttacatcaagcctccggttccacctgcttctggcacgcacagggagaaagggccgccaaccatgctacccatcaatgtggacccagacagtaaaccaggagaatatgtcctcaaaagtttatttgtcaacttcaccactcaggctgaacgcaagattcgtatcattatggcagagcccctggaaaagccattgacgaaatctctgcaacgtggagaagacccccaatttgatcaggtcatcagctcaatgagctccctttctgagtactgcctgccttccattctacgtacattatttgactggtataaaaggcaaaatggcattgaggatgaatcacatgaatacagaccaagaacaagcaataaatcaaaaagcgatgaacaacagcgagattatttaatggaaagacgggacctcgccattgattttattttttctttagtattaatagaagttttgaaacagattccacttcatcctgtaatagacagtttaatacatgatgttattaacttggctttcaagcactttaaatacaaagaagggtaccttggtcccaacactggcaatatgcatattgtggcagacctgtatgcagaagtcattggagtgttggcacaagccaaattccctgctgtaaagaagaaatttatggcggagctaaaagaattacggcacaaagagcagaacccatatgtggttcaaagcattatcagcttaataatgggcatgaaattctttcgaattaagatgtatccagtggaggattttgaggcctctcttcagtttatgcaggaatgtgcacattacttcctcgaggtcaaagacaaagatatcaagcatgccttggctgggctttttgttgaaatacttgttccagttgctgctgctgttaaaaatgaagtaaatgttccctgccttagaaattttgtggaaagcctgtatgacaccacgctggaactttcttctcgaaagaagcattccttggccttgtaccccctggtgacctgtttgctctgtgtcagtcagaagcagctgttcctgaacaggtggcacattttcctcaacaactgcttgtccaaccttaaaaacaaagatcccaagatggctcgagttgcactggaatctctctacagattactttgggtttacatgattcgaattaaatgtgaaagcaacacagctactcagagccgacttataaccatcatcacaacacttttccccaaagggtcccgcggtgtggtaccaagggacatgcctctgaacatctttgtgaaaatcatccagttcattgcccaggaacgtttagattttgcaatgaaagaaatcattttcgattttctttgtgtgggaaaaccagcaaaagcattcagtctcaacccagagagaatgaacattggtttacgggcattcttggtcatagctgatagcttgcagcagaaagatggggaacctcccatgccggttacaggagccgttcttccttcaggaaacacgttaagagtaaagaaaacatatttgagtaaaacactaactgaagaggaagccaaaatgataggcatgtccttatattactctcaagtacgaaaagctgtagacaacattttaaggcaccttgataaagaagtaggaaggtgtatgatgctgactaatgtacagatgttaaacaaagaaccggaagacatgatcacgggtgagagaaagccaaaaatagatcttttcaggacctgtgttgctgctattcctcgactgcttcctgatgggatgtcaaaacttgaacttattgacttactggctaggctctctattcatatggatgatgaattgcgacatattgcacaaaattctcttcagggtttacttgttgacttctcagattggagggaagatgtactatttggctttaccaacttcctgctccgggaagtaaatgatatgcatcacacactccttgattcgtccctgaagttgctgctgcagctgctcacccagtggaaactagtcatccagacacaaggaaaagtctatgaacaagccaacaaaatcagaaattcagagctcatcgcaaatggctccagtcacagaattcagtcggaacgaggtccccactgcagtgtactccacgctgtagaaggttttgctctggttttactctgcagtttccaggtggccacacgcaaactgtccgttttaatactcaaggaaattcgagcgttgtttattgccctggggcagcctgaggatgacgacaggccgatgattgatgtcatggatcagctaagttcttccattctagaaagttttattcatgtagcagtttcggattcagcaacattaccactcacccacaatgtggatctgcagtggttggtggaatggaacgcagtcctggtcaatagccattatgatgtgaaaagcccttcccatgtctggatatttgcacagtctgtcaaagacccctgggtcctctgcctcttcagcttcctccggcaggagaacttacccaagcactgccccacagccctcagctatgcctggccttatgccttcactcggctccagtcggtgatgcctctggtggacccaaatagcccaattaatgccaagaaaaccagcactgccggcagcggagacaactatgttactttgtggagaaattacctaattctttgttttggagttgcaaaacccagtattatgagcccaggacacttaagagcttccactccagaaataatggcgaccacacctgatggtacagtgagctacgataacaaggccataggcaccccatcggtgggagttctgttaaagcagttggtgcctttgatgagactagagagcattgagatcacagagtccttagttttaggatttggaagaacaaattcccttgttttcagagaattggtagaagaacttcatccattaatgaaagaagctctggaaagaagaccagagaacaagaaacgccgagaacggcgagacttgttaaggctacaactacttcgaatttttgaacttttggctgatgctggtgtaataagtgacagcacaaatggagccctagagcgggatactttagccctgggagctttgttcttagaatatgtggacttgacccgcatgctcctagaagctgaaaatgacaaagaagttgaaattcttaaagatatccgggcacattttagtgcaatggtggccaacttgattcagtgtgttccagttcaccaccgaagatttctcttcccccagcaaagtctgaggcaccaccttttcatcttattcagccagtgggcaggacccttcagcattatgttcactcctctggatcgttacagtgacagaaatcatcagattacaagatatcagtattgtgcattaaaagcaatgtcagcagtactgtgctgtggccctgtctttgacaatgtgggcctttccccagatggctacctatataaatggcttgacaacattctggcttgtcaagatttacgagttcatcaacttggctgcgaagttgttgtcttgctactggaacttaatcctgaccaaataaatctttttaactgggcaattgaccgatgctacacaggttcctaccaacttgcatctggctgcttcaaagccatagcaactgtgtgtggaagcaggaactatcccttcgacatagtgacattgttaaaccttgttctattcaaggcctctgacaccaacagagagatttatgaaatctccatgcagctcatgcagatccttgaagcaaagctttttgtatactcaaagaaagtcgctgagcaaagaccgggaagtattctctatggaacacacggcccgctgccacccctctacagcgtgtcactcgccctcttgtcatgtgagctggccaggatgtaccctgagctcacactccccctcttctcaggtaagccagcgattccccacaacacaccccaacgggcgccagatcatgcttacctacctgctgccctggctgcacaacatcgagctggtggacagcaggctcctcctcccgggtcgagccccagcagcccagaggacgaagtcaaggaccgggaaggtgacgtgactgcttctcacgggctgagaggaaatggctggggctctccagaagccacgtcactggtcctgaacaacctcatgtacatgacggccaagtatggagatgaagttcctgggccagaaatggaaaatgcttggaatgctttagccaacaatgagaaatggagcaacaacctgaggatcaccttgcagttcctgattagcctctgtggggtcagcagcgacacagttctcctaccctatattaaaaaagtggcaatatacttgtgccgtaacaacaccattcaaaccatggaagagcttctctttgagctgcagcagacagaacccgtgaaccccatcgtccagcattgtgacaacccgcccttctaccgcttcacggccagtagcaaggcttccgcagcagcctcaggaaccacctctagcagcaatacagtggttgctggccaggaaaatttcccagatgctgaggagaacaagatattgaaagaatctgatgaaaggtttagtaatgtcatcagagcccacactcgcctcgagtcaagatacagcaatagctctggaggatcctacgatgaagataaaaatgatccaatttctccctacacgggctggttgctgactattacagagaccaagcagccgcagcccttaccgatgccttgtactggaggatgctgggcccccctggttgactatctcccggagaccatcactccccgggggccactccacaggtgcaatattgctgtaatttttatgactgaaatggtggtggatcacagtgtacgagaagactgggcgcttcatctaccattattacttcatgctgtcttcttaggtttagaccactaccggcctgaagtctttgaacacagcaaaaaactgcttcttcacctcttgattgccctctcttgcaacagcaatttccattccattgcttccgtgctcctgcagacccgagagatgggtgaagctaagactctaaccgtgcagccagcctaccaacctgaatatctctatacaggtggctttgacttcctgagagaggaccagtcatccccggtgcctgactcagggcttagttcaagctccacctcctctagcatcagtctgggaggcagcagtggaaacctcccacagatgacccaggaggtagaagatgtggacacagctgctgaaacagatgagaaggcaaacaagctcattgagtttctcacgaccagggcatttggtccactttggtgccatgaagacatcacacctaaaaatcaaaattcaaagagtgctgaacagctcactaattttctacgtcacgttgtatctgtatttaaagattccaaatcaggcttccatctggagcaccagttgagtgaagttgcattgcagacagccctcgcaagctcttcaaggcactatgctggtcggtccttccagatattccgggccctcaagcaacctctgtcagcacatgccttatctgaccttctctcaagattggtggaggtgataggagaacatggagatgagattcagggttatgtaatggaagcgctcctaaccttggaggcggctgtggataacttgtctgactgcttgaagaacagtgacctcctaactgtattgtcccgctcttcctcaccagatttaagctccagcagtaaactaacagcaagcagaaagagcacaggacaactaaacatgaacccgggaaccaccagcggcaacaccgcaactgccgaacggagccggcatcaacgaagcttctctgtgcccaagaagtttggtgtcatcgaccgatcctctgacccacctcgaagtgccacactggacagaattcaggcttgtacccaacaaggcctctcctcaaaaaccagaagctcatcctccttgaaggacagtctcacggacccatcccacataaaccatcccaccaacctgctggccaccatattctgggtcacagtggccttgatggagtctgattttgagtttgaatacttaatggccttaaggctgttgagcagactactggcacatatgccactcgataaggctgagaaccgagaaaagcttgagaaactccaggcacagctgaagtgggccgacttctccgggctgcagcagctgctgctgaaaggattcacatccctcaccaccacagacctgaccctgcagctcttcagtctgctgacaccagtgtccaaaatatccatggtggatgcatcccacgctattgggtttccactgaatgtcttgtgtctcctgcctcagctgattcagcattttgaaaatcccaatcagttctgtaaggatatagccgaaaggattgctcaggtttgtttagaagagaagaaccccaaactttcaaatcttgcacatgtcatgactctttataaaacgcacagctacacgagggactgtgccacgtgggtcaatgtggtctgtcgataccttcatgaagcatatgctgacattaccttgaatatggttacctacctggcagagctgctggagaagggcctccctagtgtgcagcagcccctgctccaggtgatctacagtcttctcagctacatggacctttctgtcgttcctgtcaaacagttcaatgtggaagttctgaagacaattgaaaaatatgtgcaaagtgttcactggagagaagctctgaatatcttgaagctggtagtttctcggtcagccagccttgttttaccttcataccagcacagtgacctctcaaaaatagaaatacatcgagtgtggactagtgcttccaaggaattacctgggaaaaccctggacttccacttcgatatttcggagactccaatcatcgggaggcggtatgatgagctgcagaattcttctgggcgtgatgggaagcccagggccatggccgtcacccggagcacatcttccacttcctcaggctccaactccaacgtccttgttccagtgagctggaaaaggccccagtattctcagaagagaacaaaagagaagttggtacatgtcctttctctgtgtggccaagaagtaggattgagcaaaaatccatcagtgattttttcatcgtgtggggatctggatctgcttgagcaccagacaagcttggtatcttctgaggacggtgcccgagagcaggagaacatggatgacacaaacagcgagcagcagtttagagtcttcagagacttcgacttcctagatgtggagctggaggatggagagggtgagagtatggacaatttcaactggggagtgcgcagacgttctctggacagcctggataagtgtgatatgcagattctggaggagcgccaactgtcaggaagcactcctagcctgaataaaatgcaccatgaggactccgatgaatcatccgaggaggaggacctcacagccagccagatcctggagcactcagacctaatcatgactctctccccctctgaagagacgaatcccatggagctgctcaccacagcctgtgactcgacccctgcagaacctcattcctttaacaccagaatgtccagctttgatgcttccttgcctgatatgaataatctgcagatttctgagggttcaaaggctgaagctgttcgtgaggaggaggacaccaccgtgcatgaggatgatctttctagttccatcaatgaactcccagcagcttttgaatgcagcgacagctttagcctggacatgactgagggggaagaaaaaggcaatcgggcactggaccagtttaccctggcgagctttggagaaggtgacaggggagtctctccccctccctcgcccttcttctcagccatccttgccgcctttcagcccgcagcctgtgacgatgccgaggaggcctggcgcagccacatcaaccagcttatgtgtgactcagatggctcctgtgctgtgtatacatttcatgtgttctcctccttgtttaagaatattcagaaaaggttctgcttcctaacctgtgatgcagccagttaccttggagataacctccggggaatcggatccaaatttgtcagctcttcccagatgctcacctcctgctctgaatgtcctacactttttgtggatgccgagactctcctttcatgtggacttctggacaagctcaagttcagtgtgttagaactgcaagaatatttggatacctacaacaacaggaaagaggccacactctcttggcttgcaaattgtaaggcaacatttgcagggggatcaagagatggagtaattacctgtcaaccaggggactccgaagaaaagcaattggaactgtgtcagagattatataagctacacttccagctgctattgctttttcagtcctactgtaagctcatcggccaggtgcacgaagttagctccatgccagagctgctgaatatgtccagggaactgagtgacctaaagaaacacctgaaggaagccagtgcagtcattgcagctgaccctctctattcagacggcgcgtggtccgagcccaccttcacgtccactgaagcagccatccagtccatgctggagtgcctgaagaacaacgaactcggcaaagctttgcggcagatcagggagtgcagaagtctgtggcccaatgacatctttggaagcagttctgatgatgaggtccagacactactgaatatttatttccgtcaccaaactctgggacagacgggtacttatgccctggtggggtctaaccagagcctgaccgagatctgcaccaagctgatggagctgaacatggagatccgggacatgatccgcagggcccagagttaccgagtcctcactacttttcttccagactccagtgtttctggcactagtctctgacaggagcctcctgtccccactgggttccaaactgcagtgctgccatgctggggcaacgtcattcagtgtcttctcggccttcaaaaggcttggacagactgttctccctcttgttacctgtagggctttttctaaagaggatggcagaacttccaacgtgtagcaatactataagaaccaaggtagcttagaacgtcctggacagactccactcatcatgctgtgtggcacaaatgtgttacatttgaccgagcatatgcaactcgctactgaagaagtgacttccgttgcataccaaagccgactacactgaacagtaccttcctttctagaaacaattttagattggcaaaagtgcaatgttttcttcactcaaaaaattttatattctcaaacatgtatattctttccctgtcttgttccattttcttttcttttttcttttttctttttcctttctttcgtgggctgagaaaggggcaggcaaaatgaagctggccactgaaaactgtaagatggtcaaaagctgacagcctgtgtatgtgaaaagggaattgtaaatggactgcaatgtaatgtacactgtaatttgaatacaattactgtatctaaaaggagctgctatgaagtacctttcttatgttgctaggctactgtttctgaaagccctggatctctttgcaccaaaaatggtccagatagactctttttaaggatcttggctgctttttactagaaggttgcttttatgagcatatttatactgctgaaggatgagtgttaattttaattaactttgccgttttgtagagaaaactattcacaagataaattccaagtcttttcacctgtcaggcatgcatattttaatatctgtttggatagtcagaagtagaatcataaaggtaaaatatgagttgttactttgtttcttcgatgtcatattttatgtgtaatatatatgtaaagggccattcttaagttctctccttaaacttaatgctgtcaagtgttagatgtgtgcatgtgaacttgttgcactgcagaaacatattcagagtttatctatgtaacttattcactctgtaaatacatttaaagtttttgtgatgtaagcttaattgatattctgttcagaactttctttagactaaaaaaaaaaaaaaaagacaaa

SEQ ID NO: 1255 - protein, 2000 aa, Homo sapien
MASQQDSGFFEISIKYLLKSWSNTSPVGNGYIKPPVPPASGTHREKGPPTMLPINVDPDSKPGEYVLKSLFVNFTTQAERKIRIIMAEPLEKPLTKSLQRGEDPQFDQVISSMSSLSEYCLPSILRTLFDWYKRQNGIEDESHEYRPRTSNKSKSDEQQRDYLMERRDLAIDFIFSLVLIEVLKQIPLHPVIDSLIHDVINLAFKHFKYKEGYLGPNTGNMHIVADLYAEVIGVLAQAKFPAVKKKFMAELKELRHKEQNPYVVQSIISLIMGMKFFRIKMYPVEDFEASLQFMQECAHYFLEVKDKDIKHALAGLFVEILVPVAAAVKNEVNVPCLRNFVESLYDTTLELSSRKKHSLALYPLVTCLLCVSQKQLFLNRWHIFLNNCLSNLKNKDPKMARVALESLYRLLWVYMIRIKCESNTATQSRLITIITTLFPKGSRGVVPRDMPLNIFVKIIQFIAQERLDFAMKEIIFDFLCVGKPAKAFSLNPERMNIGLRAFLVIADSLQQKDGEPPMPVTGAVLPSGNTLRVKKTYLSKTLTEEEAKMIGMSLYYSQVRKAVDNILRHLDKEVGRCMMLTNVQMLNKEPEDMITGERKPKIDLFRTCVAAIPRLLPDGMSKLELIDLLARLSIHMDDELRHIAQNSLQGLLVDFSDWREDVLFGFTNFLLREVNDMHHTLLDSSLKLLLQLLTQWKLVIQTQGKVYEQANKIRNSELIANGSSHRIQSERGPHCSVLHAVEGFALVLLCSFQVATRKLSVLILKEIRALFIALGQPEDDDRPMIDVMDQLSSSILESFIHVAVSDSATLPLTHNVDLQWLVEWNAVLVNSHYDVKSPSHVWIFAQSVKDPWVLCLFSFLRQENLPKHCPTALSYAWPYAFTRLQSVMPLVDPNSPINAKKTSTAGSGDNYVTLWRNYLILCFGVAKPSIMSPGHLRASTPEIMATTPDGTVSYDNKAIGTPSVGVLLKQLVPLMRLESIEITESLVLGFGRTNSLVFRELVEELHPLMKEALERRPENKKRRERRDLLRLQLLRIFELLADAGVISDSTNGALERDTLALGALFLEYVDLTRMLLEAENDKEVEILKDIRAHFSAMVANLIQCVPVHHRRFLFPQQSLRHHLFILFSQWAGPFSIMFTPLDRYSDRNHQITRYQYCALKAMSAVLCCGPVFDNVGLSPDGYLYKWLDNILACQDLRVHQLGCEVVVLLLELNPDQINLFNWAIDRCYTGSYQLASGCFKAIATVCGSRNYPFDIVTLLNLVLFKASDTNREIYEISMQLMQILEAKLFVYSKKVAEQRPGSILYGTHGPLPPLYSVSLALLSCELARMYPELTLPLFSGKPAIPHNTPQRAPDHAYLPAALAAQHRAGGQQAPPPGSSPSSPEDEVKDREGDVTASHGLRGNGWGSPEATSLVLNNLMYMTAKYGDEVPGPEMENAWNALANNEKWSNNLRITLQFLISLCGVSSDTVLLPYIKKVAIYLCRNNTIQTMEELLFELQQTEPVNPIVQHCDNPPFYRFTASSKASAAASGTTSSSNTVVAGQENFPDAEENKILKESDERFSNVIRAHTRLESRYSNSSGGSYDEDKNDPISPYTGWLLTITETKQPQPLPMPCTGGCWAPLVDYLPETITPRGPLHRCNIAVIFMTEMVVDHSVREDWALHLPLLLHAVFLGLDHYRPEVFEHSKKLLLHLLIALSCNSNFHSIASVLLQTREMGEAKTLTVQPAYQPEYLYTGGFDFLREDQSSPVPDSGLSSSSTSSSISLGGSSGNLPQMTQEVEDVDTAAETDEKANKLIEFLTTRAFGPLWCHEDITPKNQNSKSAEQLTNFLRHVVSVFKDSKSGFHLEHQLSEVALQTALASSSRHYAGRSFQIFRALKQPLSAHALSDLLSRLVEVIGEHGDEIQGYVMEALLTLEAAVDNLSDCLKNSDLLTVLSRSSSPDLSSSSKLTASRKSTGQLNMNPGTTSGNTATAERSRHQRSFSVPKKFGVIDRSSDPPRSA

SEQ ID NO: 1256 - DNA, 2253 bp, Homo sapien
ggaagacttgggtccttgggtcgcaggtgggagccgacgggtgggtagaccgtgggggatatctcagtggcggacgaggacggcggggacaaggggcggctggtcggagtggcggagcgtcaagtcccctgtcggttcctccgtccctgagtgtccttggcgctgccttgtgcccgcccagcgcctttgcatccgctcctgggcaccgaggcgccctgtaggatactgcttgttacttattacagctagaggcatcatggaccgatctaaagaaaactgcatttcaggacctgttaaggctacagctccagttggaggtccaaaacgtgttctcgtgactcagcaaattccttgtcagaatccattacctgtaaatagtggccaggctcagcgggtcttgtgtccttcaaattcttcccagcgcgttcctttgcaagcacaaaagcttgtctccagtcacaagccggttcagaatcagaagcagaagcaattgcaggcaaccagtgtacctcatcctgtctccaggccactgaataacacccaaaagagcaagcagcccctgccatcggcacctgaaaataatcctgaggaggaactggcatcaaaacagaaaaatgaagaatcaaaaaagaggcagtgggctttggaagactttgaaattggtcgccctctgggtaaaggaaagtttggtaatgtttatttggcaagagaaaagcaaagcaagtttattctggctcttaaagtgttatttaaagctcagctggagaaagccggagtggagcatcagctcagaagagaagtagaaatacagtcccaccttcggcatcctaatattcttagactgtatggttatttccatgatgctaccagagtctacctaattctggaatatgcaccacttggaacagtttatagagaacttcagaaactttcaaagtttgatgagcagagaactgctacttatataacagaattggcaaatgccctgtcttactgtcattcgaagagagttattcatagagacattaagccagagaacttacttcttggatcagctggagagcttaaaattgcagattttgggtggtcagtacatgctccatcttccaggaggaccactctctgtggcaccctggactacctgccccctgaaatgattgaaggtcggatgcatgatgagaaggtggatctctggagccttggagttctttgctatgaatttttagttgggaagcctccttttgaggcaaacacataccaagagacctacaaaagaatatcacgggttgaattcacattccctgactttgtaacagagggagccagggacctcatttcaagactgttgaagcataatcccagccagaggccaatgctcagagaagtacttgaacacccctggatcacagcaaattcatcaaaaccatcaaattgccaaaacaaagaatcagctagcaaacagtcttaggaatcgtgcagggggagaaatccttgagccagggctgccatataacctgacaggaacatgctactgaagtttattttaccattgactgctgccctcaatctagaacgctacacaagaaatatttgttttactcagcaggtgtgccttaacctccctattcagaaagctccacatcaataaacatgacactctgaagtgaaagtagccacgagaattgtgctacttatactggttcataatctggaggcaaggttcgactgcagccgccccgtcagcctgtgctaggcatggtgtcttcacaggaggcaaatccagagcctggctgtggggaaagtgaccactctgccctgaccccgatcagttaaggagctgtgcaataaccttcctagtacctgagtgagtgtgtaacttattgggttggcgaagcctggtaaagctgttggaatgagtatgtgattctttttaagtatgaaaataaagatatatgtacagacttgtattttttctctggtggcattcctttaggaatgctgtgtgtctgtccggcaccccggtaggcctgattgggtttctagtcctccttaaccacttatctcccatatgagagtgtgaaaaataggaacacgtgctctacctccatttagggatttgcttgggatacagaagaggccatgtgtctcagagctgttaagggcttatttttttaaaacattggagtcatagcatgtgtgtaaactttaaatatgcaaataaataagtatctatgtctaaaaaaaaaaaaaaaa

SEQ ID NO: 1257 - protein, 403 aa, Homo sapien
MDRSKENCISGPVKATAPVGGPKRVLVTQQIPCQNPLPVNSGQAQRVLCPSNSSQRVPLQAQKLVSSHKPVQNQKQKQLQATSVPHPVSRPLNNTQKSKQPLPSAPENNPEEELASKQKNEESKKRQWALEDFEIGRPLGKGKFGNVYLAREKQSKFILALKVLFKAQLEKAGVEHQLRREVEIQSHLRHPNILRLYGYFHDATRVYLILEYAPLGTVYRELQKLSKFDEQRTATYITELANALSYCHSKRVIHRDIKPENLLLGSAGELKIADFGWSVHAPSSRRTTLCGTLDYLPPEMIEGRMHDEKVDLWSLGVLCYEFLVGKPPFEANTYQETYKRISRVEFTFPDFVTEGARDLISRLLKHNPSQRPMLREVLEHPWITANSSKPSNCQNKESASKQS

SEQ ID NO: 1258 - DNA, 696 bp, Homo sapien
ttccccccccccccccccccccccgcccgagcacaggacacagctgggttctgaagcttctgagttctgcagcctcacctctgagaaaacctcttttccaccaataccatgaagctctgcgtgactgtcctgtctctcctcatgctagtagctgccttctgctctccagcgctctcagcaccaatgggctcagaccctcccaccgcctgctgcttttcttacaccgcgaggaagcttcctcgcaactttgtggtagattactatgagaccagcagcctctgctcccagccagctgtggtattccaaaccaaaagaagcaagcaagtctgtgctgatcccagtgaatcctgggtccaggagtacgtgtatgacctggaactgaactgagctgctcagagacaggaagtcttcagggaaggtcacctgagcccggatgcttctccatgagacacatctcctccatactcaggactcctctccgcagttcctgtcccttctcttaatttaatcttttttatgtgccgtgttattgtattaggtgtcatttccattatttatattagtttagccaaaggataagtgtcctatggggatggtccactgtcactgtttctctgctgttgcaaatacatggataacacatttgattctgtgtgttttccataataaaactttaaaataaaatgcagacagtta

SEQ ID NO: 1259 - protein, 92 aa, Homo sapien
MKLCVTVLSLLMLVAAFCSPALSAPMGSDPPTACCFSYTARKLPRNFVVDYYETSSLCSQPAVVFQTKRSKQVCADPSESWVQEYVYDLELN

SEQ ID NO: 1260 - DNA, 1099 bp, Homo sapien
tcctgcgttgctgggaagttctggaaggaagcatgtgctccagaggttgggattcgtgtctggctctggaattgctactgctgcctctgtcactcctggtgaccagcattcaaggtcacttggtacatatgaccgtggtctccggcagcaacgtgactctgaacatctctgagagcctgcctgagaactacaaacaactaacctggttttatactttcgaccagaagattgtagaatgggattccagaaaatctaagtactttgaatccaaatttaaaggcagggtcagacttgatcctcagagtggcgcactgtacatctctaaggtccagaaagaggacaacagcacctacatcatgagggtgttgaaaaagactgggaatgagcaagaatggaagatcaagctgcaagtgcttgaccctgtacccaagcctgtcatcaaaattgagaagatagaagacatggatgacaactgttatttgaaactgtcatgtgtgatacctggcgagtctgtaaactacacctggtatggggacaaaaggcccttcccaaaggagctccagaacagtgtgcttgaaaccacccttatgccacataattactccaggtgttatacttgccaagtcagcaattctgtgagcagcaagaatggcacggtctgcctcagtccaccctgtaccctggcccggtcctttggagtagaatggattgcaagttggctagtggtcacggtgcccaccattcttggcctgttacttacctgagatgagctcttttaactcaagcgaaacttcaaggccagaagatcttgcctgttggtgatcatgctcctcaccaggacagagactgtataggctgaccagaagcatgctgctgaattatcaacgaggattttcaagttaacttttaaatactggttattatttaattttatatccctttgttgttttctagtacacagagatatagagatacacatgcttttttcccacccaaaattgtgacaacattatgtgaatgttttattattttttaaaataaacatttgatataattatcaattaactgaaaaaaaaaaaaaaaaaaaaaaaaaaaaaaa

SEQ ID NO: 1261 - protein, 243 aa, Homo sapien
MCSRGWDSCLALELLLLPLSLLVTSIQGHLVHMTVVSGSNVTLNISESLPENYKQLTWFYTFDQKIVEWDSRKSKYFESKFKGRVRLDPQSGALYISKVQKEDNSTYIMRVLKKTGNEQEWKIKLQVLDPVPKPVIKIEKIEDMDDNCYLKLSCVIPGESVNYTWYGDKRPFPKELQNSVLETTLMPHNYSRCYTCQVSNSVSSKNGTVCLSPPCTLARSFGVEWIASWLVVTVPTILGLLLT

SEQ ID NO: 1262 - DNA, 604 bp, Homo sapien
ccacgcgtccgcgctgcgccacatcccaccggcccttacactgtggtgtccagcagcatccggcttcatggggggacttgaaccctgcagcaggctcctgctcctgcctctcctgctggctgtaagtggtctccgtcctgtccaggcccaggcccagagcgattgcagttgctctacggtgagcccgggcgtgctggcagggatcgtgatgggagacctggtgctgacagtgctcattgccctggccgtgtacttcctgggccggctggtccctcgggggcgaggggctgcggaggcagcgacccggaaacagcgtatcactgagaccgagtcgccttatcaggagctccagggtcagaggtcggatgtctacagcgacctcaacacacagaggccgtattacaaatgagcccgaatcatgacagtcagcaacatgatacctggatccagccattcctgaagcccaccctgcacctcattccaactcctaccgcgatacagacccacagagtgccatccctgagagaccagaccgctccccaatactctcctaaaataaacatgaagcacaaaaaaaaaaaaaaaaaaaaaaaaaaaaaaaaaa

SEQ ID NO: 1263 - protein, 113 aa, Homo sapien
MGGLEPCSRLLLLPLLLAVSGLRPVQAQAQSDCSCSTVSPGVLAGIVMGDLVLTVLIALAVYFLGRLVPRGRGAAEAATRKQRITETESPYQELQGQRSDVYSDLNTQRPYYK

SEQ ID NO: 1264 - DNA, 1437 bp, Homo sapien
ggtgtgtcccgggtgtggggaggcgacagagccctggcacttgagggttgagggggcctccccagcgcggcgaaccgtctagcctccggaggccaggccgtgagtgcgggaggtatacgccaaggcggaagaattttgccactcactacctgtgtgacctcgggtaaattagccttggaacgtcagtttcttcgtctctataattgaaataataatagtacctctctcaggattgttgtgagccgtcagtgaaacacttagagcagtttctggcacatggtagaattgggctatttgcttgaagcttcttggtggcccttgctagcccaggaagaaacttacattttgatttttttgtaccatggctttggttcacaaattgctgcatggtacttattttctcagaaaattctctaagccaacttctgccttgtatccatttttgggtatccgctttgcagagtattccagtagtcttcagaaaccagtggcttctcctggcaaagcctcctcacagaggaagactgaaggggatttgcaaggagatcaccagaaagaagttgctttggatataacttcttctgaggagaagcctgatgttagtttcgataaagcaattagagatgaagcaatataccattttaggcttttgaaggatgaaattgtggatcattggagaggaccggaaggccaccctctgcatgaggtcttgctggaacaagccaaggttgtctggcaattccgggggaaagaagatttggataagtggacagtgacttctgataagacgattggaggcagaagtgaagtgtttttgaaaatgggcaagaataaccaaagtgcactgctatatggaactctgagctctgaggcgcctcaggacggcgagtcttcccgaagtgggtactgtgcaatgatatccaggattccaaggggtgcttttaagaggaagatgtcttacgattggtcccagttcaatactctgtatctccgtgtacgtggggatggtcggccttggatggtgaatatcaaggaggacacagatttcttccagaggacgaatcagatgtatagttacttcatgttcacccgcgggggaccctactggcaggaggtcaagattcctttttccaaatttttcttctctaatcgaggaagaatccgggatgttcagcatgagcttccgcttgataagatctcttctataggattcaccttggctgataaagtggatggtccattcttcctggagatagattttattggcgtgtttactgatccagctcatacagaagaatttgcctatgaaaattctccagagcttaacccaaggctttttaaataaagatcatatggtagttttgttttactaatctaagggtactagcatctacaatgatatagacaaaataaaatatttctttaatggcatccaaa

SEQ ID NO: 1265 - protein, 327 aa, Homo sapien
MALVHKLLHGTYFLRKFSKPTSALYPFLGIRFAEYSSSLQKPVASPGKASSQRKTEGDLQGDHQKEVALDITSSEEKPDVSFDKAIRDEAIYHFRLLKDEIVDHWRGPEGHPLHEVLLEQAKVVWQFRGKEDLDKWTVTSDKTIGGRSEVFLKMGKNNQSALLYGTLSSEAPQDGESSRSGYCAMISRIPRGAFKRKMSYDWSQFNTLYLRVRGDGRPWMVNIKEDTDFFQRTNQMYSYFMFTRGGPYWQEVKIPFSKFFFSNRGRIRDVQHELPLDKISSIGFTLADKVDGPFFLEIDFIGVFTDPAHTEEFAYENSPELNPRLFK

SEQ ID NO: 1266 - DNA, 1932 bp, Homo sapien
ggcacgaggcctcgtgccgccgggctcttggtacctcagcgcgagcgccaggcgtccggccgccgtggctatgttcgtgtccgatttccgcaaagagttctacgaggtggtccagagccagagggtccttctcttcgtggcctcggacgtggatgctctgtgtgcgtgcaagatccttcaggccttgttccagtgtgaccacgtgcaatatacgctggttccagtttctgggtggcaagaacttgaaactgcatttcttgagcataaagaacagtttcattattttattctcataaactgtggagctaatgtagacctattggatattcttcaacctgatgaagacactatattctttgtgtgtgacacccataggccagtcaatgtcgtcaatgtatacaacgatacccagatcaaattactcattaaacaagatgatgaccttgaagttcccgcctatgaagacatcttcagggatgaagaggaggatgaagagcattcaggaaatgacagtgatgggtcagagccttctgagaagcgcacacggttagaagaggagatagtggagcaaaccatgcggaggaggcagcggcgagagtgggaggcccggagaagagacatcctctttgactacgagcagtatgaatatcatgggacatcgtcagccatggtgatgtttgagctggcttggatgctgtccaaggacctgaatgacatgctgtggtgggccatcgttggactaacagaccagtgggtgcaagacaagatcactcaaatgaaatacgtgactgatgttggtgtcctgcagcgccacgtttcccgccacaaccaccggaacgaggatgaggagaacacactctccgtggactgcacacggatctcctttgagtatgacctccgcctggtgctctaccagcactggtccctccatgacagcctgtgcaacaccagctataccgcagccaggttcaagctgtggtctgtgcatggacagaagcggctccaggagttccttgcagacatgggtcttcccctgaagcaggtgaagcagaagttccaggccatggacatctccttgaaggagaatttgcgggaaatgattgaagagtctgcaaataaatttgggatgaaggacatgcgcgtgcagactttcagcattcattttgggttcaagcacaagtttctggccagcgacgtggtctttgccaccatgtctttgatggagagccccgagaaggatggctcagggacagatcacttcatccaggctctggacagcctctccaggagtaacctggacaagctgtaccatggcctggaactcgccaagaagcagctgcgagccacccagcagaccattgccagctgcctttgcaccaacctcgtcatctcccaggggcctttcctgtactgctctctcatggagggcactccagatgtcatgctgttctctaggccggcatccctaagcctgctcagcaaacacctgctcaagtcctttgtgtgttcgacaaagaaccggcgctgcaaactgctgcccctggtgatggctgcccccctgagcatggagcatggcacagtgaccgtggtgggcatccccccagagaccgacagctcggacaggaagaacttttttgggagggcgtttgagaaggcagcggaaagcaccagctcccggatgctgcacaaccattttgacctctcagtaattgagctgaaagctgaggatcggagcaagtttctggacgcacttatttccctcctgtcctaggaatttgattcttccagaatgaccttcttatttatgtaactggctttcatttagattgtaagttatggacatgatttgagatgtagaagccattttttattaaataaaatgcttattttaggctccgtccccaaaaaaaaaaaaaaaaaaaaaaaaaaaaa

SEQ ID NO: 1267 - protein, 566 aa, Homo sapien
MFVSDFRKEFYEVVQSQRVLLFVASDVDALCACKILQALFQCDHVQYTLVPVSGWQELETAFLEHKEQFHYFILINCGANVDLLDILQPDEDTIFFVCDTHRPVNVVNVYNDTQIKLLIKQDDDLEVPAYEDIFRDEEEDEEHSGNDSDGSEPSEKRTRLEEEIVEQTMRRRQRREWEARRRDILFDYEQYEYHGTSSAMVMFELAWMLSKDLNDMLWWAIVGLTDQWVQDKITQMKYVTDVGVLQRHVSRHNHRNEDEENTLSVDCTRISFEYDLRLVLYQHWSLHDSLCNTSYTAARFKLWSVHGQKRLQEFLADMGLPLKQVKQKFQAMDISLKENLREMIEESANKFGMKDMRVQTFSIHFGFKHKFLASDVVFATMSLMESPEKDGSGTDHFIQALDSLSRSNLDKLYHGLELAKKQLRATQQTIASCLCTNLVISQGPFLYCSLMEGTPDVMLFSRPASLSLLSKHLLKSFVCSTKNRRCKLLPLVMAAPLSMEHGTVTVVGIPPETDSSDRKNFFGRAFEKAAESTSSRMLHNHFDLSVIELKAEDRSKFLDALISLLS

SEQ ID NO: 1268 - DNA, 2331 bp, Homo sapien
gcgggattttcaagcgtaggcccccgggaactcgagctgccatgagcctctgggtggacaagtatcggccctgctccttgggacggctggactatcacaaggagcaggcggcccagctgcggaacctggtgcagtgtggtgactttcctcatctgttagtgtacggaccatcaggtgctggaaaaaagacaagaattatgtgtattctacgtgaactttatggtgttggagtggaaaaattgagaattgaacatcagaccatcacaactccatctaaaaaaaaaattgaaattagcaccattgcaagtaactaccaccttgaagttaatcctagtgatgctggaaatagtgaccgagtagtcattcaggagatgttgaaaacagtggcacaatcacaacaacttgaaacaaactctcaaagggattttaaagtggtattattgacagaagttgacaaactcaccaaagatgctcagcatgccttgcgaagaaccatggaaaaatatatgtctacctgcagattgatcttgtgctgcaattctacatctaaagtgatcccacctattcgtagtaggtgcttggcggttcgtgtgcctgctcccagcattgaagatatttgccacgtgttatctactgtgtgtaagaaggaaggtctgaatcttccttcacaactggctcatagacttgcagagaagtcttgtagaaatctcagaaaagccctgcttatgtgtgaagcctgcagagtgcaacaatatccttttactgcagatcaagaaatccctgagacagattgggaggtgtatctgagggagactgcaaatgctattgtcagtcagcaaactccacaaaggctccttgaagttcgtggaaggctgtatgagcttctaactcattgtattcctcctgagataataatgaagggccttctctcagaactgttacataattgtgatggacaactgaaaggggaggtggcacaaatggcagcttactatgagcatcgtctacagctgggtagcaaagccatttatcacttggaagcgtttgtggccaaattcatggcactttataagaagttcatggaggatggattggaaggcatgatgttctgacttctgtcagttattcttgcaaagatttctcagtatcagtatttacatacagcttatattaaaagagctgtgggtaaattaactgaacttaatcatgtcgtatttgcgtttttttggtaataacttctctgtgaactattaatcatcctctgagttaaataattgctcctatactattgaagtatgtagttttgtacataacttagagactttagagtctaagaaaatgatcttaatttactttaagcattggttattcaagtattcattgttgatcctcctattctcttccgtctaatctctcacctgctaaaggagatttacacattagaaagcaaagattattttcatttatccagatgaccattttctgccacaggtaacatgattgtttgacacaccattatatttaattctagtttctctcaatgaataattgtatttttgtaggaaatgtaagatttcattctgaaacataattattggtatggacaaaattgcagataccatttctgttgaggctgcagatttccaacttttatttcagtggttcagattagtattaggtcggtactaagaaataagcatgttttcactaatttaagtacttgagactcttgaagaaaattcagaatgaagttctggagaaaggtatgttactgtagtaattactctttgaacaggttttgtgttttgtcattagctctgccctttttaattaaatattttggttcatggaccaaagggtttacttgacaaatttgtgtgacagactccgaacaattcctttactacgaagtataatttataaaataaaatatacccattttaagggtacagtttgatttttgaccagtgaaactatgatcccaatcaaggtatagatgccgtcaccccaaaaagttccctccatatccctttgcagtcagttcatccctaccctggcccagatgatcactgatcttgtcattatagatgagttttgccagttcaagaatttaatggaatcagatattgtaagcattcttgtgtaatacttcattctctctcattattgagattcatccatattgttgaatgtttcactagttaatgtttattgttcaatatttttgtatatacttttaaagcctattcacttgctgatggatctttggtttgtttccaggtttggttattatgaataaagttgctgtgaataaaaaaaaaaaaaaaaaaa

SEQ ID NO: 1269 - protein, 356 aa, Homo sapien
MSLWVDKYRPCSLGRLDYHKEQAAQLRNLVQCGDFPHLLVYGPSGAGKKTRIMCILRELYGVGVEKLRIEHQTITTPSKKKIEISTIASNYHLEVNPSDAGNSDRVVIQEMLKTVAQSQQLETNSQRDFKVVLLTEVDKLTKDAQHALRRTMEKYMSTCRLILCCNSTSKVIPPIRSRCLAVRVPAPSIEDICHVLSTVCKKEGLNLPSQLAHRLAEKSCRNLRKALLMCEACRVQQYPFTADQEIPETDWEVYLRETANAIVSQQTPQRLLEVRGRLYELLTHCIPPEIIMKGLLSELLHNCDGQLKGEVAQMAAYYEHRLQLGSKAIYHLEAFVAKFMALYKKFMEDGLEGMMF

SEQ ID NO: 1270 - DNA, 1479 bp, Homo sapien
cgagctgccatgagcctctgggtggacaagtatcggccctgctccttgggacggctggactatcacaaggagcaggcggcccagctgcggaacctggtgcagtgtggtgactttcctcatctgttagtgtacggaccatcaggtgctggaaaaaagacaagaattatgtgtattttacgtgaactttatggtgttggagtggaaaaattgagaattgaacatcagaccatcacaactccatctaaaaaaaaaattgaaattagcaccattgcaagtaactaccaccttgaagttaatcctagtgatgctggaaatagtgaccgagtagtcattcaggagatgttgaaaacagtggcacaatcacaacaacttgaaacaaactctcaaagggattttaaagtggtattattgacagaagttgacaaactcaccaaagatgctcagcatgccttgcgaagaaccatggaaaaatatatgtctacctgcagattgatcttgtgctgcaattctacatctaaagtgatcccacctattcgtagtaggtgcttggcggttcgtgtgcctgctcccagcattgaagatatttgccacgtgttatctactgtgtgtaagaaggaaggtctgaatcttccttcacaactggctcatagacttgcagagaagtcttgtagaaatctcagaaaagccctgcttatgtgtgaagcctgcagagtgcaacaatatccttttactgcagatcaagaaatccctgagacagattgggaggtgtatctgagggagactgcaaatgctattgtcagtcagcaaactccacaaaggctccttgaagttcgtggaaggctgtatgagcttctaactcattgtattcctcctgagataataatgaagggccttctctcagaactgttacataattgtgatggacaactgaaaggggaggtggcacaaatggcagcttactatgagcatcgtctacagctgggtagcaaagccatttatcacttggaagcgtttgtggccaaattcatggcactttataagaagttcatggaggatggattggaaggcatgatgttctgacttctgtcagttattcttgcaaagatttctcagtatcagtatttacatacagcttatattaaaagagctgtgggtaaattaactgaacttaatcatgtcgtatttgggtttttttggtaataacttctctgtgaactattaatcatcctctgagttaaataattgctcctatactattgaagtatgtagttttgtacataacttagagactttagagtctaagaaaatgatcttaatttactttaagcattggttattcaagtattcattgttgatcctcctattctcttccgtctaatctctcacctgctaaaggagatttacacattagaaagcaaagattattttcatttatccagatgaccattttctgccacaggtaacatgattgtttgacgg

SEQ ID NO: 1271 - protein, 356 aa, Homo sapien; identical to SEQ ID NO: 1269

SEQ ID NO: 1272 - DNA, 3309 bp, Homo sapien
ggcacgagggggaggaggaggaatgtggaaggtggcggcgcgcgagctgacaggcggttcctcgggcgggctgcggcgacggcccgagcgcttctccttcgccgaggttgcgcgccccctcctcgccgtgccccgggcccgcgcgggatcgtgcgtcgtcccgccgcgtccctgaagggaaggaagcgaggcggcggcggcggcgcccgggagccggagccttcgcggcgtccacgtccctcccccgctgcaccccgccccggcgcgagaggagagcgcgagagccccagccgcgggcgggcgggcggcgaagatggcagaggcaccggcttccccggccccgctctctccgctcgaagtggagctggacccggagttcgagccccagagccgtccgcgatcctgtacgtggcccctgcaaaggccggagctccaagcgagccctgccaagccctcgggggagacggccgccgactccatgatccccgaggaggaggacgatgaagacgacgaggacggcgggggacgggccggctcggccatggcgatcggcggcggcggcgggagcggcacgctgggctccgggctgctccttgaggactcggcccgggtgctggcacccggagggcaagaccccgggtctgggccagccaccgcggcgggcgggctgagcgggggtacacaggcgctgctgcagcctcagcaaccgctgccaccgccgcagccgggggcggctgggggctccgggcagccgaggaaatgttcgtcgcggcggaacgcctggggaaacctgtcctacgcggacctgatcacccgcgccatcgagagctccccggacaaacggctcactctgtcccagatctacgagtggatggtgcgttgcgtgccctacttcaaggataagggcgacagcaacagctctgccggctggaagaactccatccggcacaacctgtcactgcatagtcgattcatgcgggtccagaatgagggaactggcaagagctcttggtggatcatcaaccctgatggggggaagagcggaaaagccccccggcggcgggctgtctccatggacaatagcaacaagtataccaagagccgtggccgcgcagccaagaagaaggcagccctgcagacagcccccgaatcagctgacgacagtccctcccagctctccaagtggcctggcagccccacgtcacgcagcagtgatgagctggatgcgtggacggacttccgttcacgcaccaattctaacgccagcacagtcagtggccgcctgtcgcccatcatggcaagcacagagttggatgaagtccaggacgatgatgcgcctctctcgcccatgctctacagcagctcagccagcctgtcaccttcagtaagcaagccgtgcacggtggaactgccacggctgactgatatggcaggcaccatgaatctgaatgatgggctgactgaaaacctcatggacgacctgctggataacatcacgctcccgccatcccagccatcgcccactgggggactcatgcagcggagctctagcttcccgtataccaccaagggctcgggcctgggctccccaaccagctcctttaacagcacggtgttcggaccttcatctctgaactccctacgccagtctcccatgcagaccatccaagagaacaagccagctaccttctcttccatgtcacactatggtaaccagacactccaggacctgctcacttcggactcacttagccacagcgatgtcatgatgacacagtcggaccccttgatgtctcaggccagcaccgctgtgtctgcccagaattcccgccggaacgtgatgcttcgcaatgatccgatgatgtcctttgctgcccagcctaaccagggaagtttggtcaatcagaacttgctccaccaccagcaccaaacccagggcgctcttggtggcagccgtgccttgtcgaattctgtcagcaacatgggcttgagtgagtccagcagccttgggtcagccaaacaccagcagcagtctcctgtcagccagtctatgcaaaccctctcggactctctctcaggctcctccttgtactcaactagtgcaaacctgcccgtcatgggccatgagaagttccccagcgacttggacctggacatgttcaatgggagcttggaatgtgacatggagtccattatccgtagtgaactcatggatgctgatgggttggattttaactttgattccctcatctccacacagaatgttgttggtttgaacgtggggaacttcactggtgctaagcaggcctcatctcagagctgggtgccaggctgaaggatcactgaggaaggggaagtgggcaaagcagaccctcaaactgacacaagacctacagagaaaaccctttgccaaatctgctctcagcaagtggacagtgataccgtttacagcttaacacctttgtgaatcccacgccattttcctaacccagcagagactgttaatggccccttaccctgggtgaagcacttacccttggaacagaactctaaaaagtatgcaaaatcttccttgtacagggtggtgagccgcctgccagtggaggacagcacccctcagcaccacccaccctcattcagagcacaccgtgagcccccgtcggccattctgtggtgttttaatattgcgatggtttatgggacgttttaagtgttgttcttgtgtttgttttcctttgactttctgagtttttcacatgcattaacttgcggtatttttctgttaaaatgttaaccgtccttcccctagcaaatttaaaaacagaaagaaaatgttgtaccagttaccattccgggttcgagcatcacaagcttttgagcgcatggaactccataaactaacaaattacataaactaaagggggattttctttcttcttttgtttggtagaaaattatccttttctaaaaactgaacaatggcacaattgtttgctatgtgcacccgtccaggacagaaccgtgcataggcaaaaggagtggagcacagcgtccggcccagtgtgtttccggttctgagtcagggtgatctgtggacgggaccccagcaccaagtctacgggtgccagatcagtagggcctgtgatttcctgtcagtgtcctcagctaatgtgaacagtgttggtctgctggttagaaactagaatattgatattttcaggaaagaaatcagctcagctctccactcattgccaaatgtcactaaagggtttagttttaaggagaaagaaaaaaaaaaaaaaaaaaaaa

SEQ ID NO: 1273 - protein, 673 aa, Homo sapien
MAEAPASPAPLSPLEVELDPEFEPQSRPRSCTWPLQRPELQASPAKPSGETAADSMIPEEEDDEDDEDGGGRAGSAMAIGGGGGSGTLGSGLLLEDSARVLAPGGQDPGSGPATAAGGLSGGTQALLQPQQPLPPPQPGAAGGSGQPRKCSSRRNAWGNLSYADLITRAIESSPDKRLTLSQIYEWMVRCVPYFKDKGDSNSSAGWKNSIRHNLSLHSRFMRVQNEGTGKSSWWIINPDGGKSGKAPRRRAVSMDNSNKYTKSRGRAAKKKAALQTAPESADDSPSQLSKWPGSPTSRSSDELDAWTDFRSRTNSNASTVSGRLSPIMASTELDEVQDDDAPLSPMLYSSSASLSPSVSKPCTVELPRLTDMAGTMNLNDGLTENLMDDLLDNITLPPSQPSPTGGLMQRSSSFPYTTKGSGLGSPTSSFNSTVFGPSSLNSLRQSPMQTIQENKPATFSSMSHYGNQTLQDLLTSDSLSHSDVMMTQSDPLMSQASTAVSAQNSRRNVMLRNDPMMSFAAQPNQGSLVNQNLLHHQHQTQGALGGSRALSNSVSNMGLSESSSLGSAKHQQQSPVSQSMQTLSDSLSGSSLYSTSANLPVMGHEKFPSDLDLDMFNGSLECDMESIIRSELMDADGLDFNFDSLISTQNVVGLNVGNFTGAKQASSQSWVPG

SEQ ID NO: 1274 - DNA, 1998 bp, Homo sapien
cggcgcgatgcgcggagacccccgcgggggcggcggcggccgtgagccccgatgaggcccgagcgtccccggccgcgcggcagcgcccccggcccgatggagaccccgccgtgggacccagcccgcaacgactcgctgccgcccacgctgaccccggccgtgcccccctacgtgaagcttggcctcaccgtcgtctacaccgtgttctacgcgctgctcttcgtgttcatctacgtgcagctctggctggtgctgcgttaccgccacaagcggctcagctaccagagcgtcttcctctttctctgcctcttctgggcctccctgcggaccgtcctcttctccttctacttcaaagacttcgtggcggccaattcgctcagccccttcgtcttctggctgctctactgcttccctgtgtgcctgcagtttttcaccctcacgctgatgaacttgtacttcacgcaggtgattttcaaagccaagtcaaaatattctccagaattactcaaataccggttgcccctctacctggcctccctcttcatcagccttgttttcctgttggtgaatttaacctgtgctgtgctggtaaagacgggaaattgggagaggaaggttatcgtctctgtgcgagtggccattaatgacacgctcttcgtgctgtgtgccgtctctctctccatctgtctctacaaaatctctaagatgtccttagccaacatttacttggagtccaagggctcctccgtgtgtcaagtgactgccatcggtgtcaccgtgatactgctttacacctctcgggcctgctacaacctgttcatcctgtcattttctcagaacaagagcgtccattcctttgattatgactggtacaatgtatcagaccaggcagatttgaagaatcagctgggagatgctggatacgtattatttggagtggtgttatttgtttgggaactcttacctaccaccttagtcgtttatttcttccgagttagaaatcctacaaaggaccttaccaaccctggaatggtccccagccatggattcagtcccagatcttatttctttgacaaccctcgaagatatgacagtgatgatgaccttgcctggaacattgcccctcagggacttcagggaggttttgctccagattactatgattggggacaacaaactaacagcttcctggcacaagcaggaactttgcaagactcaactttggatcctgacaaaccaagccttgggtagcatcagttaacagttttatggacgattcctcagatgaaaagcttcagaaaagcatagtgacagctgaatttttagggcacttttccttaagaaatagaacttgatttttatttgttacaggtttccaatggccccataggaataagcaataatgtagactgataaacccttattttagtactaaagagggagccttgctatttcagtgggtataatttaaactttttaaagaaaatctgtacttttataaagatgtattttgtataacttaaataataatgctaaagtatactagggtttttttttcttgagaatgttactgcaatcatgttgtagtttgcacagacttttatgcataattcactttaaaaatatagaatatatggtctaatagttttttaaagcttttggactaaagtattccacaaatcttacctctttaggtcactgatggtcactccgattctgagtgccacattggtagactcctaaaatacagttgacaacttagccaattgcaactccagtgttgataattaaaatgaaatggtaaagcagcagactgtaaggtctttagagatttttttttaaggttcaggccgtaggttcctcaaggaatctcttaagttttgcccaaagactggtacttcctttcagtagggcgctaatgtatacacattaatgataagttgataacattaaaaatgtagctgacttatcctattaaacctcctctgctatgttcac

SEQ ID NO: 1275 - protein, 399 aa, Homo sapien
MRPERPRPRGSAPGPMETPPWDPARNDSLPPTLTPAVPPYVKLGLTVVYTVFYALLFVFIYVQLWLVLRYRHKRLSYQSVFLFLCLFWASLRTVLFSFYFKDFVAANSLSPFVFWLLYCFPVCLQFFTLTLMNLYFTQVIFKAKSKYSPELLKYRLPLYLASLFISLVFLLVNLTCAVLVKTGNWERKVIVSVRVAINDTLFVLCAVSLSICLYKISKMSLANIYLESKGSSVCQVTAIGVTVILLYTSRACYNLFILSFSQNKSVHSFDYDWYNVSDQADLKNQLGDAGYVLFGVVLFVWELLPTTLVVYFFRVRNPTKDLTNPGMVPSHGFSPRSYFFDNPRRYDSDDDLAWNIAPQGLQGGFAPDYYDWGQQTNSFLAQAGTLQDSTLDPDKPSLG

SEQ ID NO: 1276 - DNA, 2191 bp, Homo sapien
ggggaacaagaatttgagaactgtaaataccaatccttgaaagggaccatggtgcggcctgtgagacataagaaaccagtcaattactcacagtttgaccactctgacagtgatgatgattttgtttctgcaactgtacctttaaacaagaaatccagaacagcaccaaaggagttaaaacaagataaaccaaaacctaacttgaacaatctccggaaagaagaaatcccagtacaagagaaaacccctaaaaaaagactccctgaaggtacttttagtattccagctagtgcagtgccttgtacaaagatggctttagatgacaagctctaccagagagacttagaagttgcactagctttatcagtgaaggaacttccaacagtcaccactaatgtgcagaactctcaagataaaagcattgaaaaacatggcagtagtaaaatagaaacaatgaataagtctcctcatatctctaattgcagtgtagccagtgattatttagatttggataagattactgtggaagatgatgttggtggtgttcaagggaaaagaaaagcagcatctaaagctgcagcacagcagaggaagattcttctggaaggcagtgatggtgatagtgctaatgacactgaaccagactttgcacctggtgaagattctgaggatgattctgatttttgtgagagtgaggataatgacgaagacttctctatgagaaaaagtaaagttaaagaaattaaaaagaaagaagtgaaggtaaaatccccagtagaaaagaaagagaagaaatctaaatccaaatgtaatgctttggtgacttcggtggactctgctccagctgccgtcaaatcagaatctcagtccttgccaaaaaaggtttctctgtcttcagataccactaggaaaccattagaaatacgcagtccttcagctgaaagcaagaaacctaaatgggtcccaccagcggcatctggaggtagcagaagtagcagcagcccactggtggtagtgtctgtgaagtctcccaatcagagtctccgccttggcttgtccagattagcacgagttaaacctttgcatccaaatgccactagcacctgagtgtggtacaggaggaatgtttggttgggagaatcacagctttacaagggtgtttatatttgatttgtgtttatatttgaggcaggtattgtaatataaaggaatccattaccatgtcctataaatgacctctagccattttatgattatgttctctgtaaaactcttcaagacttcaatgagaagtttgtttataagaattatcttctcatacctttccttgtgaagagcgtattctgtttttctatcagttcgacatgaagtccacatcacatgctgttcttttctagttacatgatgtgcctttctagctttgtctagtttatagcaccttaactttaactgttcagttttatctggcagaggaaaacattcttatttctttcagaagacatttctgaaatcttataagctacttaagctacgttgtcagttttatcgcaaagatgttttgtattttagccaaatctttttatagtacaaacttagaattattttacacactaaaatggttgcagttttatggcatatgtctccgatttagatggttattctctagaaaatagtatttaaagacattttatgaaatcttcattgtcaaaacctttaataaaagtggaaatattttgaaatgccctttttcttgataccactcatccacgtgttcctgattgtccacatttcatgataaaatgagagctctgcagagaatgttagcctttctgttgtaaatgtaatcttcaagtagtcactttttgttaagttctttagaaagtagttgtcaagtacttagtcatccctattatgatatgagatagtacagcttttcaggaagcttagatctgaatttactttgaaaaacaattgtaatgaatattttatatttacattgagaatttcaactagcttctgatcaatttttaataaaaaattttcaaatcatgttagctgttaaaaaatgtataataactcagtttttcttggtttatggaaatatctatattaatgtgaaaataattaatttagaattgtgattaaagtgagcatttgtctacaaaaaaaaaaaaaaaaaaaaaaaaaaaaa

SEQ ID NO: 1277 - protein, 352 aa, Homo sapien
MVRPVRHKKPVNYSQFDHSDSDDDFVSATVPLNKKSRTAPKELKQDKPKPNLNNLRKEEIPVQEKTPKKRLPEGTFSIPASAVPCTKMALDDKLYQRDLEVALALSVKELPTVTTNVQNSQDKSIEKHGSSKIETMNKSPHISNCSVASDYLDLDKITVEDDVGGVQGKRKAASKAAAQQRKILLEGSDGDSANDTEPDFAPGEDSEDDSDFCESEDNDEDFSMRKSKVKEIKKKEVKVKSPVEKKEKKSKSKCNALVTSVDSAPAAVKSESQSLPKKVSLSSDTTRKPLEIRSPSAESKKPKWVPPAASGGSRSSSSPLVVVSVKSPNQSLRLGLSRLARVKPLHPNATST

SEQ ID NO: 1278 - DNA, 2040 bp, Homo sapien
ccatggctcagcctctgggtccagagcctcagctcctacctcttccctccttgccagcccctgatgcctgccagacttttgcctctgctggagcccctgcctgaccagcttcccctccctgtctggttgggatttgggggctgagctgtctggggtcccagggccaaccaatgcagtgccggctcccgcggggcctggctggagccctcctcaccctcctgtgcatggggctcctgtgtctgcggtaccacttgaacctgtccccgcagcgggtacaagggacccccgagctgagccagccgaacccggggccccctaagctacagctacacgatgtcttcattgcagtgaagacgacccgggctttccaccgcttgcgcctggagctgctgcttgacacgtgggtttccaggaccagggaacagacatttgtcttcaccgacagcccagacaaaggcctccaggagagactggggtcccaccttgtggtcaccaactgctccgcggaacacagccacccagctctgtcctgcaagatggctgctgagttcgacaccttcttggccagtgggcttaggtggttctgccatgtggacgatgacaactatgtgaacccaagggcgctgctgcagcttctgagagccttcccgctggcccgcgacgtctatgtgggaaggcccagcctgaaccggcccatccatgcctcagagccacagccccacaaccgcacgaggctggtacagttctggtttgccactgggggtgctggcttctgcatcaatcgcaaactggctttgaagatggctccgtgggccagtggctcccgtttcatggacacatctgctctcatccggctgcctgatgactgcaccatgggctatatcattgagtgcaagctgggcggccgcctgcagcccagccccctctttcactcccacctggagaccctgcagctgctgaggactgcacagctcccagaacaggtcaccctcagctacggtgtctttgaggggaaactcaacgtcattaagctacagggccccttctccccggaggaggacccctccagatttcgctccctccattgtctgctctatccagatacaccctggtgtccccagctgggtgcccgatgaatcctgaactgctgggcaaaggttgggcagagacttctgggtgtgccttggctcccaaggtggcactgtgggtccctggcaagtgtcttgtgataggcagtccctggcagggccttcgggtggttggcaagcccaggatctgagtggcaattggcactgaaggcaccccaggcccctgggaggtgagttagacagcccaggggaccaggtggaccaggtggtggccagagaggctccaggggctagactccctcaggaggctgaattgaaaaagggcagggggcacttgagctgggctggggctcaggggtcctaaccctttaggcagtgacatggcctctgggtggggtctggccgttggccctggctaatgtctctcagtcattcccctggggctcaagcgctgggccgcccactcctgcctccctcatctgtgtcccgagttcctgaagggacatgggtggaatgatggcagaatccagggtctgcagcacctgctgttgttgccaaccagtctcccaaagctccttgctccccaccccttgcgaacaggaccagattttgtttggagcctcagcatgccggggcccagatgatggagcataacgggtcccagccaattgtgatgatcctttttgctcatttcccagcctttcttgctgttaggggctaccatgggaccagctctggccagagggaactaagcaaatccaatagagatgtttctggggaaggttttgcagcccactccccatcttcctgctataaatgtgggtgtgatggctggatctggggcagccaccttgctaccatgaaggaaaggccaagacaatcatccacagctattccctccagcatctggttctgtacaaaaattaaatgcttatttgtttaagtcaaaaaa

SEQ ID NO: 1279 - protein, 321 aa, Homo sapien
MQCRLPRGLAGALLTLLCMGLLCLRYHLNLSPQRVQGTPELSQPNPGPPKLQLHDVFIAVKTTRAFHRLRLELLLDTWVSRTREQTFVFTDSPDKGLQERLGSHLVVTNCSAEHSHPALSCKMAAEFDTFLASGLRWFCHVDDDNYVNPRALLQLLRAFPLARDVYVGRPSLNRPIHASEPQPHNRTRLVQFWFATGGAGFCINRKLALKMAPWASGSRFMDTSALIRLPDDCTMGYIIECKLGGRLQPSPLFHSHLETLQLLRTAQLPEQVTLSYGVFEGKLNVIKLQGPFSPEEDPSRFRSLHCLLYPDTPWCPQLGAR

SEQ ID NO: 1280 - DNA, 2040 bp, Homo sapien; identical to SEQ ID NO: 1278

SEQ ID NO: 1281 - protein, 321 aa, Homo sapien; identical to SEQ ID NO: 1279

SEQ ID NO: 1282 - DNA, 1315 bp, Homo sapien
cggggattttgtgccccgatctatagttccttgagtctccacacacactcctcacagagatctgtagcgtaggtacgtgacagctctgcctacatctgacgtccggagtcattaaccaggaatgtatgtgtgtctgtgtgtctctctgtggagtcgtcagaattcttcataggggttaagctaaaaaagcgaggcgaggagcccctctccaatggctcagttttgctgaataatcacgtgtgaatcgaggggcgggcttttggcaggcagatcttactagtatttactaccaagctctactccagattaaccatcccagtccttctgtcagtctccgatgccatcatgcagcctggttaggagcaaaggaaaggggaaaaagaaaaacgactaattcatcttttcctgatcgtcaggaccctaaagaatggccgagccttgggggaacgagttggcgtccgcagctgccaggggggacctagagcaacttactagtttgttgcaaaataatgtaaacgtcaatgcacaaaatggatttggaaggactgcgctgcaggttatgaaacttggaaatcccgagattgccaggagactgctacttagaggtgctaatcccgatttgaaagaccgaactggtttcgctgtcattcatgatgcggccagagcaggtttcctggacactttacagactttgctggagtttcaagctgatgttaacatcgaggataatgaagggaacctgcccttgcacttggctgccaaagaaggccacctccgggtggtggagttcctggtgaagcacacggccagcaatgtggggcatcggaaccataagggggacaccgcctgtgatttggccaggctctatgggaggaatgaggttgttagcctgatgcaggcaaacggggctgggggagccacaaatcttcaataaacgtggggagggctcccccacgttgcctctactttatcaattaactgagtagctctcctgacttttaatgtcatttgttaaaatacagttctgtcatatgttaagcagctaaattttctgaaactgcataagtgaaaatcttacaacaggtttatgaatatatttaagcaacatctttttaacctgcaaaatctgttctaacatgtaattgcagataactttgactttcttctgaatattttatctttccttggcttttcccttgcttccccttttgccaatctcaacacccaagttgaagactttgtttttaaaatggtttgtcctgatgcttttgtctaattaaaacactttcaaaacaggaaaaaaaaaaaaaaaaaa

SEQ ID NO: 1283 - protein, 168 aa, Homo sapien
MAEPWGNELASAAARGDLEQLTSLLQNNVNVNAQNGFGRTALQVMKLGNPEIARRLLLRGANPDLKDRTGFAVIHDAARAGFLDTLQTLLEFQADVNIEDNEGNLPLHLAAKEGHLRVVEFLVKHTASNVGHRNHKGDTACDLARLYGRNEVVSLMQANGAGGATNLQ

SEQ ID NO: 1284 - DNA, 2150 bp, Homo sapien
ctcgagccacgaaggccccgctgtcctgtctagcagatacttgcacggtttacagaaattcggtccctgggtcgtgtcaggaaactggaaaaaaggtcataagcatgaagcgcagttcagtttccagcggtggtgctggccgcctctccatgcaggagttaagatcccaggatgtaaataaacaaggcctctatacccctcaaaccaaagagaaaccaacctttggaaagttgagtataaacaaaccgacatctgaaagaaaagtctcgctatttggcaaaagaactagtggacatggatcccggaatagtcaacttggtatattttccagttctgagaaaatcaaggacccgagaccacttaatgacaaagcattcattcagcagtgtattcgacaactctgtgagtttcttacagaaaatggttatgcacataatgtgtccatgaaatctctacaagctccctctgttaaagacttcctgaagatcttcacatttctttatggcttcctgtgcccctcatacgaacttcctgacacaaagtttgaagaagaggttccaagaatctttaaagaccttgggtatccttttgcactatccaaaagctccatgtacacagtgggggctcctcatacatggcctcacattgtggcagccttagtttggctaatagactgcatcaagatacatactgccatgaaagaaagctcacctttatttgatgatgggcagccttggggagaagaaactgaagatggaattatgcataataagttgtttttggactacaccataaaatgctatgagagttttatgagtggtgccgacagctttgatgagatgaatgcagagctgcagtcaaaactgaaggatttatttaatgtggatgcttttaagctggaatcattagaagcaaaaaacagagcattgaatgaacagattgcaagattggaacaagaaagagaaaaagaaccgaatcgtctagagtcgttgagaaaactgaaggcttccttacaaggagatgttcaaaagtatcaggcatacatgagcaatttggagtctcattcagccattcttgaccagaaattaaatggtctcaatgaggaaattgctagagtagaactagaatgtgaaacaataaaacaggagaacactcgactacagaatatcattgacaaccagaagtactcagttgcagacattgagcgaataaatcatgaaagaaatgaattgcagcagactattaataaattaaccaaggacctggaagctgaacaacagaagttgtggaatgaggagttaaaatatgccagaggcaaagaagcgattgaaacacaattagcagagtatcacaaattggctagaaaattaaaacttattcctaaaggtgctgagaattccaaaggttatgactttgaaattaagtttaatcccgaggctggtgccaactgccttgtcaaatacagggctcaagtttatgtacctcttaaggaactcctgaatgaaactgaagaagaaattaataaagccctaaataaaaaaatgggtttggaggatactttagaacaattgaatgcaatgataacagaaagcaagagaagtgtgagaactctgaaagaagaagttcaaaagctggatgatctttaccaacaaaaaattaaggaagcagaggaagaggatgaaaaatgtgccagtgagcttgagtccttggagaaacacaagcacctgctagaaagtactgttaaccaggggctcagtgaagctatgaatgaattagatgctgttcagcgggaataccaactagttgtgcaaaccacgactgaagaaagacgaaaagtgggaaataacttgcaacgtctgttagagatggttgctacacatgttgggtctgtagagaaacatcttgaggagcagattgctaaagttgatagagaatatgaagaatgcatgtcagaagatctctcggaaaatattaaagagattagagataagtatgagaagaaagctactctaattaagtcttctgaagaatgaagataaaatgttgatcatgtatatatatccatagtgaataaaattgtctcagtaaaaaaaaaaaaaaaaaaaaaaaaaaaaaaaaaaaaaaaaaaaaaaaaaaaaaaaaaaaaaaaa

SEQ ID NO: 1285 - protein, 642 aa, Homo sapien
MKRSSVSSGGAGRLSMQELRSQDVNKQGLYTPQTKEKPTFGKLSINKPTSERKVSLFGKRTSGHGSRNSQLGIFSSSEKIKDPRPLNDKAFIQQCIRQLCEFLTENGYAHNVSMKSLQAPSVKDFLKIFTFLYGFLCPSYELPDTKFEEEVPRIFKDLGYPFALSKSSMYTVGAPHTWPHIVAALVWLIDCIKIHTAMKESSPLFDDGQPWGEETEDGIMHNKLFLDYTIKCYESFMSGADSFDEMNAELQSKLKDLFNVDAFKLESLEAKNRALNEQIARLEQEREKEPNRLESLRKLKASLQGDVQKYQAYMSNLESHSAILDQKLNGLNEEIARVELECETIKQENTRLQNIIDNQKYSVADIERINHERNELQQTINKLTKDLEAEQQKLWNEELKYARGKEAIETQLAEYHKLARKLKLIPKGAENSKGYDFEIKFNPEAGANCLVKYRAQVYVPLKELLNETEEEINKALNKKMGLEDTLEQLNAMITESKRSVRTLKEEVQKLDDLYQQKIKEAEEEDEKCASELESLEKHKHLLESTVNQGLSEAMNELDAVQREYQLVVQTTTEERRKVGNNLQRLLEMVATHVGSVEKHLEEQIAKVDREYEECMSEDLSENIKEIRDKYEKKATLIKSSEE

SEQ ID NO: 1286 - DNA, 3490 bp, Homo sapien
cgggagagcggcagcgggaccccagcgcgggcggcggcggctgggcgggagcccagagggcaggaactgctgccacaacctcaggctggacaccaaacacccgtgcccgccaatgcggcccagcccccggagagtcaggcccacagagcatgcccatgtgggccggcggtgtggggagccctcggcggggcatggcccctgcgtccacagatgacctctttgcccgcaagctgcgccacccagcaaggcccccgctgacaccgcacacctttgagccgaggccagtccggggcccactcctgcgcagggcagcgaatgcaggcgaggccaggccccccacgccagccagcccccgtgcccgtgcccacagccacgaagaggccagccgacctgcagccacttccacccggctcttcactgacccgcaggcactgctggggctgccagcagaggaaccagagcctgccttcccaccagtgcttgagcctcgatggtttgcccactatgacgtgcaaagcctgctctttgattgggctccgaggtctcaggggatggggagccactcagaggccagctctgggaccctggcttcagccgaggaccaggctgccagctcggacctgctgcatggggcacctggctttgtgtgtgagctcgggggtgagggtgagctaggcctgggtggaccagcatccccacctgtgccccctgcactgcccaacgcggccgtgtccatcctggaggagccacagaaccgaacctcggcctacagcctggagcacgcagacctgggtgctggctactaccgcaaatacttctatggcaaagaacatcagaacttcttcgggatggacgagtcgctgggcccggtggcagtgagcctgcggcgggaggagaaggagggcagcggagggggcaccctgcacagctaccgcgtcatcgtgcggaccacgcagctccggacactccgtggcaccatctcggaggacgcgctgccgccggggcccccacggggtctgtccccaaggaaacttctggagcacgtggcgccgcagctgagccccagctgcctgcgcctgggctcagcttcacccaaggtaccacggacgctgctcacactggatgagcaagtgctgagcttccaacgcaaggtgggcatcctgtactgccgggcaggccagggctcggaggaggagatgtacaacaaccaggaggcgggaccggccttcatgcagtttctcaccttgctgggcgatgtggtgcggctcaaaggctttgagagttaccgggcccagctagacaccaaaacggattccacaggcacgcactccctctacaccacataccaggaccacgagatcatgttccacgtgtccacgatgctgccttacacccctaataaccagcagcagctcctccggaagcgccacattggcaacgacattgtgaccatcgtgttccaggagcctggcagcaagcccttctgccccaccaccatccgctcgcacttccagcacgtgttcctagtggtgcgggcacacacaccctgcaggccacacaccacctacagggtggccgtgagccgcacccaggacacccctgccttcgggccagctctgcctgctggcggaggccccttcgcagccaacgccgacttccgggccttcctgctggccaaagcgctgaatggtgagcaggcggccggccacgcgcgccagttccacgccatggccacgcgcacccgccagcagtacctgcaagacctggccaccaacgaggtgaccactacgtcgctggactcggcttcacgcttcggcctgccctccctgggtgggaggcgccgggcggcccctcggggcccaggcgccgagctgcaggcagcgggctcactggtgtggggagtgcgcgcggcgcccggggcgcgggtcgccgccggggctcaggcgagcggccccgaaggcatcgaggtgccctgcctgctgggcatctcggccgaggctctggtgctggtggcgccgcgcgacggccgcgtagtgttcaattgcgcctgtcgcgacgtgctggcctggaccttctccgagcagcagctggacctgtaccacggccgcggggaggcgatcacgctgcgcttcgacgggtcccccggccaagccgtgggcgaggtggtggcgcgcctgcagctggtgagccgtggctgcgagacccgcgagctggcgctgccccgcgacggtcaaggccgcctgggcttcgaggtggacgccgagggattcgtcacgcacgtggagcgcttcacattcgccgagacggcggctgcggccggggcgcgcctcctgcgcgtgtgcggccagacgctgcccagcctccggcccgaggccgctgcccagctcctgcgctcggcgcccaaggtctgcgtcaccgtcctgccccccgacgagagcggccggccccgcaggagtttttcggagctgtacacgctgtcgctgcaggacgctagccggcggggggccccagatcctgtgcaggatgaggtccagggggtgaccctgctgcccaccacaaagcagctgctgcacctgtgcctgcaagatggtggcagtcctccagggcctggggatctggccgaggagaggactgagttcctgcacagccagaactcgctgtcaccacgcagctctctgtcggatgaggccccagtcctgcccaacaccaccccggacctcctcctggccaccacagccaagccatcagtacccagtgctgacagtgagacacccctgacccaggacaggccaggcagtcccagtggctctgaggacaagggcaacccggcgccggagctcagggcctcctttctgccacgtaccttgtctctgcggaactccatcagcaggatcatgtcggaggcgggcagtgggaccctggaggacgagtggcaggccatctcggagattgcctctacttgcaacaccattctggagtcgctgtcccgagagggacagcccatcccagagagtggagaccctaagggaactccaaaatctgatgctgagccagagcctgggaacctctcagagaaggtctctcacttggagtccatgctcaggaagctgcaggaggacctgcagaaggagaaggcggacagggcggccctggaggaggaggtgcggagcctgagacacaacaaccggcggctgcaggcggagtctgagagtgcagccacacgcctcctcctggcctccaagcagctgggctcacccaccgccgacctggcctgagccgtctggaaccacctgggcccctggagggcactgtggtcacactgggccctcctcaggaactctccctgcgcagaggcgtgtcttagcactgcccccctccctagcccccttatttggtggcggaagtggcctccaccccttccctgtttgtaaatattctgtgaagaaaagaggacttcagggagtaaaaaagccactgatgtctgtgtctg

SEQ ID NO: 1287 - protein, 1041 aa, Homo sapien
MPMWAGGVGSPRRGMAPASTDDLFARKLRHPARPPLTPHTFEPRPVRGPLLRRAANAGEARPPTPASPRARAHSHEEASRPAATSTRLFTDPQALLGLPAEEPEPAFPPVLEPRWFAHYDVQSLLFDWAPRSQGMGSHSEASSGTLASAEDQAASSDLLHGAPGFVCELGGEGELGLGGPASPPVPPALPNAAVSILEEPQNRTSAYSLEHADLGAGYYRKYFYGKEHQNFFGMDESLGPVAVSLRREEKEGSGGGTLHSYRVIVRTTQLRTLRGTISEDALPPGPPRGLSPRKLLEHVAPQLSPSCLRLGSASPKVPRTLLTLDEQVLSFQRKVGILYCRAGQGSEEEMYNNQEAGPAFMQFLTLLGDVVRLKGFESYRAQLDTKTDSTGTHSLYTTYQDHEIMFHVSTMLPYTPNNQQQLLRKRHIGNDIVTIVFQEPGSKPFCPTTIRSHFQHVFLVVRAHTPCRPHTTYRVAVSRTQDTPAFGPALPAGGGPFAANADFRAFLLAKALNGEQAAGHARQFHAMATRTRQQYLQDLATNEVTTTSLDSASRFGLPSLGGRRRAAPRGPGAELQAAGSLVWGVRAAPGARVAAGAQASGPEGIEVPCLLGISAEALVLVAPRDGRVVFNCACRDVLAWTFSEQQLDLYHGRGEAITLRFDGSPGQAVGEVVARLQLVSRGCETRELALPRDGQGRLGFEVDAEGFVTHVERFTFAETAAAAGARLLRVCGQTLPSLRPEAAAQLLRSAPKVCVTVLPPDESGRPRRSFSELYTLSLQDASRRGAPDPVQDEVQGVTLLPTTKQLLHLCLQDGGSPPGPGDLAEERTEFLHSQNSLSPRSSLSDEAPVLPNTTPDLLLATTAKPSVPSADSETPLTQDRPGSPSGSEDKGNPAPELRASFLPRTLSLRNSISRIMSEAGSGTLEDEWQAISEIASTCNTILESLSREGQPIPESGDPKGTPKSDAEPEPGNLSEKVSHLESMLRKLQEDLQKEKADRAALEEEVRSLRHNNRRLQAESESAATRLLLASKQLGSPTADLA

SEQ ID NO: 1288 - DNA, 4877 bp, Homo sapien
gcccgaaacccggaagtgagcggcggcagctgcgaggctcggagaaacaggcgccgcgggctccgcgcccggccggacccgggcccgagatcatgatgctgccgccaccgccgccaccacggagcgagaagcccagatagacgccccggcggccccgggtcctggagtcccgccgcctgctgcccggccgaggaccccaccccgcctgccgcccgatgcttgcagtggggcccgccatggacagggattacccgcagcatgaacccccgccggcgggcagcctcctgtacagcccgccgcccctgcagagcgccatgctgcactgcccctactggaacaccttctcgctgccgccataccctgccttctccagcgacagccgcccgttcatgagctccgcctccttcctcggcagccagccctgcccagacaccagctatgcccccgtggccaccgcctccagcttgccaccaaagacctgcgactttgctcaggactcctcctattttgaggacttctccaacatctccatcttctcctcgtccgtggactccctgtcggacatcgtggacacgcccgacttcctgccggctgacagcctcaaccaggtgtccaccatctgggacgataaccctgccccctccacccacgataagctgttccagctcagcaggccgtttgcaggcttcgaggactttctgccctcccacagcaccccgcttctcgtcagctaccaggagcagagtgtgcagagccagccagaggaggaggacgaggctgaggaggaggaggcggaggagctggggcacacagagacctacgccgactacgtgccgtccaagtccaagatcgggaagcagcacccagaccgcgtggtggagaccagcacactgtccagcgtcccacccccagacatcacctacaccctggccctgccctcggacagcggggccctgtctgccctgcagctagaggccatcacctacgcctgccagcaacacgaggtcctgctccccagcgggcagcgcgcgggctttctcatcggcgatggggccggcgtgggcaaaggccggacggtggccggagtcatcctggagaaccacctgcgcggccggaagaaagcattgtggttcagcgtctccaacgacctcaagtacgatgcggagcgcgacctgcgggacatcgaagccacgggcatcgcggtgcacgcgctcagcaagatcaagtacggtgacaccactacctcagagggcgtcctcttcgccacctactccgccctgattggggagagccaggccggtggccagcaccgcactcgcctccggcagatcctggactggtgtggggaggcctttgagggcgtcatcgtgttcgacgagtgtcacaaagccaagaatgccggctccaccaagatgggcaaggccgtgctagacctgcagaacaagctgcccctggcccgcgtggtctacgccagcgccacaggtgcctctgagcctcggaacatgatctacatgagccgcttgggtatctggggcgagggcacacccttccggaactttgaggagttcctgcacgccatcgagaagaggggcgttggcgccatggagatcgtggccatggacatgaaggtcagcggcatgtacatcgcacgccagctcagcttctccggcgtcaccttccgcatcgaggagatcccgctggccccagccttcgagtgcgtctacaaccgcgcagccctgctgtgggccgaggccctgaacgtgttccagcaggcggccgactggatcggcctggagtcgcgcaagtccctgtggggccagttctggtcggcacaccagcgcttcttcaagtatctgtgcatcgcagccaaggtgcgccggctggtggagctggcccgagaggagctggcgcgagacaagtgcgtggtcatcgggctgcagtccacgggcgaggcgcgcacgcgggaggtgctgggggagaacgatgggcacctcaactgcttcgtctcggccgctgaaggcgtgttcctgtcgctaattcagaagcactttccgtccaccaagagaaagcgggacagaggagcgggcagcaagcggaaacggcgacctcggggacgcggggccaaagccccccggctggcgtgcgagacagcgggcgtcatccgcatcagtgacgacagcagcacggagtcggaccctggcctggacagcgacttcaactcctcccccgagtccctggtggatgacgacgttgtcatcgttgatgcagtcgggctccccagtgacgaccggggatccctgtgcctcctgcagagagacccgcatggccccggggtcctggagcgggtggagcggctgaagcaggatctgctggacaaagtgcgccggctgggccgggaactgccagtcaacaccctggacgagctcatcgaccagctgggcggcccccagcgggtggcggagatgaccggcaggaaaggccgcgtggtgtccaggcccgacgggacggtggccttcgagtcgcgggcagagcagggtctgtccatcgaccacgtgaacctcagggagaagcagcgcttcatgagcggcgagaagctcgtggccatcatctcggaggcctccagctcgggtgtctccctccaagccgaccgccgtgtccagaaccagcggcgccgcgtgcacatgaccttggagctgccgtggagcgccgaccgcgccatccagcagttcggccgcacccaccggtccaaccaggtctccgcgccagagtatgtcttcctcatctcggagctggccggggagcgccggttcgcctccatcgtggccaagcgcctggagagtctgggggccctgacccacggagaccgccgcgccacggagtcccgtgacctcagcaagtacaactttgagaacaagtatggcacccgggccctgcactgtgtcctcaccaccatcctgagccagactgagaacaaagtgcctgtgccccagggataccctggaggggtccccaccttcttccgggacatgaagcagggcctgctgtctgtgggcattggtggccgggagtcccggaatggctgcctggacgtggagaaggactgttccatcaccaagttcctgaaccgcatcctggggctggaggtgcacaagcagaatgccctgttccagtacttctcagacaccttcgaccacctcatcgagatggacaagcgggagggcaaatacgacatgggcatcctggaccttgctcccggtatcgaggagatctacgaggagagccagcaggtgttcctggctcccgggcacccgcaggacgggcaggtggtcttctacaagatcagcgtggaccgcggcctgaagtgggaggacgcctttgccaagtcgctggcgctgacgggcccctatgacggcttctacctctcctacaaggtccgcggtaacaagcccagctgcctgctggcggagcagaaccgcggccagttcttcacggtgtacaagcccaacatcggccggcagagccagctggaggccctggacagcctccgccgcaagttccaccgggtcaccgcggaggaggccaaggagccctgggagagtggctacgctttgtcgctgacgcactgcagccacagcgcctggaaccggcactgccggctggcgcaggagggtaaggactgcctgcaggggctgcggctgcggcaccactacatgctgtgcggcgcgctgctgcgcgtgtggggccgcatcgccgccgtcatggccgacgtcagcagcagcagctacctgcagatcgtgcggctgaagaccaaggacaggaagaagcaagtgggcatcaagatccccgagggctgcgtgcgccgggtgctgcaggagctgcggctgatggatgcggacgtgaagcgcaggcaggcgcccgccctgggctgccccgccccgcccgccccgcgcccgctggcgctgccttgcggccccggagaggtgctggacctcacctacagccccccggccgaggccttcccgccgcccccgcacttctctttcccggcgccgctgtccctggacgccggccccggcgtcgtgccgctgggcacccccgacgcccaggccgaccctgcggccctcgcgcaccagggctgcgacatcaacttcaaggaggtgctggaggacatgctgcgctcgctgcacgcggggccgccctccgagggcgcgctgggggagggcgcgggggcggggggcgcggcgggcggtggtcccgagcggcagagcgtgatccagttcagcccacccttccccggcgcccaggctcctctctgacacgcctttaggcgaaacatgccccaagacacagggaccgtttctcccctaggagcagcggtggggagcagggccaaggtcccctgaccactgctcagaggagccctaggccctggccgcagtgccttcagcgcccgacccgggcccccacctggtcagccctggcggggcccactcaggacagctgggggccggggcgtggcagggccctctctgtgcctctcctcctaagtaggaaggggctccgggtggctgctctgggactgggcacccacaagggctcagtgggcccaaacccttgaaatccgtgaaaccgggtggtcccaagagctagaaactcaggaaaccccaggtgctcagggccccgcgtctcgggggctccgtggggcagacccctgctaatatatgcaattctccctcccccagcccttccctgacccctaagttattgcccgctcacctctcccaggccccaggccgcggagctggcagggtggcgcctgcggtttctatgtatttatagcaagttctgatgtacatatgtaaaggacttttttaaat

SEQ ID NO: 1289 - protein, 1366 aa, Homo sapien
MLAVGPAMDRDYPQHEPPPAGSLLYSPPPLQSAMLHCPYWNTFSLPPYPAFSSDSRPFMSSASFLGSQPCPDTSYAPVATASSLPPKTCDFAQDSSYFEDFSNISIFSSSVDSLSDIVDTPDFLPADSLNQVSTIWDDNPAPSTHDKLFQLSRPFAGFEDFLPSHSTPLLVSYQEQSVQSQPEEEDEAEEEEAEELGHTETYADYVPSKSKIGKQHPDRVVETSTLSSVPPPDITYTLALPSDSGALSALQLEAITYACQQHEVLLPSGQRAGFLIGDGAGVGKGRTVAGVILENHLRGRKKALWFSVSNDLKYDAERDLRDIEATGIAVHALSKIKYGDTTTSEGVLFATYSALIGESQAGGQHRTRLRQILDWCGEAFEGVIVFDECHKAKNAGSTKMGKAVLDLQNKLPLARVVYASATGASEPRNMIYMSRLGIWGEGTPFRNFEEFLHAIEKRGVGAMEIVAMDMKVSGMYIARQLSFSGVTFRIEEIPLAPAFECVYNRAALLWAEALNVFQQAADWIGLESRKSLWGQFWSAHQRFFKYLCIAAKVRRLVELAREELARDKCVVIGLQSTGEARTREVLGENDGHLNCFVSAAEGVFLSLIQKHFPSTKRKRDRGAGSKRKRRPRGRGAKAPRLACETAGVIRISDDSSTESDPGLDSDFNSSPESLVDDDVVIVDAVGLPSDDRGSLCLLQRDPHGPGVLERVERLKQDLLDKVRRLGRELPVNTLDELIDQLGGPQRVAEMTGRKGRVVSRPDGTVAFESRAEQGLSIDHVNLREKQRFMSGEKLVAIISEASSSGVSLQADRRVQNQRRRVHMTLELPWSADRAIQQFGRTHRSNQVSAPEYVFLISELAGERRFASIVAKRLESLGALTHGDRRATESRDLSKYNFENKYGTRALHCVLTTILSQTENKVPVPQGYPGGVPTFFRDMKQGLLSVGIGGRESRNGCLDVEKDCSITKFLNRILGLEVHKQNALFQYFSDTFDHLIEMDKREGKYDMGILDLAPGIEEIYEESQQVFLAPGHPQDGQVVFYKISVDRGLKWEDAFAKSLALTGPYDGFYLSYKVRGNKPSCLLAEQNRGQFFTVYKPNIGRQSQLEALDSLRRKFHRVTAEEAKEPWESGYALSLTHCSHSAWNRHCRLAQEGKDCLQGLRLRHHYMLCGALLRVWGRIAAVMADVSSSSYLQIVRLKTKDRKKQVGIKIPEGCVRRVLQELRLMDADVKRRQAPALGCPAPPAPRPLALPCGPGEVLDLTYSPPAEAFPPPPHFSFPAPLSLDAGPGVVPLGTPDAQADPAALAHQGCDINFKEVLEDMLRSLHAGPPSEGALGEGAGAGGAAGGGPERQSVIQFSPPFPGAQAPL

SEQ ID NO: 1290 - DNA, 627 bp, Homo sapien
agtctccggcgagttgttgcctgggctggacgtggttttgtctgctgcgcccgctcttcgcgctctcgtttcattttctgcagcgcgccacgaggatggcccacaagcagatctactactcggacaagtacttcgacgaacactacgagtaccggcatgttatgttacccagagaactttccaaacaagtacctaaaactcatctgatgtctgaagaggagtggaggagacttggtgtccaacagagtctaggctgggttcattacatgattcatgagccagaaccacatattcttctctttagacgacctcttccaaaagatcaacaaaaatgaagtttatctggggatcgtcaaatctttttcaaatttaatgtatatgtgtatataaggtagtattcagtgaatacttgagaaatgtacaaatctttcatccatacctgtgcatgagctgtattcttcacagcaacagagctcagttaaatgcaactgcaagtaggttactgtaagatgtttaagataaaagttcttccagtcagtttttctcttaagtgcctgtttgagtttactgaaacagtttacttttgttcaataaagtttgtatgttgcatttaaaaaaaaaaaaaaa

SEQ ID NO: 1291 - protein, 79 aa, Homo sapien
MAHKQIYYSDKYFDEHYEYRHVMLPRELSKQVPKTHLMSEEEWRRLGVQQSLGWVHYMIHEPEPHILLFRRPLPKDQQK

SEQ ID NO: 1292 - DNA, 2691 bp, Homo sapien
ggcacgaggggggctcaaacgcagggctctgggacgcaggcactgctccaggtgatagtgcgggaacatggccttgcagctgggcaggctgagctcgggcccctgctggctcgtggcgcggggcggctgcggagggccccgcgcctggtcccagtgcggcggcggagggctccgagcctggtcccagcgcagcgcagccggacgcgtctgccggccccctggcccggctggcacggagcagagccgcgggctggggcacggctcgacgtcgagaggcggcccctgggtggggacagggctggccgcggcgctggcggggttggtggggctggccaccgccgccttcgggcatgtgcagcgggcggagatgttgcctaagacctcggggacgcgggccacttcgctggggaggccggaggaggaggaggatgagctggcccaccgctgcagcagcttcatggccccgcctgtgaccgacctgggcgagctgcgaaggaggccgggcgacatgaagaccaagatggagctgctgattctggagacccaggcccaggtgtgccaggctctggcacaggtagacgggggcgccaacttttctgtggaccggtgggagaggaaggaaggaggtggcggcatcagctgtgtacttcaagatgggtgtgttttcgaaaaggctggggtgagcatttctgttgttcatggaaatctttcagaggaagctgcaaaacaaatgagaagcagaggaaaagttctgaagactaaagatggtaaattgccattttgtgctatgggcgtgagctctgttatccaccccaagaatcctcatgctcctactatccatttcaactacagatactttgaagtagaagaagctgatggccacaagcagtggtggtttggtggtggatgtgacctcactccaacatacttgaatcaagaagacgctgtccattttcacagaactctgaaggaggcttgtgaccagcatggtccagatctctaccccaaatttaaaaaatggtgtgatgattacttctttatagcccatcgtggagagcggcggggcattggtggtatcttttttgatgatcttgactctccgtccaaggaggaggtgtttcgctttgtacagagctgtgccagggctgtagttccttcttacattccccttgtgaaaaagcactgtgatgactcattcaccccccaggagaagctgtggcagcagctcagaagaggacggtatgtagaatttaatctgctgtatgatcggggcacaaagtttggcctcttcactccaggatccagaattgaaagtatcttgatgtctttacctctaactgcccgatgggagtacatgcattcaccctcagagaattccaaagaagctgaaattctggaagttctacgccatccaagggactgggtgcgttgatgcaggcagaatggctgtgcaggggtttggagggcacacgatgtgtgctccccatgccactggtcggcactttgccactgtgtggcagttacccgtgccttagtcttctccactctgcaccctacctcgtgggcagatgataacatgttttggatgctgtcagtgatgaatggtgagatggcagattgtcagagtcaattgattaaacctcatttatacttctagtgtcattttatatgactagtttacaaaataggacattgagtttccaagtattgagataagggaatataaatagtattatatgtatcaggaaatctctcatcttgtttttgtttcatgtattttttaaagttttcatttgtgccacaaaaatctgtcgtggaatatattttattttcattaattcagtgaagttgagacttcatagtaattttagaatgcaacttgaaggtaaaaattttactttgtcaatactgaagtctctgctgtaatccttatatatctttctccagagaacataatattgtcaaatagatacacatttttctaataggtatttagaagcacttgaaatattcttaatctctgcatgtgttacaattcagttatttctgtagtttgtaaactctaaagtgacattactattattttagagatgtctaagttgtaattttgatttttgtggaaccattgtttgttaatgttgggattctctgcacttttgaatgtgaaagcttatatccctgaattctgatacttaagagttttctatttcagacatctctgtgtggaagttgagactaagaataatcctagggatgtcatgaatttaggcaatgtttctcatttggaaaatgaaatgagaaataatttccttctttaaagcaagtatatatagtatgagaaacttggaggcatttcatacacacgtttcttaggaaaatggacacattgaaaatgtcctctttttttatattagagattctgcagctctttgctcttaagagcaaatcacaacaggattcttaatgtatgatttctttgttcatatattatgaatgtattattttatttgcttcgtaataaagtttataaggaagagcatctcatacatatcattatcgtggaacacgttgaatgtttgtgattctgtgtggcctttttggggctggaaaatgtatgaattcttcaactgtcttacaagagatctgctaataaattttattattaaataagaaaaaaaaaaaaaaaaaaaa

SEQ ID NO: 1293 - protein, 454 aa, Homo sapien
MALQLGRLSSGPCWLVARGGCGGPRAWSQCGGGGLRAWSQRSAAGRVCRPPGPAGTEQSRGLGHGSTSRGGPWVGTGLAAALAGLVGLATAAFGHVQRAEMLPKTSGTRATSLGRPEEEEDELAHRCSSFMAPPVTDLGELRRRPGDMKTKMELLILETQAQVCQALAQVDGGANFSVDRWERKEGGGGISCVLQDGCVFEKAGVSISVVHGNLSEEAAKQMRSRGKVLKTKDGKLPFCAMGVSSVIHPKNPHAPTIHFNYRYFEVEEADGHKQWWFGGGCDLTPTYLNQEDAVHFHRTLKEACDQHGPDLYPKFKKWCDDYFFIAHRGERRGIGGIFFDDLDSPSKEEVFRFVQSCARAVVPSYIPLVKKHCDDSFTPQEKLWQQLRRGRYVEFNLLYDRGTKFGLFTPGSRIESILMSLPLTARWEYMHSPSENSKEAEILEVLRHPRDWVR

SEQ ID NO: 1294 - DNA, 778 bp, Homo sapien
gagatgggtgcccccatccgcacactgtcctttggccaccggacatcatgcctcccaagaaggatgttcccgtgaagaaaccagcagggccctccatctccaaacctgctgctaagccagcagcagcaggggctcctccagccaagaccaaagctgagccagctgtcccccaggcccctcagaaaacccaggagcctccagtcgatctctccaaagtggtgatcgagtttaacaaggaccagctggaggagttcaaggaggccttcgagctgtttgaccgagtgggggatggcaagatcctgtacagccagtgtggggacgtgatgagggccctgggccagaaccccaccaacgccgaggtgctcaaggtcctggggaaccccaagagtgatgagctgaagtcgcggcgtgtggactttgagactttcctgcccatgctccaggcagtggccaagaaccgaggccaaggcacatatgaggactacttggaggggtttcgtgtgtttgacaaggaggggaacggcaaagtcatgggagcagagctcagacatgttctcaccacccttggagagaagatgactgaggaggaggtggagaccgttctggcaggacacgaggacagcaacggctgcatcaactacgaggccttcttgaaacacatcctaagcgtctgagtgctgcagatccagtggggtccggacactgggccccgcaggcgaaagcacgttccagccaccaggaggccacctattgtttcaaaataaagactgggttcctc

SEQ ID NO: 1295 - protein, 208 aa, Homo sapien
MPPKKDVPVKKPAGPSISKPAAKPAAAGAPPAKTKAEPAVPQAPQKTQEPPVDLSKVVIEFNKDQLEEFKEAFELFDRVGDGKILYSQCGDVMRALGQNPTNAEVLKVLGNPKSDELKSRRVDFETFLPMLQAVAKNRGQGTYEDYLEGFRVFDKEGNGKVMGAELRHVLTTLGEKMTEEEVETVLAGHEDSNGCINYEAFLKHILSV

SEQ ID NO: 1296 - DNA, 649 bp, Homo sapien
cgtgtcagtggtggacctgacctgctcctggccccttggctggccgggctgtttctggccatgggtcgctcccgccggacaggcgcgcaccgagcgcactctctagcccggcagatgaaggcgaagcggcggcggccggacttggatgagattcaccgcgagctgcggcctcagggatccgcacgaccccagcccgacccaaacgccgagttcgaccccgacctgccagggggcggtctgcaccgctgtctggcctgcgcgaggtacttcatcgattccaccaacctgaagacccacttccgatccaaagaccacaagaaaaggctgaagcagctgagcgtcgagccctacagtcaggaagaggcggagagggcagcgggtatgggatcctatgtgccccccaggcggctggcagtgcccacggaagtgtccactgaggtccctgagatggatacctctacctgacatggcctgaagatgcagggcagaggaattgcccatggacagtgacgcaaggactaggctgggagggagcgtgccaaccccttttgcctctgggtttggggagcggagggcctcttcttggtgccctgcccccaataaaggaactggacaaagagaaaaaaaaaaaaaaaaaaaaaaaaaaaaa

SEQ ID NO: 1297 - protein, 116 aa, Homo sapien
MKAKRRRPDLDEIHRELRPQGSARPQPDPNAEFDPDLPGGGLHRCLACARYFIDSTNLKTHFRSKDHKKRLKQLSVEPYSQEEAERAAGMGSYVPPRRLAVPTEVSTEVPEMDTST

SEQ ID NO: 1298 - DNA, 1125 bp, Homo sapien
gtctcccccactgtcagcacctcttctgtgtggtgagtggaccgcttaccccactaggtgaagatgtcagcccaggagagctgcctcagcctcatcaagtacttcctcttcgttttcaacctcttcttcttcgtcctcggcagcctgatcttctgcttcggcatctggatcctcatcgacaagaccagcttcgtgtcctttgtgggcttggccttcgtgcctctgcagatctggtccaaagtcctggccatctcaggaatcttcaccatgggcatcgccctcctgggttgtgtgggggccctcaaggagctccgctgcctcctgggcctgtattttgggatgctgctgctcctgtttgccacacagatcaccctgggaatcctcatctccactcagcgggcccagctggagcgaagcttgcgggacgtcgtagagaaaaccatccaaaagtacggcaccaaccccgaggagaccgcggccgaggagagctgggactatgtgcagttccagctgcgctgctgcggctggcactacccgcaggactggttccaagtcctcatcctgagaggtaacgggtcggaggcgcaccgcgtgccctgctcctgctacaacttgtcggcgaccaacgactccacaatcctagataaggtgatcttgccccagctcagcaggcttggacacctggcgcggtccagacacagtgcagacatctgcgctgtccctgcagagagccacatctaccgcgagggctgcgcgcagggcctccagaagtggctgcacaacaaccttatttccatagtgggcatttgcctgggcgtcggcctactcgagctcgggttcatgacgctctcgatattcctgtgcagaaacctggaccacgtctacaaccggctcgctcgataccgttaggccccgccctccccaaagtcccgccccgcccccgtcacgtgcgctgggcacttccctgctgcctgtaaatatttgtttaatccccagttcgcctggagccctccgccttcacattcccctggggacccacgtggctgcgtgcccctgctgctgtcacctctcccacgggacctggggctttcgtccacagcttcctgtccccatctgtcggcctac

SEQ ID NO: 1299 - protein, 281 aa, Homo sapien
MSAQESCLSLIKYFLFVFNLFFFVLGSLIFCFGIWILIDKTSFVSFVGLAFVPLQIWSKVLAISGIFTMGIALLGCVGALKELRCLLGLYFGMLLLLFATQITLGILISTQRAQLERSLRDVVEKTIQKYGTNPEETAAEESWDYVQFQLRCCGWHYPQDWFQVLILRGNGSEAHRVPCSCYNLSATNDSTILDKVILPQLSRLGHLARSRHSADICAVPAESHIYREGCAQGLQKWLHNNLISIVGICLGVGLLELGFMTLSIFLCRNLDHVYNRLARYR

SEQ ID NO: 1300 - DNA, 1717 bp, Homo sapien
ctgccagggggagggccccagagaaaaccagaaagagggtgagagactgaggaagataaagcgtcccagggcctcctacaccagcgcctgagcaggaagcgggaggggccatgactacgaggccctgggaggtcactttagggagggctgtcctaaaaccagaagcttggagcagaaagtgaaaccctggtgctccagacaaagatcttagtcgggactagccggccaaggatgaagcctcacttcagaaacacagtggagcgaatgtatcgagacacattctcctacaacttttataatagacccatcctttctcgtcggaataccgtctggctgtgctacgaagtgaaaacaaagggtccctcaaggccccctttggacgcaaagatctttcgaggccaggtgtattccgaacttaagtaccacccagagatgagattcttccactggttcagcaagtggaggaagctgcatcgtgaccaggagtatgaggtcacctggtacatatcctggagcccctgcacaaagtgtacaagggatatggccacgttcctggccgaggacccgaaggttaccctgaccatcttcgttgcccgcctctactacttctgggacccagattaccaggaggcgcttcgcagcctgtgtcagaaaagagacggtccgcgtgccaccatgaagatcatgaattatgacgaatttcagcactgttggagcaagttcgtgtacagccaaagagagctatttgagccttggaataatctgcctaaatattatatattactgcacatcatgctgggggagattctcagacactcgatggatccacccacattcactttcaactttaacaatgaaccttgggtcagaggacggcatgagacttacctgtgttatgaggtggagcgcatgcacaatgacacctgggtcctgctgaaccagcgcaggggctttctatgcaaccaggctccacataaacacggtttccttgaaggccgccatgcagagctgtgcttcctggacgtgattcccttttggaagctggacctggaccaggactacagggttacctgcttcacctcctggagcccctgcttcagctgtgcccaggaaatggctaaattcatttcaaaaaacaaacacgtgagcctgtgcatcttcactgcccgcatctatgatgatcaaggaagatgtcaggaggggctgcgcaccctggccgaggctggggccaaaatttcaataatgacatacagtgaatttaagcactgctgggacacctttgtggaccaccagggatgtcccttccagccctgggatggactagatgagcacagccaagacctgagtgggaggctgcgggccattctccagaatcaggaaaactgaaggatgggcctcagtctctaaggaaggcagagacctgggttgagcctcagaataaaagatcttcttccaagaaatgcaaacaggctgttcaccaccatctccagctgatcacagacaccagcaaagcaatgcactcctgaccaagtagattcttttaaaaattagagtgcattactttgaatcaaaaatttatttatatttcaagaataaagtactaagattgtgctcaatacacagaaaagtttcaaacctactaatccagcgacaatttgaatcggttttgtaggtagaggaataaaatgaaatactaaatctttctgtaaaaaaaaaa

SEQ ID NO: 1301 - protein, 384 aa, Homo sapien
MKPHFRNTVERMYRDTFSYNFYNRPILSRRNTVWLCYEVKTKGPSRPPLDAKIFRGQVYSELKYHPEMRFFHWFSKWRKLHRDQEYEVTWYISWSPCTKCTRDMATFLAEDPKVTLTIFVARLYYFWDPDYQEALRSLCQKRDGPRATMKIMNYDEFQHCWSKFVYSQRELFEPWNNLPKYYILLHIMLGEILRHSMDPPTFTFNFNNEPWVRGRHETYLCYEVERMHNDTWVLLNQRRGFLCNQAPHKHGFLEGRHAELCFLDVIPFWKLDLDQDYRVTCFTSWSPCFSCAQEMAKFISKNKHVSLCIFTARIYDDQGRCQEGLRTLAEAGAKISIMTYSEFKHCWDTFVDHQGCPFQPWDGLDEHSQDLSGRLRAILQNQEN

SEQ ID NO: 1302 - DNA, 1597 bp, Homo sapien
ggctgagcactcaggcaatcacactctcagaaactgcggcggctctggactgcagcctccaaggctccatgccagacaaagctatgcgtagtcacacttgctacaatagcctggatggtttcttttgtctccaattattcacacacagcaaatattttgccagatatcgaaaatgaagatttcatcaaagactgcgttcgaatccataacaagttccgatcagaggtgaaaccaacagccagtgatatgctatacatgacttgggacccagcactagcccaaattgcaaaagcatgggccagcaattgccagttttcacataatacacggctgaagccaccccacaagctgcacccaaacttcacttcactgggagagaacatctggactgggtctgtgcccattttttctgtgtcttccgccatcacaaactggtatgacgaaatccaggactataacttcaagactcggatatgcaaaaaagtctgtggccactacactcaggttgtttgggcagatagttacaaagttggctgcgcagttcaattttgccctaaagtttctggctttgacgctctttccaatggagcacattttatatgcaactacggaccaggagggaattacccaacttggccatataagagaggagccacctgcagtgcctgccccaataatgacaagtgtttggacaatctctgtgttaacgacagcgagaccaagtcaaacgttactactatgttgtatatcaggctggcccatatatccacgtaacagatacacttctctctttctcattgttaattcagtaattctaatactgtctgttataattaccattttggtacagcacaagtaccctaatttagttcttttggactaatacaattcaggaaagaaaaaacccaaaaaccaacctcattcacatatggctttttttttaacccaataacaattaggtgtaccttcctatttaaacatttcataaaaaaatatatgttatagcaatactcttactcaaaagaagaaatttcctaactctatcagataaactcatctttagtataaataagcattatttgcaggttgcctacaggtggacttttagtaagtaacctaacccatgtttcagcttctaaatctcgaaaatgagcaaggtacaggtacagtagcacatttttaggtgattcttagtaactccagtagccttcattagttaaaaacattattattttttgcatgctgcttcgactctaaatatcttgttttccctgtctttttggtttactacttccccagattcagaacagaggagtaactaggggatctgattttagaggcctaattttctgttcatggactgttaaaagtaaaaccaaactttcaaaagggataaacctaaatatttacttgttatcattagagagggaacatcaaatgctggcactatatacatacgatcagcctgattatgatatcacaatggtcgtaatgtatacaaagacttatataccactttctcgtataaatttttcaaaaaatacaataataatataatttataaagaacactcttctatgaacaaccaccaccacca

SEQ ID NO: 1303 - protein, 219 aa, Homo sapien
MVSFVSNYSHTANILPDIENEDFIKDCVRIHNKFRSEVKPTASDMLYMTWDPALAQIAKAWASNCQFSHNTRLKPPHKLHPNFTSLGENIWTGSVPIFSVSSAITNWYDEIQDYNFKTRICKKVCGHYTQVVWADSYKVGCAVQFCPKVSGFDALSNGAHFICNYGPGGNYPTWPYKRGATCSACPNNDKCLDNLCVNDSETKSNVTTMLYIRLAHIST

SEQ ID NO: 1304 - DNA, 1061 bp, Homo sapien
ctctgttttctcaaagctgaagtcggctaggtttgcaaagctgtgggctgagcactcaggcaatcacactctcagaaactgcggcggctctggactgcagcctcccaaggctccatgccagacaaagcatgcgtgtcacacttgctacaatagcctggatggtttcttttgtctccaattattcacacacagcaaatattttgccagatatcgaaaatgaagatttcatcaaagactgcgttcgaatccataacaagttccgatcagaggtgaaaccaacagccagtgatatgctatacatgacttgggacccagcactagcccaaattgcaaaagcatgggccagcaattgccagttttcacataatacacggctgaagccaccccacaagctgcacccaaacttcacttcactgggagagaacatctggactgggtctgtgcccattttttctgtgtcttccgccatcacaaactggtatgacgaaatccaggactatgacttcaagactcggatatgcaaaaaagtctgtggccactacactcaggttgtttgggcagatagttacaaagttggctgcgcagttcaattttgccctaaagtttctggctttgacgctctttccaatggagcacattttatatgcaactacggaccaggagggaattacccaacttggccatataagagaggagccacctgcagtgcctgccccaataatgacaagtgtttggacaatctctgtgttaaccgacagcgagaccaagtgaaacgttactactctgttgtatatccaggctggcccatatatccacgtaacagatacacttctctctttctcattgttaattcagtaattctaatactgtctgttataattaccattttggtacagctcaagtaccctaatttagttcttttggactaatacaattcaggaaagaaaaaacccaaaaaccaacctcattcacatatggcttttttttaaccaataacaattaggtgtacttctattttaaaacatttcagaaaaaaatatatgttatagcaatactcttac

SEQ ID NO: 1305 - protein, 266 aa, Homo sapien
MRVTLATIAWMVSFVSNYSHTANILPDIENEDFIKDCVRIHNKFRSEVKPTASDMLYMTWDPALAQIAKAWASNCQFSHNTRLKPPHKLHPNFTSLGENIWTGSVPIFSVSSAITNWYDEIQDYDFKTRICKKVCGHYTQVVWADSYKVGCAVQFCPKVSGFDALSNGAHFICNYGPGGNYPTWPYKRGATCSACPNNDKCLDNLCVNRQRDQVKRYYSVVYPGWPIYPRNRYTSLFLIVNSVILILSVIITILVQLKYPNLVLLD

SEQ ID NO: 1306 - DNA, 2921 bp, Homo sapien
ccggctcggagtgtgatctaagcaggtcgcgtaccttcctcaggtgactccggccacagcccattgtccgcggccaccggcggagtttagccgcagacctcgaagcgccccggggtccttcccgaacggcagcggctgcggcgggtccatggagaagggccctgtgcgggcaccggcggagaagccgcggggcgccaggtgcagcaatgggttccccgagcgggatccgccgcggcccgggcccagcaggccggcggagaagcccccgcggcccgaggccaagagcgcgcagcccgcggacggctggaagggcgagcggccccgcagcgaggaggataacgagctgaacctccctaacctggcagccgcctactcgtccatcctgagctcgctgggcgagaacccccagcggcaagggctgctcaagacgccctggagggcggcctcggccatgcagttcttcaccaagggctaccaggagaccatctcagatgtcctaaacgatgctatatttgatgaagatcatgatgagatggtgattgtgaaggacatagacatgttttccatgtgtgagcatcacttggttccatttgttggaaaggtccatattggttatcttcctaacaagcaagtccttggcctcagcaaacttgcgaggattgtagaaatctatagtagaagactacaagttcaggagcgccttacaaaacaaattgctgtagcaatcacggaagccttgcggcctgctggagtcggggtagtggttgaagcaacacacatgtgtatggtaatgcgaggtgtacagaaaatgaacagcaaaactgtgaccagcacaatgttgggtgtgttccgggaggatccaaagactcgggaagagttcctgactctcattaggagctgagcttcattcagtgtgtgtgcgttggttgccgatcgtactgccagtagcattgtctgtctgtccggtcttgtttgtacattccattttcaattgttacagatgtgaactttattccttgtcactaattatatttaaaattatttctaggaagtcaaataaatataataaagggttgagcctctactttcttcttgccacctttttgtggcaatattaaagtgaactgctaatagtgtaagtatgtgcacaaaaccactgccagataaccagaggggcctgggaagggagaagaattagtgtatttttttcaaatagtacagtaatttgcctcataagcataggagcattgggaatgagagggaactgtgcccagtatactgttttttttcttcctccaataaaagtggtgtagtgccgaaagtgctaaaatatttagtgcggtattgctctgtgaattcaagttcaacagacttcactttggtcatgtttattaaaccaccagtgacatttaaaaatatatttttagcagtcgtaatgttagtcaccaagggaaggtggtggaatgtctatgtttttgattttactgtgagttaaaaaggcacatttctaccttctattgtttttaaattcaagaatagggaattagttcctggtgttgtttacgagtgtattctcgtgtcaacatacagggatttagacatttaactctctgtgccttgataagaatatcatttagagtgtagatacttttgcctttttaaaaaagccattattttatgagacttagtactcacactgcaaataactagtcagctcagttttaactttataggtttattgagtttcctttgtgtgatccatgtagatgcctcaaaatgtttcttcttcttcttttttttaatcttataagatatttttctaagtatttccagaaacatttgagagtgcccatcattttcaggtctgcagaaccatagcttccacgcacctgaacgagcacagaatgaactgacggtggaagacattatgagctgtgtccaacgttttaaccaaagcgtatcgtaccaacgatctgtgaaaatgcactggaagcttctggtcccggtttcctttgtggtctatgtgggtcttgtcctcattgtaactccgtatagatggtataggtattttaatcctggaagctgttgccttattaatgattatcttaaaatttcctccattggggcagcgtgggccaaattaaaacaaacaaaaccgcaactcctccacagaaacacaaacacagttattccatgaagtttagtatttggttgacatagtgctcttcaaattcatcccattaccctaaaagtaataactttgatgcttgctttaactttagtcccatctctgccactttgatgctatttgggttatgatggggcaagatggcagaggtattgggtttttttgtttttttccattcctctctacttctgtttcctagctttttctttctggagtttaagtacagtgatggttggcttgagtacctttttaaatctagcccagtataaacattagcctgcttaatatttagacatttataggtagaattctgagcactcaactcatgtttggcattttaaagtaaaaacaagtgtgacttcgaggaccaaagaaattgtcagctatacatttatctttatgaactcatttatattcctttttaatgactcgttgttctaacatttcctagaagtgttcttataaaggtctaatgtatccacaggctgttgtcttattagtaaatgcaaagtaatgactttgtctgttttactctagtctttagtacttcaaaattaccttttcatatccatgatcttgagtccatttgggggatttttaagaatttgatgtatttcaatacactgttcaaaattaaattgtttaattttatgtatgagtatgtatgttcctgaagttggtcctatttaaattattaaactattgtaactttaaaaaaaaaaaaaaaaaaaaa

SEQ ID NO: 1307 - protein, 250 aa, Homo sapien
MEKGPVRAPAEKPRGARCSNGFPERDPPRPGPSRPAEKPPRPEAKSAQPADGWKGERPRSEEDNELNLPNLAAAYSSILSSLGENPQRQGLLKTPWRAASAMQFFTKGYQETISDVLNDAIFDEDHDEMVIVKDIDMFSMCEHHLVPFVGKVHIGYLPNKQVLGLSKLARIVEIYSRRLQVQERLTKQIAVAITEALRPAGVGVVVEATHMCMVMRGVQKMNSKTVTSTMLGVFREDPKTREEFLTLIRS

SEQ ID NO: 1308 - DNA, 591 bp, Homo sapien
cagaacggccgatctccagcccaagatgattccagcagtggtcttgctcttactccttttggttgaacaagcagcggccctgggagagcctcagctctgctatatcctggatgccatcctgtttctgtatggaattgtcctcaccctcctctactgtcgactgaagatccaagtgcgaaaggcagctataaccagctatgagaaatcagatggtgtttacacgggcctgagcaccaggaaccaggagacttacgagactctgaagcatgagaaaccaccacagtagctttagaatagatgcggtcatattcttctttggcttctggttcttccagccctcatggttggcatcacatatgcctgcatgccattaacaccagctggccctacccctataatgatcctgtgtcctaaattaatatacaccagtggttcctcctccctgttaaagactaatgctcagatgctgtttacggatatttatattctagtctcactctcttgtcccacccttcttctcttccccattcccaactccagctaaaatatgggaagggagaacccccaataaaactgccatggactggactc

SEQ ID NO: 1309 - protein, 86 aa, Homo sapien
MIPAVVLLLLLLVEQAAALGEPQLCYILDAILFLYGIVLTLLYCRLKIQVRKAAITSYEKSDGVYTGLSTRNQETYETLKHEKPPQ

SEQ ID NO: 1310 - DNA, 2957 bp, Homo sapien
gaattcccaaacgtgcacaggggagtgagggcagggcgctcgcagggggcacgcagggagggcccagggcgccagggaggccgcgccgggctaatccgaaggggctgcgaggtcaggctgtaaccgggtcaatgtgtggaatattggggggctcggctgcagacttggccaaatggacgggactattaaggaggctctgtcggtggtgagcgacgaccagtccctctttgactcagcgtacggagcggcagcccatctccccaaggccgacatgactgcctcggggagtcctgactacgggcagccccacaagatcaaccccctcccaccacagcaggagtggatcaatcagccagtgagggtcaacgtcaagcgggagtatgaccacatgaatggatccagggagtctccggtggactgcagcgttagcaaatgcagcaagctggtgggcggaggcgagtccaaccccatgaactacaacagctatatggacgagaagaatggcccccctcctcccaacatgaccaccaacgagaggagagtcatcgtccccgcagaccccacactgtggacacaggagcatgtgaggcaatggctggagtgggccataaaggagtacagcttgatggagatcgacacatcctttttccagaacatggatggcaaggaactgtgtaaaatgaacaaggaggacttcctccgcgccaccaccctctacaacacggaagtgctgttgtcacacctcagttacctcagggaaagttcactgctggcctataatacaacctcccacaccgaccaatcctcacgattgagtgtcaaagaagacccttcttatgactcagtcagaagaggagcttggggcaataacatgaattctggcctcaacaaaagtcctccccttggaggggcacaaacgatcagtaagaatacagagcaacggccccagccagatccgtatcagatcctgggcccgaccagcagtcgcctagccaaccctggaagcgggcagatccagctgtggcaattcctcctggagctgctctccgacagcgccaacgccagctgtatcacctgggaggggaccaacggggagttcaaaatgacggaccccgatgaggtggccaggcgctggggcgagcggaaaagcaagcccaacatgaattacgacaagctgagccgggccctccgttattactatgataaaaacattatgaccaaagtgcacggcaaaagatatgcttacaaatttgacttccacggcattgcccaggctctgcagccacatccgaccgagtcgtccatgtacaagtacccttctgacatctcctacatgccttcctaccatgcccaccagcagaaggtgaactttgtccctccccatccatcctccatgcctgtcacttcctccagcttctttggagccgcatcacaatactggacctcccccacggggggaatctaccccaaccccaacgtcccccgccatcctaacacccacgtgccttcacacttaggcagctactactagaagcttcttctagctgaagcccatcctgcacacttactggatgctttggactcaacaggacatatgtggccttgaagggaagacaaaactggatgttctttcttgttggatagaacctttgtatttgttctttaaaaacattttttttaatgttggtaacttttgcttcctctacctgaacaaagagatgaataattccatgggccagtatgccagtttgaattctcagtctcctagcatcttgtgagttgcatattaagattactggaatggttaagtcatggttctgagaaagaagctgtacgttttctttatgtttttatgaccaaagcagtttcttgtcaatacacggggttcagtatgacacagaatcatggacttaacccgtcatgttctggtttgagatttagtgacaaatagaggtgggaagcttataatctaattttaggaggaccaaattcagcggatggcaactggaacattgattgtaaggccagtgaagttttcacccaactggaatttgatggaaagaaggtttgtgtgtttaagacgccaagggcattgcagaatccctctcagtggacagtatgcactcagctgaccactctctctagaaatagtcaagatatgaactaagaaattttaatgcaaatacatacattcctgaaagacggggaattaaattactaattttttttttttaaatgatgacagtggtcccagaacttggaaaagttgtagggatttctaaactcaagcagattcgcaagtgctgtgcgcttgtcagaccatcagaccagggccaaccaatcagaaggcaacttactgtataaattatgcagagttattttcctatatctcacagtattaaaaaataaataattaaaaattaagaataaataaacgagttgacctcggtcacaaaagcagttttactatcgaatcaatcgctgttatttttttttaatgtaatttgtacatcttttttcaatctgtacatttgggctgtcttgtatgtttttatgctcctttttaaaaagcataatatgcctatagctgaaaaggaaacagggctgtttaagtcactgacttatgagaaagcaaagcactggtacagttatttaacaggcatacacaagcagggaaaagataatccatttagatctttaatgctttggaaatgcgtgtaacagtactgcaataatcacagctctgggaaaaacaacgaaactttcccttgtggagaggagggattttcctgctctatataagcaacatatttttagacattaaaatatatataattttgcaggtaattgttgacttttttaactatattaagtgttaagctgacaactgtcaaagaagaccatgttgtaaaataatttgactaaataaatggttccttctctcaaaaaaaaaaaaa

SEQ ID NO: 1311 - protein, 452 aa, Homo sapien
MDGTIKEALSVVSDDQSLFDSAYGAAAHLPKADMTASGSPDYGQPHKINPLPPQQEWINQPVRVNVKREYDHMNGSRESPVDCSVSKCSKLVGGGESNPMNYNSYMDEKNGPPPPNMTTNERRVIVPADPTLWTQEHVRQWLEWAIKEYSLMEIDTSFFQNMDGKELCKMNKEDFLRATTLYNTEVLLSHLSYLRESSLLAYNTTSHTDQSSRLSVKEDPSYDSVRRGAWGNNMNSGLNKSPPLGGAQTISKNTEQRPQPDPYQILGPTSSRLANPGSGQIQLWQFLLELLSDSANASCITWEGTNGEFKMTDPDEVARRWGERKSKPNMNYDKLSRALRYYYDKNIMTKVHGKRYAYKFDFHGIAQALQPHPTESSMYKYPSDISYMPSYHAHQQKVNFVPPHPSSMPVTSSSFFGAASQYWTSPTGGIYPNPNVPRHPNTHVPSHLGSYY

SEQ ID NO: 1312 - DNA, 644 bp, Homo sapien
gcgcgggcggctggggaatggctgctgccatggtgccggggcgcagcgagagctgggagcgcggggagcctggccgcccggccctgtacttctgcgggagcattcgcggcggacgcgaggacaggacgctgtacgagcggatcgtgtctcggctgcggcgattcgggacagtgctcaccgagcacgtggcggccgccgagctgggcgcgcgcggggaagaggctgctgggggtgacaggctcatccatgagcaggacctggagtggctgcagcaggcggacgtggtcgtggcagaagtgacacagccatccttgggtgtaggctatgagctgggccgggccgtggcctttaacaagcggatcctgtgcctgttccgcccgcagtctggccgcgtgctttcggccatgatccggggagcagcagatggctctcggttccaggtgtgggactatgaggagggagaggtggaggccctgctggatcgatacttcgaggctgatcctccagggcaggtggctgcctcccctgacccaaccacttgacttaatctcactttcttaaattcttctattctcagacactgctctagtaccattccttcctcttagccccaggagcaaattaaaaggtacagttaaaatcct

SEQ ID NO: 1313 - protein, 174 aa, Homo sapien
MAAAMVPGRSESWERGEPGRPALYFCGSIRGGREDRTLYERIVSRLRRFGTVLTEHVAAAELGARGEEAAGGDRLIHEQDLEWLQQADVVVAEVTQPSLGVGYELGRAVAFNKRILCLFRPQSGRVLSAMIRGAADGSRFQVWDYEEGEVEALLDRYFEADPPGQVAASPDPTT

SEQ ID NO: 1314 - DNA, 4166 bp, Homo sapien
cggcgcgggtgttgagagcggtgtggtaggtgttgtagccgctatggtgaagttcgctttgtagcggccccggctagagagttggcctgttccctgcctttgtgacccggaggagcttttgggggtgcgtcaagcccctggcctgaggcagcgaactggtttgtggcctgtttgattcctgtcagaggtttgctgacccaagacagtatcgaaaatgcatattaagtcaattattctagagggattcaagtcctatgctcagaggaccgaagtcaatggttttgaccccctcttcaatgctatcactggcttaaatggtagtgggaaatccaacatattggactccatctgctttttactgggcatctccaacctgtctcaggttcgggcttctaatttacaagatttagtttacaaaaatgggcaggctggtattaccaaagcctctgtgtcaatcacttttgataattctgacaaaaagcaaagtcctttaggatttgaggttcatgatgaaatcacagtaacaaggcaggtggttattggtggtagaaataaatatttaatcaatggagtcaatgccaacaacaccagagtacaggatctcttctgttctgttggccttaatgttaacaaccctcactttctcatcatgcagggccgaattacaaaagtattgaatatgaaaccaccagagattttatccatgatagaagaagcagctggaaccaggatgtatgaatacaaaaaaatagctgcacagaaaactatagaaaaaaaggaggctaagctgaaagaaattaagacgatacttgaagaagagattactccaaccattcaaaaattaaaagaggaaagatcgtcctacttggagtaccaaaaagtaatgagagaaatagaacatttgagtcgtttatatattgcttatcagtttttgctggctgaagataccaaagtacgctcagctgaggaattaaaagaaatgcaagataaagttataaagcttcaggaagaattgtctgagaatgataaaaaaataaaagcacttaatcatgaaatagaagaattggaaaaaagaaaagataaggaaactggagttatacttcgatctttagaagatgctcttgcagaggctcagcgagttaatactaaatctcaaagcgcatttgatctcaagaagaaaaatctggcatgtgaggaaagcaaacgcaaagagctggaaaaaaatatggttgaggactcaaaaactttagcagcaaaggaaaaagaggttaaaaagataacagatggactgcatgcccttcaagaagcaagtaataaagatgctgaagctctggcagctgcacagcagcacttcaatgctgtttccgctggcctgtccagtaatgaagatggagcagaagcaactcttgctggtcaaatgatggcctgtaaaaatgatataagtaaagctcagacagaagccaaacaggctcagatgaagttgaagcatgctcaacaggaattaaagaataaacaagctgaagttaagaagatggatagtggctacaggaaggatcaagaagctctagaagctgtaaaaagacttaaagaaaaacttgaagctgaaatgaaaaagctaaattatgaagaaaataaagaggaaagccttttggaaaagcgcaggcagctgtctcgtgatattggtagattgaaagaaacatatgaagctctattagccagatttcccaatcttcgatttgcatacaaggatccagagaagaactggaatagaaattgtgtgaaaggacttgtggcttctctgattagtgtgaaagacacttctgcaaccacagctttagaattagtggctggagaacgactctacaatgttgtagtagacacagaagttactggtaaaaagctactagaaaggggggaactgaaacgtcgatacactataattccactcaataaaatttcagccagatgtattgcaccagaaactctgagagttgctcagaatcttgttggccctgacaacgttcatgtggctctttccttggttgaatataaaccagaacttcagaaagcaatggagtttgtctttggaacaacatttgtttgtgacaatatggataatgccaaaaaagtggcctttgataagaggataatgactagaactgtaactctcggaggtgatgtgtttgatcctcatgggacattgagtggaggtgctcgatcccaggcagcttccattttaaccaagtttcaagaactcaaagatgttcaggatgaactgagaatcaaagagaatgagctgcgggctctagaagaggaattagcaggtcttaaaaacactgctgaaaagtatcgccaactaaaacagcagtgggagatgaaaactgaagaggcagatttattacaaaccaagctccagcaaagctcatatcacaagcaacaagaagaattagatgcccttaaaaaaaccattgaggaaagtgaggagactttgaaaaacactaaagaaatccaaagaaaagcagaagaaaaatatgaagtattggaaaataaaatgaaaaatgcagaagctgaaagagagcgagaactgaaagatgctcagaaaaaactggattgtgccaaaacaaaggcagatgcatctagcaagaagatgaaagaaaaacaacaggaagttgaagctatcactctggaactggaagagctcaagagagagcatacatcttacaaacaacagcttgaagctgtaaatgaagctatcaaatcctatgaaagtcagattgaagtaatggcagctgaggtggctaaaaataaggagtcagtaaataaagctcaagaagaggtgaccaagcaaaaagaggtgataacagcccaagacactgtaattaagctaaatatgcagaagtggcaaaacacaaggagcaaaacaatgattctcagccttaaaattaaggaattagaccaccacatcagcaaacataaacgggaggctgaagatggtgctgcaaaggtatccaaaatgttgaaagattatgactggattaatgcagagagacacctctttggccaacccaatagtgcctatgatttcaaaactaacaaccctaaagaagctggtcagagacttcagaagttgcaagaaatgaaggagaaactaggaagaaatgtcaatatgagagctatgaatgtattgacagaagctgaagagcgatgcaatgacttgatgaagaagaagagaattgtagaaaatgacaaatccaaaattcttacaactatagaagaccttgaccagaagaaaaaccaagccctaaatattgcatggcaaaaggtgaacaaggactttgggtctattttttctactcttttgcctggtgctaatgctatgcttgcaccaccagagggtcaaactgttttggatggtctggagttcaaggttgccttaggaaatacctggaaagaaaacctaactgaacttagtggtggtcagaggtctttagtggccttgtcattaatactgtccatgcttctcttcaaacctgctccaatttatatccttgatgaggtagatgcagccttggatctttctcatacccaaaacattggacagatgctgcgtactcatttcacacattctcagttcattgtggtgtcactaaaagaaggtatgttcaacaatgcaaacgttcttttcaaaaccaagtttgtggatggtgtttctacagtagccagatttactcaatgtcaaaatggaaagatttcaaaggaagcaaaatccaaggcaaaaccacccaaaggagcacatgtggaagtttaaactacaaagttatttcttcatcttgacctgtttttttaaatgtaaacttttaaggacttgagataactaatttgtttatatacaaaaattaatgttactgtgttacttaacccatgttttctctttatataatcacttatcgcttacaaatgagcatatattcctcatctcttaactagtctaattatggtccaattattgtggttgtgattttatgcatatccatcaaaatgttttttttcttatgcgggtcttttatatattagggatcctgagatacccgattctatatgtaaaagctaatatacaaaaaagcagattaaattacatgataaatgtagctgaaaaaaaaaaaaaa

SEQ ID NO: 1315 - protein, 1197 aa, Homo sapien
MHIKSIILEGFKSYAQRTEVNGFDPLFNAITGLNGSGKSNILDSICFLLGISNLSQVRASNLQDLVYKNGQAGITKASVSITFDNSDKKQSPLGFEVHDEITVTRQVVIGGRNKYLINGVNANNTRVQDLFCSVGLNVNNPHFLIMQGRITKVLNMKPPEILSMIEEAAGTRMYEYKKIAAQKTIEKKEAKLKEIKTILEEEITPTIQKLKEERSSYLEYQKVMREIEHLSRLYIAYQFLLAEDTKVRSAEELKEMQDKVIKLQEELSENDKKIKALNHEIEELEKRKDKETGVILRSLEDALAEAQRVNTKSQSAFDLKKKNLACEESKRKELEKNMVEDSKTLAAKEKEVKKITDGLHALQEASNKDAEALAAAQQHFNAVSAGLSSNEDGAEATLAGQMMACKNDISKAQTEAKQAQMKLKHAQQELKNKQAEVKKMDSGYRKDQEALEAVKRLKEKLEAEMKKLNYEENKEESLLEKRRQLSRDIGRLKETYEALLARFPNLRFAYKDPEKNWNRNCVKGLVASLISVKDTSATTALELVAGERLYNVVVDTEVTGKKLLERGELKRRYTIIPLNKISARCIAPETLRVAQNLVGPDNVHVALSLVEYKPELQKAMEFVFGTTFVCDNMDNAKKVAFDKRIMTRTVTLGGDVFDPHGTLSGGARSQAASILTKFQELKDVQDELRIKENELRALEEELAGLKNTAEKYRQLKQQWEMKTEEADLLQTKLQQSSYHKQQEELDALKKTIEESEETLKNTKEIQRKAEEKYEVLENKMKNAEAERERELKDAQKKLDCAKTKADASSKKMKEKQQEVEAITLELEELKREHTSYKQQLEAVNEAIKSYESQIEVMAAEVAKNKESVNKAQEEVTKQKEVITAQDTVIKLNMQKWQNTRSKTMILSLKIKELDHHISKHKREAEDGAAKVSKMLKDYDWINAERHLFGQPNSAYDFKTNNPKEAGQRLQKLQEMKEKLGRNVNMRAMNVLTEAEERCNDLMKKKRIVENDKSKILTTIEDLDQKKNQALNIAWQKVNKDFGSIFSTLLPGANAMLAPPEGQTVLDGLEFKVALGNTWKENLTELSGGQRSLVALSLILSMLLFKPAPIYILDEVDAALDLSHTQNIGQMLRTHFTHSQFIVVSLKEGMFNNANVLFKTKFVDGVSTVARFTQCQNGKISKEAKSKAKPPKGAHVEV

SEQ ID NO: 1316 - DNA, 2328 bp, Homo sapien
ggaagcagggcggggcctctggtggcggtcgggaactcggtgggaggcggcaacattgtttcaagttggccaaattgacaagagcgagaggtatactgcgttccatcccgacccggggccacggtactgggccctgtttccccctcctcggcccccgagagccagggtccgccttctgcagggttcccaggcccccgctccagggccgggctgacccgactcgctggcgcttcatggagaacttccaaaaggtggaaaagatcggagagggcacgtacggagttgtgtacaaagccagaaacaagttgacgggagaggtggtggcgcttaagaaaatccgcctggacactgagactgagggtgtgcccagtactgccatccgagagatctctctgcttaaggagcttaaccatcctaatattgtcaagctgctggatgtcattcacacagaaaataaactctacctggtttttgaatttctgcaccaagatctcaagaaattcatggatgcctctgctctcactggcattcctcttcccctcatcaagagctatctgttccagctgctccagggcctagctttctgccattctcatcgggtcctccaccgagaccttaaacctcagaatctgcttattaacacagagggggccatcaagctagcagactttggactagccagagcttttggagtccctgttcgtacttacacccatgaggtggtgaccctgtggtaccgagctcctgaaatcctcctgggctgcaaatattattccacagctgtggacatctggagcctgggctgcatctttgctgagatggtgactcgccgggccctattccctggagattctgagattgaccagctcttccggatctttcggactctggggaccccagatgaggtggtgtggccaggagttacttctatgcctgattacaagccaagtttccccaagtgggcccggcaagattttagtaaagttgtacctcccctggatgaagatggacggagcttgttatcgcaaatgctgcactacgaccctaacaagcggatttcggccaaggcagccctggctcaccctttcttccaggatgtgaccaagccagtaccccatcttcgactctgatagccttcttgaagcccccagccctaatctcaccctctcctccagtgtgggcttgaccaggcttggccttgggctatttggactcaggtgggccctctgaacttgccttaaacactcaccttctagtcttggccagccaactctgggaatacaggggtgaaaggggggaaccagtgaaaatgaaaggaagtttcagtattagatgcacttaagttagcctccaccaccctttcccccttctcttagttattgctgaagagggttggtataaaaataattttaaaaaagccttcctacacgttagatttgccgtaccaatctctgaatgccccataattattatttccagtgtttgggatgaccaggatcccaagcctcctgctgccacaatgtttataaaggccaaatgatagcgggggctaagttggtgcttttgagaaccaagtaaaacaaaaccactgggaggagtctattttaaagaattcggttgaaaaaatagatccaatcagtttataccctagttagtgttttgcctcacctaataggctgggagactgaagactcagcccgggtggggctgcagaaaaatgattggccccagtccccttgtttgtcccttctacaggcatgaggaatctgggaggccctgagacagggattgtgcttcattccaatctattgcttcaccatggccttatgaggcaggtgagagatgtttgaatttttctcttccttttagtattcttagttgttcagttgccaaggatccctgatcccattttcctctgacgtccacctcctaccccataggagttagaagttagggtttaggcatcattttgagaatgctgacactttttcagggctgtgattgagtgagggcatgggtaaaaatatttctttaaaagaaggatgaacaattatatttatatttcaggttatatccaatagtagagttggcttttttttttttttttttggtcatagtgggtggatttgttgccatgtgcaccttggggttttgtaatgacagtgctaaaaaaaaaaaagcatttttttttatgatttgtctctgtcacccttgtccttgagtgctcttgctattaacgttatttgtaatttagtttgtagctcattaaaaaaatgtgcctagttttataaaaaaaaaaaaaaaaaaaaaaaaaaaaaaaaaaaaaaa

SEQ ID NO: 1317 - protein, 298 aa, Homo sapien
MENFQKVEKIGEGTYGVVYKARNKLTGEVVALKKIRLDTETEGVPSTAIREISLLKELNHPNIVKLLDVIHTENKLYLVFEFLHQDLKKFMDASALTGIPLPLIKSYLFQLLQGLAFCHSHRVLHRDLKPQNLLINTEGAIKLADFGLARAFGVPVRTYTHEVVTLWYRAPEILLGCKYYSTAVDIWSLGCIFAEMVTRRALFPGDSEIDQLFRIFRTLGTPDEVVWPGVTSMPDYKPSFPKWARQDFSKVVPPLDEDGRSLLSQMLHYDPNKRISAKAALAHPFFQDVTKPVPHLRL

SEQ ID NO: 1318 - DNA, 4604 bp, Homo sapien
ggaacagcttgtccacccgccggccggaccagaagcctttgggtctgaagtgtctgtgagacctcacagaagagcacccctgggctccacttacctgccccctgctccttcagggatggaggcaatggcggccagcacttccctgcctgaccctggagactttgaccggaacgtgccccggatctgtggggtgtgtggagaccgagccactggctttcacttcaatgctatgacctgtgaaggctgcaaaggcttcttcaggcgaagcatgaagcggaaggcactattcacctgccccttcaacggggactgccgcatcaccaaggacaaccgacgccactgccaggcctgccggctcaaacgctgtgtggacatcggcatgatgaaggagttcattctgacagatgaggaagtgcagaggaagcgggagatgatcctgaagcggaaggaggaggaggccttgaaggacagtctgcggcccaagctgtctgaggagcagcagcgcatcattgccatactgctggacgcccaccataagacctacgaccccacctactccgacttctgccagttccggcctccagttcgtgtgaatgatggtggagggagccatccttccaggcccaactccagacacactcccagcttctctggggactcctcctcctcctgctcagatcactgtatcacctcttcagacatgatggactcgtccagcttctccaatctggatctgagtgaagaagattcagatgacccttctgtgaccctagagctgtcccagctctccatgctgccccacctggctgacctggtcagttacagcatccaaaaggtcattggctttgctaagatgataccaggattcagagacctcacctctgaggaccagatcgtactgctgaagtcaagtgccattgaggtcatcatgttgcgctccaatgagtccttcaccatggacgacatgtcctggacctgtggcaaccaagactacaagtaccgcgtcagtgacgtgaccaaagccggacacagcctggagctgattgagcccctcatcaagttccaggtgggactgaagaagctgaacttgcatgaggaggagcatgtcctgctcatggccatctgcatcgtctccccagatcgtcctggggtgcaggacgccgcgctgattgaggccatccaggaccgcctgtccaacacactgcagacgtacatccgctgccgccacccgcccccgggcagccacctgctctatgccaagatgatccagaagctagccgacctgcgcagcctcaatgaggagcactccaagcagtaccgctgcctctccttccagcctgagtgcagcatgaagctaacgccccttgtgctcgaagtgtttggcaatgagatctcctgactaggacagcctgtgcggtgcctgggtggggctgctcctccagggccacgtgccaggcccggggctggcggctactcagcagccctcctcacccgtctggggttcagcccctcctctgccacctcccctatccacccagcccattctctctcctgtccaacctaacccctttcctgcgggcttttccccggtcccttgagacctcagccatgaggagttgctgtttgtttgacaaagaaacccaagtgggggcagagggcagaggctggaggcaggccttgcccagagatgcctccaccgctgcctaagtggctgctgactgatgttgagggaacagacaggagaaatgcatccattcctcagggacagagacacctgcacctccccccactgcaggccccgcttgtccagcgcctagtggggtctccctctcctgccttactcacgataaataatcggcccacagctcccaccccacccccttcagtgcccaccaacatcccattgccctggttatattctcacgggcagtagctgtggtgaggtgggttttcttcccatcactggagcaccaggcacgaacccacctgctgagagacccaaggaggaaaaacagacaaaaacagcctcacagaagaatatgacagctgtccctgtcaccaagctcacagttcctcgccctgggtctaaggggttggttgaggtggaagccctccttccacggatccatgtagcaggactgaattgtccccagtttgcagaaaagcacctgccgacctcgtcctccccctgccagtgccttacctcctgcccaggagagccagccctccctgtcctcctcggatcaccgagagtagccgagagcctgctcccccaccccctccccaggggagagggtctggagaagcagtgagccgcatcttctccatctggcagggtgggatggaggagaagaattttcagaccccagcggctgagtcatgatctccctgccgcctcaatgtggttgcaaggccgctgttcaccacagggctaagagctaggctgccgcaccccagagtgtgggaagggagagcggggcagtctcgggtggctagtcagagagagtgtttgggggttccgtgatgtagggtaaggtgccttcttattctcactccaccacccaaaagtcaaaaggtgcctgtgaggcaggggcggagtgatacaacttcaagtgcatgctctctgcaggtcgagcccagcccagctggtgggaagcgtctgtccgtttactccaaggtgggtctttgtgagagtgagctgtaggtgtgcgggaccggtacagaaaggcgttcttcgaggtggatcacagaggcttcttcagatcaatgcttgagtttggaatcggccgcattccctgagtcaccaggaatgttaaagtcagtgggaacgtgactgccccaactcctggaagctgtgtccttgcacctgcatccgtagttccctgaaaacccagagaggaatcagacttcacactgcaagagccttggtgtccacctggccccatgtctctcagaattcttcaggtggaaaaacatctgaaagccacgttccttactgcagaatagcatatatatcgcttaatcttaaatttattagatatgagttgttttcagactcagactccatttgtattatagtctaatatacagggtagcaggtaccactgatttggagatatttatggggggagaacttacattgtgaaacttctgtacattaattattattgctgttgttattttacaagggtctagggagagacccttgtttgattttagctgcagaactgtattggtccagcttgctcttcagtgggagaaaaacacttgtaagttgctaaacgagtcaatcccctcattcaggaaaactgacagaggagggcgtgactcacccaagccatatataactagctagaagtgggccaggacaggccgggcgcggtggctcacgcctgtaatcccagcagtttgggaggtcgaggtaggtggatcacctgaggtcgggagttcgagaccaacctgaccaacatggagaaaccctgtctctattaaaaatacaaaaaaaaaaaaaaaaaaaaatagccgggcatggtggcgcaagcctgtaatcccagctactcaggaggctgaggcagaagaattgaacccaggaggtggaggttgcagtgagctgagatcgtgccgttactctccaacctggacaacaagagcgaaactccgtcttagaagtggaccaggacaggaccagattttggagtcatggtccggtgtccttttcactacaccatgtttgagctcagacccccactctcattccccaggtggctgacccagtccctgggggaagccctggatttcagaaagagccaagtctggatctgggaccctttccttccttccctggcttgtaactccaccaagcccatcagaaggagaaggaaggagactcacctctgcctcaatgtgaatcagaccctaccccaccacgatgtgccctggctgctgggctctccacctcaggccttggataatgctgttgcctcatctataacatgcatttgtctttgtaatgtcaccaccttcccagctctccctctggccctgcttcttcggggaactcctgaaatatcagttactcagccctgggccccaccacctaggccactcctccaaaggaagtctaggagctgggaggaaaagaaaagaggggaaaatgagtttttatggggctgaacggggagaaaaggtcatcatcgattctactttagaatgagagtgtgaaatagacatttgtaaatgtaaaacttttaaggtatatcattataactgaaggagaaggtgccccaaaatgcaagattttccacaagattcccagagacaggaaaatcctctggctggctaactggaagcatgtaggagaatccaagcgaggtcaacagagaaggcaggaatgtgtggcagatttagtgaaagctagagatatggcagcgaaaggatgtaaacagtgcctgctgaatgatttccaaagagaaaaaaagtttgccagaagtttgtcaagtcaaccaatgtagaaagctttgcttatggtaataaaaatggctcatacttatatagcacttactttgtttgcaagtactgctgtaaataaatgctttatgcaaacc

SEQ ID NO: 1319 - protein, 427 aa, Homo sapien
MEAMAASTSLPDPGDFDRNVPRICGVCGDRATGFHFNAMTCEGCKGFFRRSMKRKALFTCPFNGDCRITKDNRRHCQACRLKRCVDIGMMKEFILTDEEVQRKREMILKRKEEEALKDSLRPKLSEEQQRIIAILLDAHHKTYDPTYSDFCQFRPPVRVNDGGGSHPSRPNSRHTPSFSGDSSSSCSDHCITSSDMMDSSSFSNLDLSEEDSDDPSVTLELSQLSMLPHLADLVSYSIQKVIGFAKMIPGFRDLTSEDQIVLLKSSAIEVIMLRSNESFTMDDMSWTCGNQDYKYRVSDVTKAGHSLELIEPLIKFQVGLKKLNLHEEEHVLLMAICIVSPDRPGVQDAALIEAIQDRLSNTLQTYIRCRHPPPGSHLLYAKMIQKLADLRSLNEEHSKQYRCLSFQPECSMKLTPLVLEVFGNEIS

SEQ ID NO: 1320 - DNA, 4604 bp, Homo sapien; identical to SEQ ID NO: 1318

SEQ ID NO: 1321 - protein, 427 aa, Homo sapien; identical to SEQ ID NO: 1319

SEQ ID NO: 1322 - DNA, 4604 bp, Homo sapien; identical to SEQ ID NO: 1318

SEQ ID NO: 1323 - protein, 427 aa, Homo sapien; identical to SEQ ID NO: 1319

SEQ ID NO: 1324 - DNA, 3045 bp, Homo sapien
actaagaccgcaaggcattcatttcctcctacggtggatgcggacgccgggaggaggagagccccagagagaggagctgggagcggaggcgcaggcaatgctcagccctggatgtagctgagaggctgggagaagagacgaccgctggagaccgagcggcgtggggaagacctaggggggtgggtgggggaagcagacaggagaacactcgaaatcaagcgctttacagattattttattttgtatagagaacacgtagcgactccgaagatcagccccaatgaacatgtcagtgttgactttacaagaatatgaattcgaaaagcagttcaacgagaatgaagccatccaatggatgcaggaaaactggaagaaatctttcctgttttctgctctgtatgctgcctttatattcggtggtcggcacctaatgaataaacgagcaaagtttgaactgaggaagccattagtgctctggtctctgacccttgcagtcttcagtatattcggtgctcttcgaactggtgcttatatggtgtacattttgatgaccaaaggcctgaagcagtcagtttgtgaccagggtttttacaatggacctgtcagcaaattctgggcttatgcatttgtgctaagcaaagcacccgaactaggagatacaatattcattattctgaggaagcagaagctgatcttcctgcactggtatcaccacatcactgtgctcctgtactcttggtactcctacaaagacatggttgccgggggaggttggttcatgactatgaactatggcgtgcacgccgtgatgtactcttactatgccttgcgggcggcaggtttccgagtctcccggaagtttgccatgttcatcaccttgtcccagatcactcagatgctgatgggctgtgtggttaactacctggtcttctgctggatgcagcatgaccagtgtcactctcactttcagaacatcttctggtcctcactcatgtacctcagctaccttgtgctcttctgccatttcttctttgaggcctacatcggcaaaatgaggaaaacaacgaaagctgaatagtgttggaactgaggaggaagccatagctcagggtcatcaagaaaaataatagacaaaagaaaatggcacaaggaatcacacgtggtgcagctaaaacaaaacaaaacatgagcaaacacaaaacccaaggcagcttagggataattaggttgatttaacccagtaagtttatgatccttttagggtgaggactcactgagtgcacctccatctccaagcactgctgctggaagaccccattccctctttatctatcaactctaggacaagggagaacaaaagcaagccagaagcagaggagactaatcaaaggcaaacaaaggctattaacacataggaaaatatgtatttactaagtgtcacatttctctaagatgaaagatttttactctagaaactgtgcgagcacaacacacacaatcctttctaactttatggacactaaactggagccaatagaaaagacaaaaatgaaagagacacagggtgtatatctagaacgataatgcttttgcagaaactaaagcctttttaagaaatgccagctgctgtagaccccatgagaaaagatgtcttaatcatccttatgaaaacagatgtaaacaactatatttcaactaacttcatcttcactgcatagcctcaggctagtgagtttgccaaaaccaaagggggtgaatacttccccaagattcttcctgggaggatggaaacagtgcagcccaggtcccatgggggcagctccatcccagagcatttctgatagttgaactgtaatttctactcttaagtgagatatgaagtattatccttttgttcagttgccccgggcttttgaacagaagagtaaatacagaattgaaaaagataaacactcaaccaaacaatgtgaaaacgggttctgtagtatttgtaaaaaggcccggcccaggaccactgtgagctggaaaagggagaaaggcagtgggaaaagaggtgagccgaagatcaattcgacagacagacggtgtgtatgcccctccctgtttgacttcacacacactcataactttccaaatgaaaccccacagtatagcgcatattttcgatatttttgtgaattccaaaaggaaatcacagggctgttcgaaatattgggggaacactgtgtttctgcatcatctgcatttgctccccaagcaatgtagaggtgtttaaagggccctctgctggctgagtggcaatactacaacaaacttcaaggcaagtttggctgaaaacagttgacaacaaagggcccccatacacttatccctcaaattttaagtgatatgaaatacttgtcatgtctttggccaaatcagaagatattcatcctgcttcaagtcagcttcagaaatgttttaaaagggactttagctctggaactcaaaatcaatttattaagagccatattctttaaaaaaaaaagctggataatattatctgtaatatttcagtcctttacaagccaaatacatgtgtcaatgtttctagtatttcaaagaagcaattatgtaaagttgttcaatgtgacataatagtattataattggttaagtagcttaatgattaggcaaactagatgaaaagattaggggcttccacactgcatagatcacacgcacatagccacgcatacacacacagacacacagatgtggggtacactgaatttcaaagcccaaatgaatagaaacacattttctggctagcagaaaaaaacaaaacaaaactgttgtttctctttcttgctttgagagtgtacagtaaaagggattttttcgaattatttttatattattttagctttaattgtgctgtcgttcatgaaacagagctgctctgcttttctgtcagagatggcaagggctttttcagcatctcgtttatgtgtggaatttaaaaagaataaagttttattccattctgaaaaaaaaaaaaaaaaa

SEQ ID NO: 1325 - protein, 265 aa, Homo sapien
MNMSVLTLQEYEFEKQFNENEAIQWMQENWKKSFLFSALYAAFIFGGRHLMNKRAKFELRKPLVLWSLTLAVFSIFGALRTGAYMVYILMTKGLKQSVCDQGFYNGPVSKFWAYAFVLSKAPELGDTIFIILRKQKLIFLHWYHHITVLLYSWYSYKDMVAGGGWFMTMNYGVHAVMYSYYALRAAGFRVSRKFAMFITLSQITQMLMGCVVNYLVFCWMQHDQCHSHFQNIFWSSLMYLSYLVLFCHFFFEAYIGKMRKTTKAE

SEQ ID NO: 1326 - DNA, 1472 bp, Homo sapien
ccggagcggggatcaccttaacttgactgtggtcccccagccctccaagaaatgcccataaaccaaggaggagagggtaaaaaatagaagaatacatggaattggggagaagaatgggaaaaaagatgggagtgactgcataatgtcagcattttgtgcttttggctcagcatttggattggatggaggattttcatcctgaaaccagccctccgtcgccaccgaccatggaataattgtcttccacgaaactcttccctggtgccaaaaagggttttatgtatatatttgagagctccacatccctggatctgaatcctccacttcccactggaaccatgcccctcccagtcccgtttctcccctctaggggatggaggctgagagaccccaggaagaagaggatggtgagcagggcccccctcaggatgaggaaggctggccccctccaaactccaccactcggccttggcgatctgctcctccatcccctcctcctccagggacccgccacacagccctgggaccccgctcggcctccctgctctccctgcagactgaactccttctggacctggtggctgaagcccagtcccgccgcctggaggagcagagggccaccttctacaccccccaaaacccctcaagcctagcccctgccccactccgtcctctcgaggacagagaacagctttacagcactatcctcagtcaccagtgccagcggatggaagcccagcggtcagagcctcccctccctccaggggggcaagagctcctggagttgctgctgagagttcagggtgggggtcgaatggaggagcaaaggtcccggccccccacacacacctgctgagacttgagccccaaccagcccttccttgccactggtctcaaagctgggcagcccattgcatgccctcaactcttgcttggcaggggtaccagagactgaaagacacggcacaaatctcaatattcatctcccacatcaccttccctgggaactggacagggtgaaagtcctcaaactctgggaacaggcgagatggaacagggatttaactccccgcccacaggtccatgggagcttgaggcagtaagggggatcccaggcacccatctcaaggagtggctgggagtcttttccctaacttgtggggacaccaccagttgtcaagctactaggcagtagggtctgagggctcaggcctccacctgagaggttataacctgagagacagctctacccttcctcccagtaagaagggaaggtgggtgggcacctgagagattaagactattctcccagtcccactaccagcacccccgatccctgagactgaggggtttacgggctgtgaatggaccttcagccctgcccaccctccctccccactgctgctgagtctgtctgatgttttggttgtgtgaataaatataattcccctctggaaaaaaaaaaaaaaaaa

SEQ ID NO: 1327 - protein, 160 aa, Homo sapien
MEAERPQEEEDGEQGPPQDEEGWPPPNSTTRPWRSAPPSPPPPGTRHTALGPRSASLLSLQTELLLDLVAEAQSRRLEEQRATFYTPQNPSSLAPAPLRPLEDREQLYSTILSHQCQRMEAQRSEPPLPPGGQELLELLLRVQGGGRMEEQRSRPPTHTC

SEQ ID NO: 1328 - DNA, 2657 bp, Homo sapien; identical to SEQ ID NO: 47

SEQ ID NO: 1329 - protein, 502 aa, Homo sapien; identical to SEQ ID NO: 48

SEQ ID NO: 1330 - DNA, 2917 bp, Homo sapien
ggcacgagggcggcggccgcgatgagccttcagcctgccgggcaggggacgtgaacatggatgaccctaagaaggaagacattcttcttttggccgatgaaaaatttgacttcgatctttcattgtcttcttcgagtgcaaatgaagatgatgaagtcttcttcggaccctttggacataaagaaagatgtattgctgccagcttggaattaaataatccggttcccgaacagcctccgttgcccacatctgagagtccctttgcctggagccctctggccggggagaagttcgtggaggtgtacaaagaagctcacttactggctttacacattgagagcagcagccggaaccaggcagcccaagctgccaagcctgaagaccctcggagccagggcgtggaaagattcatacaggagtcaaaattaaaaataaacctctttgagaaagaaaaggaaatgaagaaaagccccacgtctcttaaaagggagacatactacctgtcagacagccccttgctggggccccctgtgggtgagcctcggctcttggcctcctccccggccctgcccagctctggtgcccaggcccgcctcacccgggcgccggggcctccgcactctgctcatgctttgcccagggaatcatgcactgctcatgctgcaagtcaggcagcgactcagaggaagcccgggaccaaattgctgctgcctcgagcggcctctgttagaggaagaagcatccctggggctgcggagaagcccaagaaagagattccagctagtccttccaggacaaaaatcccagctgagaaggaatcccaccgggatgttctccctgacaaacctgccccgggtgctgtcaatgtgccggccgccggaagccacttgggccagggcaagcgggcgatccctgttccaaacaagttggggctgaagaagaccctgttaaaagcacccggctctaccagcaatctcgcaaggaagtcctcctcggggcctgtttggagcggggcatccagtgcgtgcacatccccagcagtgggcaaagctaaatcaagtgaatttgcaagtattcctgcaaatagctcccggcctctgtcaaacatcagcaagtcaggcagaatgggacccgccatgctgcggccagctctgcctgcaggccctgtgggggcatcctcctggcaggccaagcgggtcgatgtttctgagctggcagcggagcagctcacggcacccccctcagcatcccccacccaaccccagactccggaaggtggcggccagtggctgaactccagttgcgcttggtcagaatcttctcaattgaataagactagaagtatcagacggcgagattcctgtctaaattccaagacaaaggttatgcctactcctacaaatcaatttaaaattcctaagttttctattggtgactccccggacagctcaacaccaaagctttcgcgggcacagcggccgcagtcgtgcacgtcagttggcagggtcactgtccacagcaccccggttagacgctcatctgggccagcaccacaaagcctgctgagcgcacggcgtgtgtcagccttgcccacacccgccagccggcgctgctctggccttccaccgatgacccccaaaacgatgcccagggccgtgggctctcccctgtgtgtgccagctcggagacgttcctctgagccccgcaagaactctgcaatgagaactgaaccaacaagggagagcaacagaaagacagattccaggctggtggatgtgtcccctgacaggggttctcctccttcccgtgtgcctcaggcacttaacttttctccagaggaaagcgattctactttctccaaaagtactgccacagaagtagctcgggaggaagccaagccgggtggagatgcagcccctagtgaggctcttcttgtagatatcaaactggaaccactcgcggtcactccagatgctgcaagccagcccctcattgaccttcctctcatcgacttctgcgataccccagaagcacacgtggctgtaggatctgaaagcaggcctctgatcgacctcatgacaaacactccagacatgaataaaaatgtggccaaaccttcaccggtggtgggacagctcatagacctgagctcccctctgatccagctgagccctgaggctgacaaggagaacgtggattccccactcctcaagttctaagccgaaccaaatcctttgccttgaaagaacagccctaaagtggttttcaaccctcagaaacaagctttaggctggtcgcagtggcttacacttgtaaccctagaacttgggaggctgaggtgggcggattacttgagcccaggagttcgggaccagcctgggaaatatagtgaaactcctgtccctacaaaaagtacaaaaattagccgggtgtggtagtgcatgcctgtagtcccagctacttgggaggctgaagtgggaggatggcctgagctcaaggagatgcaggctgcagtgggctgtgattgtgccactgcactccagcctgggcaccaatgtgagaacctgtcttggaaaaaaaaaaaaaaagaaacatgttttagtagaagttttatttgaaaaagaaaaataagcataaatatattcccagtgctggagagggtgggctgagggactggggccagcacggaccacccaaggcctctgcttcccgccgccaccctcctcgctgccattctctgggctggaatgtgaagcctcagtcactctaaatgaagaattttcttttgaatgttttgtatgtaaaatagcaagtggctatttttaaagttaagtttgtataaatagttagatattctagatttacattaaattgtaaaataaatggacttattgaagcataaaaaaaaaaaaaaaaa

SEQ ID NO: 1331 - protein, 720 aa, Homo sapien
MDDPKKEDILLLADEKFDFDLSLSSSSANEDDEVFFGPFGHKERCIAASLELNNPVPEQPPLPTSESPFAWSPLAGEKFVEVYKEAHLLALHIESSSRNQAAQAAKPEDPRSQGVERFIQESKLKINLFEKEKEMKKSPTSLKRETYYLSDSPLLGPPVGEPRLLASSPALPSSGAQARLTRAPGPPHSAHALPRESCTAHAASQAATQRKPGTKLLLPRAASVRGRSIPGAAEKPKKEIPASPSRTKIPAEKESHRDVLPDKPAPGAVNVPAAGSHLGQGKRAIPVPNKLGLKKTLLKAPGSTSNLARKSSSGPVWSGASSACTSPAVGKAKSSEFASIPANSSRPLSNISKSGRMGPAMLRPALPAGPVGASSWQAKRVDVSELAAEQLTAPPSASPTQPQTPEGGGQWLNSSCAWSESSQLNKTRSIRRRDSCLNSKTKVMPTPTNQFKIPKFSIGDSPDSSTPKLSRAQRPQSCTSVGRVTVHSTPVRRSSGPAPQSLLSARRVSALPTPASRRCSGLPPMTPKTMPRAVGSPLCVPARRRSSEPRKNSAMRTEPTRESNRKTDSRLVDVSPDRGSPPSRVPQALNFSPEESDSTFSKSTATEVAREEAKPGGDAAPSEALLVDIKLEPLAVTPDAASQPLIDLPLIDFCDTPEAHVAVGSESRPLIDLMTNTPDMNKNVAKPSPVVGQLIDLSSPLIQLSPEADKENVDSPLLKF

SEQ ID NO: 1332 - DNA, 257 bp, Homo sapien
accacgcttttcatctgtcccgctgcgtgttttcctcttgatcgggaactcctgcttctccttgcctcgaaatggaccccaactgctcctgctcgcctgttggctcctgtgcctgtgccggctcctgcaaatgcaaagagtgcaaatgcacctcctgcaagaagagctgctgctcctgctgccctgtcggctgtgccaagtgtgcccagggctgcatctgcaaagggacgtcagacaagtgcagctgctgtgcctga

SEQ ID NO: 1333 - protein, 61 aa, Homo sapien
MDPNCSCSPVGSCACAGSCKCKECKCTSCKKSCCSCCPVGCAKCAQGCICKGTSDKCSCCA

SEQ ID NO: 1334 - DNA, 1804 bp, Homo sapien
gctcctcacaggcgcgggttgcttcacccacaccgtcatgtactacggccactacagtaacgccacgctgaaccagccgtgtggcagccccctggatggcagccagtgcacacccagggtgggtggcctgccctacaacatgcccctggcctacctctccactgtgggcgtgagcttctttatcacctgcatcaccctggtgtacagcatggctcactctttcggggagagctaccgggtgggcagcacctctggcatccacgccatcaccgtcttctgctcctgggactacaaggtgacgcagaagcgggcctcccgcctccagcaggacaatattcgcacccggctgaaggagctgctggccgagtggcagctgcggcacagccccaggagcgtgtgcgggaggctgcggcaggcggctgtgctggggcttgtgtggctgctgtgtctggggaccgcgctgggctgcgccgtggccgtccacgtcttctcggagttcatgatccagagtccagaggctgctggccaggaggctgtgctgctggtcctgcccctggtggttggcctcctcaacctgggggccccctacctgtgccgtgtcctggccgccctggagccgcatgactccccggtactggaggtgtacgtggccatctgcaggaacctcatcctcaagctggccatcctggggacactgtgctaccactggctgggccgcagggtgggcgtcctgcagggccagtgctgggaggattttgtgggccaggagctgtaccggttcctggtgatggacttcgtcctcatgttgctggacacgctttttggggaactggtgtggaggattatctccgagaagaagctgaagaggaggcggaagccggagtttgacattgcccggaatgtcctggagctgatttatgggcagactctgacctggctgggggtgctcttctcgcccctcctccccgccgtgcagatcatcaagctgctgctcgtcttctatgtcaagaagaccagccttctggccaactgccaggcgccgcgccggccctggctggcctcacacatgagcaccgtcttcctcacgctgctctgcttccccgccttcctgggcgccgctgtcttcctctgctacgccgtctggcaggtgaagccctcgagcacctgcggccccttccggaccctggacaccatgtacgaggccggcagggtgtgggtgcgccacctggaggcggcaggccccagggtctcctggctgccctgggtgcaccggtacctgatggaaaacaccttctttgtcttcctggtgtcagccctgctgctggccgtgatctacctcaacatccaggtggtgcggggccagcgcaaggtcatctgcctgctcaaggagcagatcagcaatgagggtgaggacaaaatcttcttaatcaacaagcttcactccatctacgagaggaaggagagggaggagaggagcagggttgggacaaccgaggaggctgcggcaccccctgccctgctcacagatgaacaggatgcctagggggacggcgatgggcctcacgggcccgcccagcaccctgagaccacactgttgcctcccagtgaccctgctgggacaccaggacaaggaagacagtttcgcctctcgaaagccgcagctgcgcctaggctggagctggaagggtgggtgaatccggcttgggcatccccaatgaactctgccctgcctgggactctatttattctgattaaaggggttttgcaaaaaaaaaaaaaaaaaaaaaaaaaaaaaaaaaaaaaa

SEQ ID NO: 1335 - protein, 444 aa, Homo sapien
MAHSFGESYRVGSTSGIHAITVFCSWDYKVTQKRASRLQQDNIRTRLKELLAEWQLRHSPRSVCGRLRQAAVLGLVWLLCLGTALGCAVAVHVFSEFMIQSPEAAGQEAVLLVLPLVVGLLNLGAPYLCRVLAALEPHDSPVLEVYVAICRNLILKLAILGTLCYHWLGRRVGVLQGQCWEDFVGQELYRFLVMDFVLMLLDTLFGELVWRIISEKKLKRRRKPEFDIARNVLELIYGQTLTWLGVLFSPLLPAVQIIKLLLVFYVKKTSLLANCQAPRRPWLASHMSTVFLTLLCFPAFLGAAVFLCYAVWQVKPSSTCGPFRTLDTMYEAGRVWVRHLEAAGPRVSWLPWVHRYLMENTFFVFLVSALLLAVIYLNIQVVRGQRKVICLLKEQISNEGEDKIFLINKLHSIYERKEREERSRVGTTEEAAAPPALLTDEQDA

SEQ ID NO: 1336 - DNA, 3548 bp, Homo sapien
agagaagcgatcgcgagagaaaaaaatgcaacctcccaaaataaagagcaaagattgcattaggagcgaacagcgctgcagaaatagatggcagcttcgtgtcagtgagtttgcatcccccttcctgatccacgagctggagtgattagagccctggaagggaattgttactcccgtggagaagtccccttttcctggcagtcgtctgcactgtacacgctggatgcctctctccatccaccccactcactcgctcctctctcacctcctctctccctctcctgcattgatttttttttttcctttttagttgactgaaacaaaacaaaacaaaagggccactggatgtctgccttcttggggggtgagccagacagactgacaaacaaacagccccaactgtgttcgggggagggtttcgcctcccgttttgcccggcagcagcagcatggacgtgttggctagttatagtatattccaggagctacaacttgtccacgacaccggctacttctcagctttaccatccctggaggagacctggcagcagacatgccttgaattggaacgctacctacagacggagccccggaggatctcagagacctttggtgaggacttggactgtttcctccacgcttcccctcccccgtgcattgaggaaagcttccgtcgcttagaccccctgctgctccccgtggaagcggccatctgtgagaagagctcggcagtggacatcttgctctctcgggacaagttgctatctgagacctgcctcagcctccagccggccagctcttctctagacagctacacagccgtcaaccaggcccagctcaacgcagtgacctcattaacgcccccatcgtcccctgagctcagccgccatctggtcaaaacctcacaaactctctctgccgtggatggcacggtgacgttgaaactggtggccaagaaggctgctctcagctccgtaaaggtgggaggggtcgcaacagctgcagcagccgtgacggctgcgggggccgttaagagtggacagagcgacagtgaccaaggagggctaggggctgaagcatgtcccgaaaacaagaagagggttcaccgctgtcagtttaacgggtgccggaaagtttatacaaaaagctcccacttaaaggcccaccagaggactcacacaggtgagaagccttataagtgctcatgggagggatgtgagtggcgttttgcacgaagcgatgagctcacgaggcactacaggaaacacacaggtgcaaagcccttcaaatgcaaccactgcgacaggtgtttttccaggtctgaccatcttgccctccacatgaagagacatatctaaaaaaccgaaaggccagagttgccatggcatcggctagtgtctaaaggaaacgccatgaggcagggggctggacttcaggcggggacccattgcctcgcagaagaaagttctcacttataaacctctgtacacacacacacacacacacacacacatatacacacactcacagacccacacacatacacactgtcatgcactcaactatatttaaaatatatacgtctattctttatgccttgccctagccagatggaagaagatgaagaaggaaaccaggtgaactcagcaaggcagactggctgcttacttcagcactattggaattatttcccgctgttgccaatggaaatcaaagaaaatggatgtgacgtctgtgcaggtggacggcagtccgaggggcttatttcacttgcttctcagtgcaacttgataggagaatccagcatcttaaagttgcatatgtgtagcactaatgtttctttttaaatagttgggggaaaatgacctagaaaaccaaattgcagtttggtagccaaaattaactcttggtttatttgtcctttgtgtgtgaaaagtcctactattccgtgcgtcagacttcctcacagaactgttgactggttttggttcttagtactattgagatctttcgcgtcgatcccaacggccttagcggcggcagactggaataacaccttacacctttctggcctgcatttctgtagacttcactctcaagggaggagttttcttttcttacgttttgacttttgcacaccatatgcactagggattctggaaacttctagcatgactgcaaagtggccaagagaataaagtccttgatgataaatcacagtatatcccttgagcctcaccttattgccagtgctagattttttctttttaatctctccgtttttgctaacgaaaacttgaaaagcttatttggaagcttaaatgttttatcttttctccatggactaaacctctccaggactctctcggcacctggatgtccagctctcgaagcagccagtcagatgggacatcacagttctctcatcctccttgaggcatgatgacctcagctcatagtgatcaaccgttgtgctgtgtgtcattgctaccccataaccagttacagcatagatgtcgctagtctcagagggcagctgcgtatttaatttaactctggtttatgacctgacaaaaagccaaaaatatcactctttccaggagtggggaaaactgaggatgcctcccaagtctagtggcttcacaaaagatcatcctgtcttctctgtcatgcccactgagctcctattcccctacgtgttacaatacacaatttaaaacgccattgtgggagtgaagggttgacatttaaggaaaaggttgaggtgtttctctcatgggctgtctaaaaggagagacacgtttctttctttcctttttttttggctaggcccaccatgacttgtgacctagaacccccaggattaacagaggcctcacatttactctgcaagctgactccaaaggagtctacagtccttacttgtcatgccacactcacacatccagtagtggtctctatctacccgcattcctagctagctggcactggcctcaactccaaagactgcctttaggaccatcaaatggcctatgcaagcaagcggggtggttattaggacagattgtatattttgtatattctgggaccatcccttcaagacacgtctataaaacaaaaatggcgcttggtccacacacggttgctgctccctcctaccagctggctcccctcctgtcctcctttgactgtttgactcattgactgttaaaatgccaccccatacatatttgggatgcaaaactgaagtcaaaaggaaataatataagaaacacaaacacatatatgacagcaaccttcaagatctgggttttcagctttctgcaacctttgttttcactgaaatgttgaaactactcgtctgagggcaaaggaacctcctcacaaatgctatagctgccaattggacacttggggcatttcgaggtctggccctaagaatttactttctccttttccttttttctatttagaccaaaaaaaacaaaaacaaaaacaaaaaaaaaacaaaataatacaaaacgaaaaataaagatagaacacccgtta

SEQ ID NO: 1337 - protein, 302 aa, Homo sapien
MDVLASYSIFQELQLVHDTGYFSALPSLEETWQQTCLELERYLQTEPRRISETFGEDLDCFLHASPPPCIEESFRRLDPLLLPVEAAICEKSSAVDILLSRDKLLSETCLSLQPASSSLDSYTAVNQAQLNAVTSLTPPSSPELSRHLVKTSQTLSAVDGTVTLKLVAKKAALSSVKVGGVATAAAAVTAAGAVKSGQSDSDQGGLGAEACPENKKRVHRCQFNGCRKVYTKSSHLKAHQRTHTGEKPYKCSWEGCEWRFARSDELTRHYRKHTGAKPFKCNHCDRCFSRSDHLALHMKRHI

SEQ ID NO: 1338 - DNA, 1707 bp, Homo sapien
cggcgctgggctgaggggaggggttgtcttaaaagtctctccttccccctgtaggggcggccggcgagtcccagtgagagcggagggtgccagaggtagggggccgagaaacaaagttcccggggcttcctccggggccgcggtcggggctgcgcgtttgaccgcccccctcctcgcgaagcaatggcttccaaactcctgcgcgcggtcatcctcgggccgcccggctcgggcaagggcaccgtgtgccagaggatcgcccagaactttggtctccagcatctctccagcggccacttcttgcgggagaacatcaaggccagcaccgaagttggtgagatggcaaagcagtatatagagaaaagtcttttggttccagaccatgtgatcacacgcctaatgatgtccgagttggagaacaggcgtggacagcactggctccttgatggttttcctaggacattaggacaagccgaagccctggacaaaatctgtgaagtggatctagtgatcagtttgaatattccatttgaaacacttaaagatcgtctcagccgccgttggattcaccctcctagcggaagggtatataacctggacttcaatccacctcatgtacatggtattgatgacgtcactggtgaaccgttagtccagcaggaggatgataaacccgaagcagttgctgccaggctaagacagtacaaagacgtggcaaagccagtcattgaattatacaagagccgaggagtgctccaccaattttccggaacggagacgaacaaaatctggccctacgtttacacacttttctcaaacaagatcacacctattcagtccaaagaagcatattgaccctgcccaatggaagaaccaggaagatgtggtcattcattcaatagtgtgtgtagtattggtgctgtgtccaaattagaagctagctgaggtagcttgcagcatcttttctagttgaaatggtgaactgataggaaaacaaatgagtagaaagagttcatgaagaggccctcctctgcctttcaaaaggctggtcacctacacatgtttaaggtgtctctgcacatgtctcaagcccatcacaagaaagcaagtacagtgtggatttcaaatggtgtgtaacttcagctccagctggtttttgacagctgttgctgtggtaatatttttgacatgtgatggtgatagtctctggttctccccatccccacaaaggctgttgaaccacagcaccaggaagcctgagaatgaatcctgagggctctagcccaggctttgtcccaggctttctggtgtgtgccctcctggtaacagtgaaattgaagctacttactcatagtggttgtttctctggtcttgagtgactgtgtccacagttcatttttttccggtaggaataactccttttctacatccacgctccatagagtctctccttttcagacatcctgggatgaaagaatttggcttttttttttcttttttttttggacatctgttttcactcttaggcttttaaacaatagttattgcttttatccctctcagattctaataactgagagcgatggggctatattgaatctctgtatgcactgagaactgagctatgaagagaatcttattaaactgctggtctgactttatggattgacactgttcctttcttttattgtgaaaaaaaaaaaaaaa

SEQ ID NO: 1339 - protein, 223 aa, Homo sapien
MASKLLRAVILGPPGSGKGTVCQRIAQNFGLQHLSSGHFLRENIKASTEVGEMAKQYIEKSLLVPDHVITRLMMSELENRRGQHWLLDGFPRTLGQAEALDKICEVDLVISLNIPFETLKDRLSRRWIHPPSGRVYNLDFNPPHVHGIDDVTGEPLVQQEDDKPEAVAARLRQYKDVAKPVIELYKSRGVLHQFSGTETNKIWPYVYTLFSNKITPIQSKEAY

SEQ ID NO: 1340 - DNA, 1235 bp, Homo sapien
ggctgcagaggggaaggcggctaccagtgtaaagccagagctgaggttcttgatagtccacaatgggtgaaccacagcaagtgagtgcacttccaccacctccaatgcaatatatcaaggaatatacggatgaaaatattcaagaaggcttagctcccaagcctccccctccaataaaagacagttacatgatgtttggcaatcagttccaatgtgatgatcttatcatccgccctttggaaagtcagggcatcgaacggcttcatcctatgcagtttgatcacaagaaagaactgagaaaacttaatatgtctatccttattaatttcttggaccttttagatattttaataaggagccctgggagtataaaacgagaagagaaactagaagatcttaagctgctttttgtacacgtgcatcatcttataaatgaataccgaccccaccaagcaagagagaccttgagagtcatgatggaggtccagaaacgtcaacggcttgaaacagctgagagatttcaaaagcacctggaacgagtaattgaaatgattcagaattgcttggcttctttgcctgatgatttgcctcattcagaagcaggaatgagagtaaaaactgaaccaatggatgctgatgatagcaacaattgtactggacagaatgaacatcaaagagaaaattcaggtcataggagagatcagattatagagaaagatgctgccttgtgtgtcctaattgatgagatgaatgaaagaccatgaaagatgtttctttttctttttttccttttgataatagcatcatatattagttcattttcttttggacagtcttaagagaagtttcactaaaaatgtaaacagctttaatcttgactccaaatttttcaattatgagatgtcataggcagtaatttcgctgtataacaagcatagacaaatgagtgtccctgcactaagaagaatcactttaaaaagcaaagtgttagctgctgttgtatgggacattcctatgttttagagttgcagtaaaactttgatgataacctcaataatagcaaagtggggtatgggctgggtacggtggctcacacttataatcctagtgctttgggaggttgatgtgagaggatcacttgagctcaggaatttgagaccaatgggggcaacatagtgagaccttctctctcttacaatttaattaaaaaaaaaaaaaaaaaaaaaaaaaaaaaa

SEQ ID NO: 1341 - protein, 233 aa, Homo sapien
MGEPQQVSALPPPPMQYIKEYTDENIQEGLAPKPPPPIKDSYMMFGNQFQCDDLIIRPLESQGIERLHPMQFDHKKELRKLNMSILINFLDLLDILIRSPGSIKREEKLEDLKLLFVHVHHLINEYRPHQARETLRVMMEVQKRQRLETAERFQKHLERVIEMIQNCLASLPDDLPHSEAGMRVKTEPMDADDSNNCTGQNEHQRENSGHRRDQIIEKDAALCVLIDEMNERP

SEQ ID NO: 1342 - DNA, 5984 bp, Homo sapien
cgcgctgtgtgtgtgtgtgagtggagagtgagtgcgggacctgaggctgtgtgtgtgtgaactgtggccactggcggggtcgggggggggcagcggcggagccgcctcggacgataaggaaattgagatttggagaagttaaataaccaagacttcacaggcaaagccatgactacagtagtggtacatgtggactccaaagctgagctcactaccctgctggagcagtgggaaaaggaacatggcagtgggcaggacatggtacctatccttaccaggatgtctcaattgattgaaaaagaaactgaagagtatcgtaaaggggatccagacccatttgatgatcgacatcctggtcgagctgatccagagtgtatgctgggccacttgctgagaatactcttcaagaatgatgatttcatgaatgcactggtgaatgcatatgtgatgacaagccgagagccccctttaaacactgcagcttgcagactcctattagacatcatgccagggctggaaactgctgtcgtctttcaagaaaaggagggaattgtcgagaatcttttcaaatgggcccgagaggccgatcaaccattgaggacatattctactggactgttaggaggtgctatggaaaatcaagacattgctgccaactatagagatgaaaattcacagctggtggcaatagtgcttcgaagactgagggagctacagctacaggaagtggctttgcggcaggaaaacaagcgtcccagtccacggaagctctcttctgaaccccttttgcctctggatgaggaggctgtggatatggactatggtgacatggctgtagatgtagtggatggagaccaagaggaagcttctggagacatggagatctcctttcatcttgattcaggccacaagactagtagcagagtgaactcaacaaccaaacctgaggatggaggattaaagaaaaacaagtcagcaaaacagggtgacagagagaactttaggaaagccaagcaaaagttgggtttctcatcttctgatccagatcgcatgtttgttgagctgtctaatagcagttggtcagaaatgtctccctgggtgattggcaccaattataccctttatcctatgactcctgctatcgagcagcgactcattctccaatatttgacccctctaggagaatatcaggagctacttcccatattcatgcaacttggatcacgggagctgatgatgttctatattgacctgaagcaaactaatgatgtcctgcttacatttgaggcactaaagcacctagcatctctcctgctccataacaaatttgccacagaatttgttgcgcatggtggagtacagaaattactggaaatacctcgtccttctatggctgcaaccggtgtgtctatgtgtttgtattacctatcctacaatcaggatgccatggaaagagtttgcatgcatccccacaatgttctgtctgatgtggtgaactataccctgtggttaatggagtgttctcatgcttcaggatgctgccatgctaccatgtttttttcaatttgcttctcatttcgggccgtcttggagctctttgaccgctatgatggtcttcgtcgtctggtgaacttgatcagtactttggagattctaaatttggaagatcagggtgcacttctgagtgatgatgaaatatttgctagccgccaaactgggaaacatacctgcatggccttgcgcaaatactttgaggctcacctggccattaaattggaacaagtgaagcagtcacttcagaggactgagggtggcattcttgtccacccacaacccccgtacaaggcatgctcatatactcatgaacagattgtggaaatgatggaatttttgatagaatatggcccagcgcagctatattgggaaccagctgaagttttcctcaaactttcttgtgtgcaactcttgttgcagcttatttctattgcctgcaattggaagacctattatgcaaggaatgacactgtgcgctttgctttggatgtcctggctattcttactgtggtgccaaaaatccagctccagttggcagaatcagtggacgtgttggatgaggctggatctacagtctctactgtaggtatcagcattattttgggagtggctgagggtgagttcttcatccatgatgctgaaattcagaagtcagcacttcagattatcatcaattgtgtgtgtggcccagataaccgaatatccagtattggtaaatttatctctggtactcctcggagaaagctgcctcagaaccctaaaagcagtgagcacaccctggccaagatgtggaatgtggttcagtccaacaacggcatcaaggtgctcctgtccttactgtccattaagatgcccatcacagatgcagaccaaatccgggccctggcctgcaaagccctagtgggcctgtctcgcagtagcactgtccggcagatcatcagtaaactgccccttttcagcagctgccagatccagcagctgatgaaggagcctgtgctgcaggacaagcgcagtgaccatgtcaagttctgcaagtatgctgctgaactcattgaacgggtgtcaggaaaaccacttctcattggcactgatgtttccctagcacgactgcagaaagcagatgttgttgcccagtcaaggatctccttccctgagaaagagctgcttttgttgatacgaaaccatcttatttctaaagggcttggagaaacagcaaccgtgctgacaaaagaggctgacctgcccatgactgctgcctcccattcttctgcctttaccccagtcactgctgctgcttctcctgtctctctaccccgaacccctcgtatcgctaatggcattgcaactcgtctgggcagccatgctgctgtgggtgcctctgcgccttctgcccctactgctcatcctcagccacggcccccccagggtccgctagctctgcccggcccatcttatgcaggcaactcccctttgattggtagaatcagttttatcagagagaggccatcaccctgcaatggcaggaaaatcagagtgttgcggcagaagtcggaccatggtgcctacagccaaagcccagccataaaaaaacagctggacagacatcttccttccccacctacgctggacagtataatcacagagtatcttagagaacaacatgctcgctgcaagaatccagttgccacctgcccacctttctccctctttactcctcaccaatgtcctgagccaaaacagaggcggcaagcgccaataaactttacgtcaaggctaaaccgcagggcatcatttccaaagtatggaggggtggatggcggatgctttgataggcaccttatctttagcagattccgtcctatttcagtgttccgggaagccaatgaagatgagagtggcttcacctgctgtgcattctcagcacgggagcggttcctgatgcttggcacctgcacagggcagctgaagctctataatgtgtttagtggacaggaggaggccagctataactgtcacaactcagccatcacacatcttgaaccttccagggatgggtccttgctgctgacatctgctacttggagccagcctttgtctgcactttggggaatgaagtcagtatttgatatgaagcattccttcacagaagatcactatgttgagttcagtaagcactcccaggatcgggtcatcggcacaaaaggagacattgcccacatttatgatattcagactggcaacaagctgttgactctgtttaacccagatcttgccaacaactacaagaggaactgtgccacctttaatcctacagatgatcttgtcttaaatgatggcgtcctctgggatgtccgctctgcacaggccatccacaagtttgacaagttcaatatgaacatcagtggtgttttccatccaaatggactggaggtgatcattaatactgagatttgggaccttcgaacttttcatcttttgcatactgttcccgctctggatcagtgtcgcgtggtgttcaatcacacgggaacagtgatgtatggagctatgttgcaggcagatgatgaagatgacttaatggaagagaggatgaaaagcccctttgggtcatccttccgaacatttaatgcaactgactacaaacctatagcaaccattgatgtgaaacggaacatctttgacctgtgtacagacaccaaagactgctatcttgctgtcattgagaatcaaggcagcatggatgccctgaacatggacacagtatgcaggctgtatgaagtgggcaggcagcgtctggcagaggatgaggatgaagaggaggaccaggaagaggaagaacaggaggaagaagatgatgatgaagatgatgatgacaccgatgatttagatgagcttgacactgaccagttgctggaggcggagttggaggaggacgacaataatgagaacgcaggggaagatggggacaatgacttctctccctctgatgaggagctagcaaaccttctagaggagggagaggacggggaggatgaagactctgatgcagatgaggaggtggaactgatcctgggggacactgacagctctgacaactctgatttggaagatgacatcatcttatctctgaatgagtgaggagccatcactgcttggaagagattcttggcagagagaagaggggacaaatttggttgtgaagtaaacaagaaacacaagacggctaaaactctccaggggcaggtaaagccctgctgggctcagaagcactatagaatttgctgtacacactgaagtgggtctgtgtcacacaggtatttcttggtcctctggagagcagaggactcactcagctctttgcttcatgcctcgctttaatggtagtaaacacttaaccagtggaatagtctgactgctggtactgatggcatcagaagaaaacaggttaacaatcaagtagtgaaagcactatattctagtcattaactcaacggagccagtctcaactctgctgggagcacccacaggtctctgtgggggagacagggactataacagggaggcagaattcaggttggcttgacaacacaccttaggaacatgtgctaaggggctaaggaggcatcagctgtcttccttattctaccagggctgaaaatcggagtcacttaggaggcagcatgagaacagtggcacaccaccagtgaggcacatgttgcctttttgtctttaagcaacaccttagacagggcctgaaccctgggtgggggcactggatgcctgaagtaagtaagttttctcagtggggcagtctcataaaatcaccaggacattgaccacctgacctcccctaactagtgctggccaaggcctgagagttcacagaacctgctaggtcttaagagccaaaggaaggaagtggttgagggccaggaaagagaaggaatgtcatgccagggtgttactcctcaccaaaacttggcagttctttttggggccatgggacacctttctctgaagaggggttggataaggcaaaggttgaagtgtcttctctaggcacgttttctagcatgtttccttttacttggttctgtctcacaaagctgggaggtagatgattcttccgggtcctgagcacctgcttcatgaaggaagataggtagcccagagaagaagttttggacttaacaacataccaaggcagctctggcctgtgactcaggcgtttgttggagagctgcaggaaaaccactgcagtgtgcctgcaacaggacaagacccactcctgtttctggcggtaccagctaccctggaatggtggcgtgtcctgctgtacccaactgacttgcttaggtacctggcagctgtgaccacagctcaagtaaaaaaacaaaaacaggcaaataaataaacatgcttaacatgtc

SEQ ID NO: 1343 - protein, 1507 aa, Homo sapien
MTTVVVHVDSKAELTTLLEQWEKEHGSGQDMVPILTRMSQLIEKETEEYRKGDPDPFDDRHPGRADPECMLGHLLRILFKNDDFMNALVNAYVMTSREPPLNTAACRLLLDIMPGLETAVVFQEKEGIVENLFKWAREADQPLRTYSTGLLGGAMENQDIAANYRDENSQLVAIVLRRLRELQLQEVALRQENKRPSPRKLSSEPLLPLDEEAVDMDYGDMAVDVVDGDQEEASGDMEISFHLDSGHKTSSRVNSTTKPEDGGLKKNKSAKQGDRENFRKAKQKLGFSSSDPDRMFVELSNSSWSEMSPWVIGTNYTLYPMTPAIEQRLILQYLTPLGEYQELLPIFMQLGSRELMMFYIDLKQTNDVLLTFEALKHLASLLLHNKFATEFVAHGGVQKLLEIPRPSMAATGVSMCLYYLSYNQDAMERVCMHPHNVLSDVVNYTLWLMECSHASGCCHATMFFSICFSFRAVLELFDRYDGLRRLVNLISTLEILNLEDQGALLSDDEIFASRQTGKHTCMALRKYFEAHLAIKLEQVKQSLQRTEGGILVHPQPPYKACSYTHEQIVEMMEFLIEYGPAQLYWEPAEVFLKLSCVQLLLQLISIACNWKTYYARNDTVRFALDVLAILTVVPKIQLQLAESVDVLDEAGSTVSTVGISIILGVAEGEFFIHDAEIQKSALQIIINCVCGPDNRISSIGKFISGTPRRKLPQNPKSSEHTLAKMWNVVQSNNGIKVLLSLLSIKMPITDADQIRALACKALVGLSRSSTVRQIISKLPLFSSCQIQQLMKEPVLQDKRSDHVKFCKYAAELIERVSGKPLLIGTDVSLARLQKADVVAQSRISFPEKELLLLIRNHLISKGLGETATVLTKEADLPMTAASHSSAFTPVTAAASPVSLPRTPRIANGIATRLGSHAAVGASAPSAPTAHPQPRPPQGPLALPGPSYAGNSPLIGRISFIRERPSPCNGRKIRVLRQKSDHGAYSQSPAIKKQLDRHLPSPPTLDSIITEYLREQHARCKNPVATCPPFSLFTPHQCPEPKQRRQAPINFTSRLNRRASFPKYGGVDGGCFDRHLIFSRFRPISVFREANEDESGFTCCAFSARERFLMLGTCTGQLKLYNVFSGQEEASYNCHNSAITHLEPSRDGSLLLTSATWSQPLSALWGMKSVFDMKHSFTEDHYVEFSKHSQDRVIGTKGDIAHIYDIQTGNKLLTLFNPDLANNYKRNCATFNPTDDLVLNDGVLWDVRSAQAIHKFDKFNMNISGVFHPNGLEVIINTEIWDLRTFHLLHTVPALDQCRVVFNHTGTVMYGAMLQADDEDDLMEERMKSPFGSSFRTFNATDYKPIATIDVKRNIFDLCTDTKDCYLAVIENQGSMDALNMDTVCRLYEVGRQRLAEDEDEEEDQEEEEQEEEDDDEDDDDTDDLDELDTDQLLEAELEEDDNNENAGEDGDNDFSPSDEELANLLEEGEDGEDEDSDADEEVELILGDTDSSDNSDLEDDIILSLNE

SEQ ID NO: 1344 - DNA, 1501 bp, Homo sapien
ggagagagccgccgagccgagccgagccccagctccagcaagagcgcgggcgggtggcccaggcacgcagcggtgaggaccgcggccacagctcggcgccaaccaccgcgggcctcccagccagccccgcggcggggcagccgcaggagccctggctgtggtcggggggcagtgggccatgctgggggcagtggaaggccccaggtggaagcaggcggaggacattagagacatctacgacttccgagatgttctgggcacgggggccttctcggaggtgatcctggcagaagataagaggacgcagaagctggtggccatcaaatgcattgccaaggaggccctggagggcaaggaaggcagcatggagaatgagattgctgtcctgcacaagatcaagcaccccaacattgtagccctggatgacatctatgagagtgggggccacctctacctcatcatgcagctggtgtcgggtggggagctctttgaccgtattgtggaaaaaggcttctacacggagcgggacgccagccgcctcatcttccaggtgctggatgctgtgaaatacctgcatgacctgggcattgtacaccgggatctcaagccagagaatctgctgtactacagcctggatgaagactccaaaatcatgatctccgactttggcctctccaagatggaggacccgggcagtgtgctctccaccgcctgtggaactccgggatacgtggcccctgaagtcctggcccagaagccctacagcaaggctgtggattgctggtccataggtgtcatcgcctacatcttgctctgcggttaccctcccttctatgacgagaatgatgccaaactctttgaacagattttgaaggccgagtacgagtttgactctccttactgggacgacatctctgactctgccaaagatttcatccggcacttgatggagaaggacccagagaaaagattcacctgtgagcaggccttgcagcacccatggattgcaggagatacagctctagataagaatatccaccagtcggtgagtgagcagatcaagaagaactttgccaagagcaagtggaagcaagccttcaatgccacggctgtggtgcggcacatgaggaaactgcagctgggcaccagccaggaggggcaggggcagacggcgagccatggggagctgctgacaccagtggctggggggccggcagctggctgttgctgtcgagactgctgcgtggagccgggcacagaactgtcccccacactgccccaccagctctagggccctggacctcgggtcatgatcctctgcgtgggagggcttgggggcagcctgctccccttccctccctgaaccgggagtttctctgccctgtcccctcctcacctgcttccctaccactcctcactgcattttccatacaaatgtttctattttattgttccttcttgtaataaagggaagataaaaccaaaaaaaaaaaaaaaaaaa

SEQ ID NO: 1345 - protein, 370 aa, Homo sapien
MLGAVEGPRWKQAEDIRDIYDFRDVLGTGAFSEVILAEDKRTQKLVAIKCIAKEALEGKEGSMENEIAVLHKIKHPNIVALDDIYESGGHLYLIMQLVSGGELFDRIVEKGFYTERDASRLIFQVLDAVKYLHDLGIVHRDLKPENLLYYSLDEDSKIMISDFGLSKMEDPGSVLSTACGTPGYVAPEVLAQKPYSKAVDCWSIGVIAYILLCGYPPFYDENDAKLFEQILKAEYEFDSPYWDDISDSAKDFIRHLMEKDPEKRFTCEQALQHPWIAGDTALDKNIHQSVSEQIKKNFAKSKWKQAFNATAVVRHMRKLQLGTSQEGQGQTASHGELLTPVAGGPAAGCCCRDCCVEPGTELSPTLPHQL

SEQ ID NO: 1346 - DNA, 2238 bp, Homo sapien
gtccttcggtgtctgggtgtggtgagtagaggtgtgtgtcacaaagtacagaccattgtgtgtgacaaagcccatcgtgtgtctgtgtgtgtctttatccacgtggatggacgtctctttcttgctctgccccaagacacaccctagcccctccttattctcaaaagggggagctggggagcctccccctaccctggggcctcccctgcccctccccgccctgcctggccgtcaccactccccagagggcacagggctctgctgtgcctcagagcaaaagtcccagagccagcagagcaggctgacgacctgcaagccacagtggctgccctgtgcgtgctgcgaggtgggggaccctgggcaggaagctggctgagccccaagaccccgggggccatgggcggggatctggtgcttggcctgggggccttgagacgccgaaagcgcttgctggagcaggagaagtctctggccggctgggcactggtgctggcaggaactggcattggactcatggtgctgcatgcagagatgctgtggttcggggggtgctcgtgggcgctctacctgttcctggttaaatgcacgatcagcatttccaccttcttactcctctgcctcatcgtggcctttcatgccaaagaggtccagctgttcatgaccgacaacgggctgcgggactggcgcgtggcgctgaccgggcggcaggcggcgcagatcgtgctggagctggtggtgtgtgggctgcacccggcgcccgtgcggggcccgccgtgcgtgcaggatttaggggcgccgctgacctccccgcagccctggccgggattcctgggccaaggggaagcgctgctgtccctggccatgctgctgcgtctctacctggtgccccgcgccgtgctcctgcgcagcggcgtcctgctcaacgcttcctaccgcagcatcggcgctctcaatcaagtccgcttccgccactggttcgtggccaagctttacatgaacacgcaccctggccgcctgctgctcggcctcacgcttggcctctggctgaccaccgcctgggtgctgtccgtggccgagaggcaggctgttaatgccactgggcacctttcagacacactttggctgatccccatcacattcctgaccatcggctatggtgacgtggtgccgggcaccatgtggggcaagatcgtctgcctgtgcactggagtcatgggtgtctgctgcacagccctgctggtggccgtggtggcccggaagctggagtttaacaaggcagagaagcacgtgcacaacttcatgatggatatccagtataccaaagagatgaaggagtccgctgcccgagtgctacaagaagcctggatgttctacaaacatactcgcaggaaggagtctcatgctgcccgcaggcatcagcgcaagctgctggccgccatcaacgcgttccgccaggtgcggctgaaacaccggaagctccgggaacaagtgaactccatggtggacatctccaagatgcacatgatcctgtatgacctgcagcagaatctgagcagctcacaccgggccctggagaaacagattgacacgctggcggggaagctggatgccctgactgagctgcttagcactgccctggggccgaggcagcttccagaacccagccagcagtccaagtagctggacccacgaggaggaaccaggctactttccccagtactgaggtggtggacatcgtctctgccactcctgacccagccctgaacaaagcacctcaagtgcaaggaccaaagggggccctggcttggagtgggttggcttgctgatggctgctggaggggacgctggctaaagtgggtaggccttggcccacctgaggccccaggtgggaacatggtcacccccactctgcataccctcatcaaaaacactctcactatgctgctatggacgacctccagctctcagttacaagtgcaggcgactggaggcaggactcctgggtccctgggaaagagggtactaggggcccggatccaggattctgggaggcttcagttaccgctggccgagctgaagaactgggtatgaggctggggcggggctggaggtggcgccccctggtgggacaacaaagaggacaccatttttccagagctgcagagagcacctggtggggaggaagaagtgtaactcaccagcctctgctcttatctttgtaataaatgttaaagccag

SEQ ID NO: 1347 - protein, 427 aa, Homo sapien
MGGDLVLGLGALRRRKRLLEQEKSLAGWALVLAGTGIGLMVLHAEMLWFGGCSWALYLFLVKCTISISTFLLLCLIVAFHAKEVQLFMTDNGLRDWRVALTGRQAAQIVLELVVCGLHPAPVRGPPCVQDLGAPLTSPQPWPGFLGQGEALLSLAMLLRLYLVPRAVLLRSGVLLNASYRSIGALNQVRFRHWFVAKLYMNTHPGRLLLGLTLGLWLTTAWVLSVAERQAVNATGHLSDTLWLIPITFLTIGYGDVVPGTMWGKIVCLCTGVMGVCCTALLVAVVARKLEFNKAEKHVHNFMMDIQYTKEMKESAARVLQEAWMFYKHTRRKESHAARRHQRKLLAAINAFRQVRLKHRKLREQVNSMVDISKMHMILYDLQQNLSSSHRALEKQIDTLAGKLDALTELLSTALGPRQLPEPSQQSK

SEQ ID NO: 1348 - DNA, 4629 bp, Homo sapien
  Unsure 4178: Unknown base
  Unsure 4211: Unknown base
  Unsure 4223: Unknown base
  Unsure 4229: Unknown base
  Unsure 4255: Unknown base
  Unsure 4261: Unknown base
  Unsure 4293: Unknown base
  Unsure 4377: Unknown base
  Unsure 4380: Unknown base
  Unsure 4498: Unknown base
  Unsure 4526: Unknown base
ttagaagtaaggcagaggggacccagcgaaatggaagaagttaggtgtccagagcacgggactttctgctttcttaagaccggcgtccgcgatggcccgaataaaggaaagagcttctacgtgtgccgggcagacacgtgcagcttcgtgcgggccaccgacattcctgtttcccattgcttattgcatgaggactttgtggtagagcttcagggtttgcctctgccacaggacaagaaagaatacagattgttcttccgatgcattggaagtaaggcagaggggaaacgctggtgtggaagtattccatggcaggatcctgattccaaagaacattctgtatccaataagtctcagcatgcatctgagacatttcatcattcttccaactggctgagaaacccattcaaggtacttgacaagaatcaagaaccagctctctggaaacagctcatcaaaggtgaaggtgaggaaaagaaggctgataagaagcaaagagaaaagggagatcagcttttcgatcaaaagaaagaacagaagcctgaaatgatggagaaagacctctcatctggcctggtaccaaagaaaaaacaatctgtagttcaagagaagaagcaagaagagggagcagagattcagtgtgaggcagagactggaggcacacacaaaagagacttttctgaaattaaatctcaacagtgccaaggtaatgagcttacaagaccatctgcatcttctcaggagaaatcaagtggtaagagtcaagatgtccaaagagaatcagaacctctgagagaaaaggttacccagcttttgcctcaaaatgttcacagtcacaactcaataagcaagccccagaaagggggacccctcaacaaggagtacacgaactgggaggctaaagaaacaaaggcaaaggatggccctagcatacaggccacccagaaaagcctgcctcaggggcatttccaagagcggccggagacccacagtgtgcctgctcctggaggaccagcggctcaggctgcaccagcagcaccagggctttccctgggtgagggccgtgaagctgccacaagcagtgacgacgaggaggaagatgatgttgtttttgtttcctctaagcctgggagccccctactctttgactcgactctggacttagagacgaaggaaaacctccaattccctgatcgaagtgtgcaaagaaaggtgtctcctgcctcaggtgtttccaagaaggtagaaccctcagacccagtagcccggcgtgtctaccttacaacacaactgaaacaaaagaagagcacactggcatcagtgaacatccaggctcttccagacaagggtcagaagttgatcaaacaaatccaggagctggaggaagtactcagtggtcttaccctttccccagagcaaggaactaatgagaagagtaacagtcaagtaccacagcagagtcacttcaccaaaactaccactggccctccccacctggtgcctccccaaccccttcctcgtcgtggtacccaacctgtgggttctctagaactaaagtctgcctgccaggtgactgctggaggatccagtcagtgctatcgaggccatacaaaccaagatcacgttcatgcagtgtggaaaatcacaagtgaagccatcggtcaactgcatcgctcacttgagtcatgtcctggtgagacggttgtggcagaagatcccgccgggctgaaggtccctttgctactacaccagaagcaggcattggcttggttactatggcgagaaagtcagaagccacaaggaggaattctggcagatgatatgggcttaggaaaaaccctgacaatgattgcgctcatcctgacccagaagaatcaagagaaaaaggaagaaaaggagaaaagcacagctttgacgtggctctccaaagatgactcttgtgactttacttcccatggaacactaatcatctgtcctgcctccctgatccatcattggaaaaatgaggtggagaaacgggtgaacagcaacaaactaagagtctatctctaccatgggccaaaccgggattcacgtgccagagtcctctctacatatgacatcgtgatcactacctatagcctcgtggccaaggagattcccacaaacaagcaagaggcagagatcccaggtgcaaacctcaatgtggagggcacctcaacacctttgcttcgaatagcctgggctcgaatcatattggatgaagctcacaatgttaagaatccccgagtgcagacttccatagctgtgtgtaagctacaagcctgtgcccgttgggctgtcactggaacccccattcaaaacaacttattggatatgtattcgctgctgaagtttctccgttgctctccatttgatgagttcaatctgtggaggagtcaggttgacaatggctcaaagaaaggaggagaacggttaagtattttaaccaagagccttttgctgaggagaacaaaagaccagctggactctactggcagacctttggtgatactgccccagcgtaaatttcagttgcaccatttaaagctttctgaagatgaagagactgtttacaatgtgttttttgcaagatcaaggtcagctctgcaatcctatctaaaaagacatgaaagtagaggcaaccaatctggaagaagccctaataatccattcagtagagtggcactggagtttgggtctgaggagcctagacactcggaggcagcagactcaccgagatccagcaccgtccacatactgtcccagttgctgagactccgccagtgttgctgtcatctttctttactgaagtcggccctggatccaatggaactgaagggtgaaggtcttgtcctttccctagaagaacagctcagtgctttgaccttgtcagaactccgtgactcagagccatcttccactgtttcccttaacggcaccttcttcaagatggagctttttgaaggcatgcgagagagcaccaagatttcatctctgttggcagaattggaggcaattcaaagaaattcagcatcccaaaagagtgtcattgtctctcagtggaccaacatgctgaaagttgtagcattgcacctgaagaagcatggactgacttatgccaccatcgatggctctgtcaatcccaagcagagaatggacttggtagaggcatttaaccactccagaggccctcaggtaatgctaatctctctcttggctggaggtgttggtctaaacctgactggaggaaatcacctctttcttttggacatgcactggaatccatcacttgaagatcaagcttgtgaccgaatttaccgagtagggcagcagaaagatgttgtcatacacagatttgtttgtgagggaacagtagaagaaaagatcttacagctccaagaaaaaaagaaagatttggccaaacaagttctatcagggtctggagaatctgtcaccaagctcaccttggctcacctcagagtcctttttggcatctaacctcctgtggataagggctcagaatagcaccattgctggtttgtattaggatctgggaataacaacctaaccatgagccttgaactctgttctttgcatttcaatttcaccgtcaagcctttcaccttcctcaaaatgaggcataatcttatccccagaattgaggaggggttgtgttaaccaattagttaaccaattatgttaataatttatttaatgagtggtatggaaaccaattgatttttttagataaaagaatatgttttagagttggatgattttggaaaacaactctggcagaattgtatataagcttcagtaaagttcaaaaagcgggccaggtgtggtggctcatgcctgtaatcccgacactttgggaggccaaggcaggaggatggcttgaagccagtagttcaagaccagcctgggcaacatagtaagaccccatctctatgaagaataaaaaaatgagctaggcgtggtagtgcacacctgtagtcctagctacttgggaggctgaggcaggaggatcccttgagtccaggaggttgaggctgcagtgagctgtgattgtgccactgttttccagcctgggcaatacagtgagaccctgtctcaaaaaaaggaaaaaaaagctcaaaaattctgtgttgcctttntttttttagctgatgatgggagaaccagttaanaccttttttaanacaggntccatcctattttttcattttttctngccagngatgttgcacctgtaaccatttttttatgggnggagcagagagtcaatccctgcagccaccctgcagccagccatttttgcagttttttcagtgcaggcagtttttcctttcaggntgnagatcaaggagatgctttgtagatgaacagatgcagagtatctgttatcattgtattgtttagtgtcagtgtatcatttagtatttgtatcactgtaccatttagtgttgtatatcantcagtcatttaatattggttatcaccanacagtttaatatttgtatcatttggttcattgtatcgtttagtatttgtattataagatttctatttgtagtatttgtataaaaaaaaaaaaaaaaaaaaaaa

SEQ ID NO: 1349 - protein, 1162 aa, Homo sapien
MEEVRCPEHGTFCFLKTGVRDGPNKGKSFYVCRADTCSFVRATDIPVSHCLLHEDFVVELQGLPLPQDKKEYRLFFRCIGSKAEGKRWCGSIPWQDPDSKEHSVSNKSQHASETFHHSSNWLRNPFKVLDKNQEPALWKQLIKGEGEEKKADKKQREKGDQLFDQKKEQKPEMMEKDLSSGLVPKKKQSVVQEKKQEEGAEIQCEAETGGTHKRDFSEIKSQQCQGNELTRPSASSQEKSSGKSQDVQRESEPLREKVTQLLPQNVHSHNSISKPQKGGPLNKEYTNWEAKETKAKDGPSIQATQKSLPQGHFQERPETHSVPAPGGPAAQAAPAAPGLSLGEGREAATSSDDEEEDDVVFVSSKPGSPLLFDSTLDLETKENLQFPDRSVQRKVSPASGVSKKVEPSDPVARRVYLTTQLKQKKSTLASVNIQALPDKGQKLIKQIQELEEVLSGLTLSPEQGTNEKSNSQVPQQSHFTKTTTGPPHLVPPQPLPRRGTQPVGSLELKSACQVTAGGSSQCYRGHTNQDHVHAVWKITSEAIGQLHRSLESCPGETVVAEDPAGLKVPLLLHQKQALAWLLWRESQKPQGGILADDMGLGKTLTMIALILTQKNQEKKEEKEKSTALTWLSKDDSCDFTSHGTLIICPASLIHHWKNEVEKRVNSNKLRVYLYHGPNRDSRARVLSTYDIVITTYSLVAKEIPTNKQEAEIPGANLNVEGTSTPLLRIAWARIILDEAHNVKNPRVQTSIAVCKLQACARWAVTGTPIQNNLLDMYSLLKFLRCSPFDEFNLWRSQVDNGSKKGGERLSILTKSLLLRRTKDQLDSTGRPLVILPQRKFQLHHLKLSEDEETVYNVFFARSRSALQSYLKRHESRGNQSGRSPNNPFSRVALEFGSEEPRHSEAADSPRSSTVHILSQLLRLRQCCCHLSLLKSALDPMELKGEGLVLSLEEQLSALTLSELRDSEPSSTVSLNGTFFKMELFEGMRESTKISSLLAELEAIQRNSASQKSVIVSQWTNMLKVVALHLKKHGLTYATIDGSVNPKQRMDLVEAFNHSRGPQVMLISLLAGGVGLNLTGGNHLFLLDMHWNPSLEDQACDRIYRVGQQKDVVIHRFVCEGTVEEKILQLQEKKKDLAKQVLSGSGESVTKLTLAHLRVLFGI

SEQ ID NO: 1350 - DNA, 841 bp, Homo sapien
gaaccgtttactcgctgctgtgcccatctatcagcaggctccgggctgaagattgcttctcttctctcctccaaggtctagtgacggagcccgcgcgcggcgccaccatgcggcagaaggcggtatcgcttttcttgtgctacctgctgctcttcacttgcagtggggtggaggcaggtgagaatgcgggtaaggatgcaggtaagaaaaagtgctcggagagctcggacagcggctccgggttctggaaggccctgaccttcatggccgtcggaggaggactcgcagtcgccgggctgcccgcgctgggcttcaccggcgccggcatcgcggccaactcggtggctgcctcgctgatgagctggtctgcgatcctgaatgggggcggcgtgcccgccggggggctagtggccacgctgcagagcctcggggctggtggcagcagcgtcgtcataggtaatattggtgccctgatgggctacgccacccacaagtatctcgatagtgaggaggatgaggagtagccagcagctcccagaacctcttcttccttcttggcctaactcttccagttaggatctagaactttgcctttttttttttttttttttttttttgagatgggttctcactatattgtccaggctagagtgcagtggctattcacagatgcgaacatagtacactgcagcctccaactcctagcctcaagtgatcctcctgtctcaacctcccaagtaggattacaagcatgcgccgacgatgcccagaatccagaactttgtctatcactctccccaacaacctagatgtgaaaacagaataaacttcacccagaaaa

SEQ ID NO: 1351 - protein, 138 aa, Homo sapien
MRQKAVSLFLCYLLLFTCSGVEAGENAGKDAGKKKCSESSDSGSGFWKALTFMAVGGGLAVAGLPALGFTGAGIAANSVAASLMSWSAILNGGGVPAGGLVATLQSLGAGGSSVVIGNIGALMGYATHKYLDSEEDEE

SEQ ID NO: 1352 - DNA, 1166 bp, Homo sapien
ccccgccccgctgaggcctgtctgcagaatccacagcaaccagcaccatgcccatgacactggggtactggaacatccgcgggctggcccattccatccgcctgctcctggaatacacagactcaagctacgaggaaaagaagtacacgatgggggacgctcctgattatgacagaagccagtggctgaatgaaaaattcaagctgggcctggactttcccaatctgccctacttgattgatgggactcacaagatcacccagagcaacgccatcctgcggtacattgcccgcaagcacaacctgtgcggggaatcagaaaaggagcagattcgcgaagacattttggagaaccagtttatggacagccgtatgcagctggccaaactctgctatgacccagattttgagaaactgaaaccagaatacctgcaggcactccctgaaatgctgaagctctactcacagtttctggggaagcagccatggtttcttggggacaagatcacctttgtggatttcatcgcttatgatgtccttgagagaaaccaagtatttgagcccagctgcctggatgccttcccaaacctgaaggacttcatctcccgatttgagggcttggagaagatctctgcctacatgaagtccagccgcttcctcccaagacctgtgttcacaaagatggctgtctggggcaacaagtagggccttgaaggccaggaggtgggagtgaggagcccatactcagcctgctgcccaggctgtgcagcgcagctggactctgcatcccagcacctgcctcctcgttcctttctcctgtttattcccatctttactcccaagacttcattgtccctcttcactccccctaaacccctgtcccatgcaggccctttgaagcctcagctacccactatccttcgtgaacatcccctcccatcattacccttccctgcactaaagccagcctgaccttccttcctgttagtggttgtgtctgctttaaagggcctgcctggcccctcgcctgtggagctcagccccgagctgtccccgtgttgcatgaaggagcagcattgactggtttacaggccctgctcctgcagcatggtccctgccttaggcctacctgatggaagtaaagcctcaaccacaaaaaaaaaaaaa

SEQ ID NO: 1353 - protein, 218 aa, Homo sapien
MPMTLGYWNIRGLAHSIRLLLEYTDSSYEEKKYTMGDAPDYDRSQWLNEKFKLGLDFPNLPYLIDGTHKITQSNAILRYIARKHNLCGESEKEQIREDILENQFMDSRMQLAKLCYDPDFEKLKPEYLQALPEMLKLYSQFLGKQPWFLGDKITFVDFIAYDVLERNQVFEPSCLDAFPNLKDFISRFEGLEKISAYMKSSRFLPRPVFTKMAVWGNK

SEQ ID NO: 1354 - DNA, 3235 bp, Homo sapien
cgtgggagcagtggggttcgacggcgcggccgcgaggccgccatggccgctcacgggaagctgcggcgggagcgggggctgcaggctgagtatgagacgcaagtcaaagagatgcgctggcagctgagcgagcagctgcgctgcctggagctgcagggcgagctgcggcgggagttgctgcaggagctggcagagttcatgcggcgccgcgctgaggtggagctggaatactcccggggcctggaaaagctggccgagcgcttctccagccgtggaggccgcctggggagcagccgggagcaccaaagcttccggaaggagccgtccctcctgtcgcccttgcactgctgggcggtgctgctgcagcacacgcggcagcagagccgggagagcgcggccctgagtgaggtgctggccgggcccctggcccagcgcctgagtcacattgcagaggacgtggggcgcctggtcaagaagagcagggatctggagcagcagctgcaggatgagctcctggaggtggtctcagagctccagacggccaagaagacgtaccaggcatatcacatggagagcgtgaatgccgaggccaagctccgggaggccgagcggcaggaggagaagcgggcaggccggagtgtccccaccaccaccgctggtgccactgaggcagggcccctccgcaagagctccctcaagaagggagggaggctggtggagaagcggcaggccaagttcatggagcacaaactcaagtgcacaaaggcgcgcaacgagtacctgcttagcctggctagtgtcaacgctgctgtcagtaactactacctgcatgacgtcttggacctcatggactgctgtgacacagggttccacctggccctggggcaggtgctccggagctacacggccgctgagagccgcacccaagcctcccaagtgcagggcctgggcagcctggaagaagctgtggaggccctggatcctccaggggacaaagccaaggttctcgaggtgcatgctaccgtcttctgtcccccgctgcgctttgactaccacccccatgatggggatgaggtggctgagatctgcgttgaaatggagctgcgggacgagattctgcccagagcccagaacatccagagccgcctggaccgacagaccattgagacagaggaggtgaacaagactctgaaggcgacactgcaggccctgctggaggtggtggcctcggatgacggggatgtgcttgattccttccagaccagcccctccaccgagtccctcaagtccaccagctcagacccaggcagccggcaggcgggccggaggcgcggccagcagcaggagaccgaaaccttctacctcacgaagctccaggagtatctgagtggacggagcatcctcgccaagctgcaggccaagcacgagaagctgcaggaggcccttcagcgaggtgacaaggaggagcaggaggtgtcttggacccagtacacacagagaaaattccagaagagccgccagccccgccccagctcccagtataaccagagactctttgggggagacatggagaagtttatccagagctcaggccagcctgtgcccctggtggtggagagctgcattcgcttcatcaacctcaatggcctgcagcatgaaggcatcttccgggtatcgggtgcccagctccgggtctcagagatccgtgatgccttcgagagaggggaggacccactggtggagggctgcactgcccatgacctggactcggtggccggggtgctgaagctctacttccggagcctggagcccccactcttccccccagacctgttcggcgagctgctggcttcttcggagctggaggccacagcggagagggtggagcacgtgagccgcctgctgtggcggctgcccgcgccggtgctggtggttctgcgctacctcttcaccttcctcaaccacctggcccagtacagcgatgagaacatgatggacccctacaacctggccgtgtgcttcgggcccacgctgctaccggtgcccgctgggcaggacccggtggcgctgcagggccgggtgaaccagctggtgcagacgctcatagtgcagcccgatcgggtcttcccgcccctgacctcgctgcctggccccgtctacgagaagtgcatggcaccgccttccgccagctgcctgggggacgcccagctggagagcctgggggcggacaatgagccggagctggaagccgagatgcccgcacaggaggatgacctggagggggtcgtggaggctgtggcctgctttgcctacacgggccgcacagcccaggagctgagcttccggcggggggacgtactgcggctgcacgagagggcctcgagcgactggtggcggggggagcacaacggcatgcggggcctcatcccccacaagtatatcacgctgcccgccgggacggagaagcaggtggtgggcgcagggctgcagactgcaggggagtctgggagcagtcccgagggcctcctggcatcggagctggtccaccggccagagccatgcacctcacctgaggccatgggaccctctggacacagacgacgctgcttggtcccagcctccccagagcaacacgtggaggtggataaggctgtggcacagaacatggactctgtgtttaaggagctcttgggaaagacctctgtccgccagggccttgggccagcatctaccacctctcccagtcctgggccccgaagcccaaaggccccgcccagcagccgcctgggcaggaacaaaggcttctcccggggccctggggccccagcctcaccctcagcttcccacccccagggcctagacacgacccccaagccacactgaggtgccgctgctggagatgcgtgcccccggcggctacccgctggaccggccactctccccagcccccttgcttctctccagccctgtccagcaagtgcagggtgcctgcacttcaccctgtgcagagaggtgggatggggccgtgcacacagggatgcccgctccacatcctgcctgcccctcagccctggcccaggccccttttggaggcagctgaggaaggatgctggggaaagccctcttctgcagctttgtggaaggctgatcagtggctgctgggtggcgggtacccttgctcagatgcctggcagggctgggtggcgattcataaagacctcgtgttgattccccg

SEQ ID NO: 1355 - protein, 946 aa, Homo sapien
MAAHGKLRRERGLQAEYETQVKEMRWQLSEQLRCLELQGELRRELLQELAEFMRRRAEVELEYSRGLEKLAERFSSRGGRLGSSREHQSFRKEPSLLSPLHCWAVLLQHTRQQSRESAALSEVLAGPLAQRLSHIAEDVGRLVKKSRDLEQQLQDELLEVVSELQTAKKTYQAYHMESVNAEAKLREAERQEEKRAGRSVPTTTAGATEAGPLRKSSLKKGGRLVEKRQAKFMEHKLKCTKARNEYLLSLASVNAAVSNYYLHDVLDLMDCCDTGFHLALGQVLRSYTAAESRTQASQVQGLGSLEEAVEALDPPGDKAKVLEVHATVFCPPLRFDYHPHDGDEVAEICVEMELRDEILPRAQNIQSRLDRQTIETEEVNKTLKATLQALLEVVASDDGDVLDSFQTSPSTESLKSTSSDPGSRQAGRRRGQQQETETFYLTKLQEYLSGRSILAKLQAKHEKLQEALQRGDKEEQEVSWTQYTQRKFQKSRQPRPSSQYNQRLFGGDMEKFIQSSGQPVPLVVESCIRFINLNGLQHEGIFRVSGAQLRVSEIRDAFERGEDPLVEGCTAHDLDSVAGVLKLYFRSLEPPLFPPDLFGELLASSELEATAERVEHVSRLLWRLPAPVLVVLRYLFTFLNHLAQYSDENMMDPYNLAVCFGPTLLPVPAGQDPVALQGRVNQLVQTLIVQPDRVFPPLTSLPGPVYEKCMAPPSASCLGDAQLESLGADNEPELEAEMPAQEDDLEGVVEAVACFAYTGRTAQELSFRRGDVLRLHERASSDWWRGEHNGMRGLIPHKYITLPAGTEKQVVGAGLQTAGESGSSPEGLLASELVHRPEPCTSPEAMGPSGHRRRCLVPASPEQHVEVDKAVAQNMDSVFKELLGKTSVRQGLGPASTTSPSPGPRSPKAPPSSRLGRNKGFSRGPGAPASPSASHPQGLDTTPKPH

SEQ ID NO: 1356 - DNA, 2058 bp, Homo sapien
gcacgaggaagccacagatctcttaagaactttctgtctccaaaccgtggctgctcgataaatcagacagaacagttaatcctcaatttaagcctgatctaacccctagaaacagatatagaacaatggaagtgacaacaagattgacatggaatgatgaaaatcatctgcgcaactgcttggaaatgtttctttgagtcttctctataagtctagtgttcatggaggtagcattgaagatatggttgaaagatgcagccgtcagggatgtactataacaatggcttacattgattacaatatgattgtagcctttatgcttggaaattatattaatttacgtgaaagttctacagagccaaatgattccctatggttttcacttcaaaagaaaaatgacaccactgaaatagaaactttactcttaaatacagcaccaaaaattattgatgagcaactggtgtgtcgtttatcgaaaacggatattttcattatatgtcgagataataaaatttatctagataaaatgataacaagaaacttgaaactaaggttttatggccaccgtcagtatttggaatgtgaagtttttcgagttgaaggaattaaggataacctagacgacataaagaggataattaaagccagagagcacagaaataggcttctagcagacatcagagactataggccctatgcagacttggtttcagaaattcgtattcttttggtgggtccagttgggtctggaaagtccagttttttcaattcagtcaagtctatttttcatggccatgtgactggccaagccgtagtggggtctgataccaccagcataaccgagcggtataggatatattctgttaaagatggaaaaaatggaaaatctctgccatttatgttgtgtgacactatggggctagatggggcagaaggagcaggactgtgcatggatgacattccccacatcttaaaaggttgtatgccagacagatatcagtttaattcccgtaaaccaattacacctgagcattctacttttatcacctctccatctctgaaggacaggattcactgtgtggcttatgtcttagacatcaactctattgacaatctctactctaaaatgttggcaaaagtgaagcaagttcacaaagaagtattaaactgtggtatagcatatgtggccttgcttactaaagtggatgattgcagtgaggttcttcaagacaactttttaaacatgagtagatctatgacttctcaaagccgggtcatgaatgtccataaaatgctaggcattcctatttccaatattttgatggttggaaattatgcttcagatttggaactggaccccatgaaggatattctcatcctctctgcactgaggcagatgctgcgggctgcagatgattttttagaagatttgcctcttgaggaaactggtgcaattgagagagcgttacagccctgcatttgagataagttgccttgattctgacatttggcccagcctgtactggtgtgccgcaatgagagtcaatctctattgacagcctgcttcagattttgcttttgttcgttttgccttctgtccttggaacagtcatatctcaagttcaaaggccaaaacctgagaagcggtgggctaagataggtcctactgcaaaccacccctccatatttccgtaccatttacaattcagtttctgtgacatctttttaaaccactggaggaaaaatgagatattctctaatttattcttctataacactctatatagagctatgtgagtactaatcacattgaataatagttataaaattattgtatagacatctgcttcttaaacagattgtgagttctttgagaaacagcgtggattttacttatctgtgtattcacagagcttagcacagtgcctggtaatgagcaagcatacttgccattacttttccttcccactctctccaacatcacattcactttaaatttttctgtatatagaaaggaaaactagcctgggcaacatgatgaaaccccatctccactgc

SEQ ID NO: 1357 - protein, 413 aa, Homo sapien
MVERCSRQGCTITMAYIDYNMIVAFMLGNYINLRESSTEPNDSLWFSLQKKNDTTEIETLLLNTAPKIIDEQLVCRLSKTDIFIICRDNKIYLDKMITRNLKLRFYGHRQYLECEVFRVEGIKDNLDDIKRIIKAREHRNRLLADIRDYRPYADLVSEIRILLVGPVGSGKSSFFNSVKSIFHGHVTGQAVVGSDTTSITERYRIYSVKDGKNGKSLPFMLCDTMGLDGAEGAGLCMDDIPHILKGCMPDRYQFNSRKPITPEHSTFITSPSLKDRIHCVAYVLDINSIDNLYSKMLAKVKQVHKEVLNCGIAYVALLTKVDDCSEVLQDNFLNMSRSMTSQSRVMNVHKMLGIPISNILMVGNYASDLELDPMKDILILSALRQMLRAADDFLEDLPLEETGAIERALQPCI

SEQ ID NO: 1358 - DNA, 4908 bp, Homo sapien
acctgcgtgcagtcggtcctccaggccacgcagcgcccgagagtaccagggagactccggcccctgtcggcgccaagcccctccgcccctcacagcgcccaggtccgcggccgggccttgattttttggcggggaccgtcatggcgtcgcagccaaattcgtctgcgaagaagaaagaggagaaggggaagaacatccaggtggtggtgagatgcagaccatttaatttggcagagcggaaagctagcgcccattcaatagtagaatgtgatcctgtacgaaaagaagttagtgtacgaactggaggattggctgacaagagctcaaggaaaacatacacttttgatatggtgtttggagcatctactaaacagattgatgtttaccgaagtgttgtttgtccaattctggatgaagttattatgggctataattgcactatctttgcgtatggccaaactggcactggaaaaacttttacaatggaaggtgaaaggtcacctaatgaagagtatacctgggaagaggatcccttggctggtataattccacgtacccttcatcaaatttttgagaaacttactgataatggtactgaattttcagtcaaagtgtctctgttggagatctataatgaagagctttttgatcttcttaatccatcatctgatgtttctgagagactacagatgtttgatgatccccgtaacaagagaggagtgataattaaaggtttagaagaaattacagtacacaacaaggatgaagtctatcaaattttagaaaagggggcagcaaaaaggacaactgcagctactctgatgaatgcatactctagtcgttcccactcagttttctctgttacaatacatatgaaagaaactacgattgatggagaagagcttgttaaaatcggaaagttgaacttggttgatcttgcaggaagtgaaaacattggccgttctggagctgttgataagagagctcgggaagctggaaatataaatcaatccctgttgactttgggaagggtcattactgcccttgtagaaagaacacctcatgttccttatcgagaatctaaactaactagaatcctccaggattctcttggagggcgtacaagaacatctataattgcaacaatttctcctgcatctctcaatcttgaggaaactctgagtacattggaatatgctcatagagcaaagaacatattgaataagcctgaagtgaatcagaaactcaccaaaaaagctcttattaaggagtatacggaggagatagaacgtttaaaacgagatcttgctgcagcccgtgagaaaaatggagtgtatatttctgaagaaaattttagagtcatgagtggaaaattaactgttcaagaagagcagattgtagaattgattgaaaaaattggtgctgttgaggaggagctgaatagggttacagagttgtttatggataataaaaatgaacttgaccagtgtaaatctgacctgcaaaataaaacacaagaacttgaaaccactcaaaaacatttgcaagaaactaaattacaacttgttaaagaagaatatatcacatcagctttggaaagtactgaggagaaacttcatgatgctgccagcaagctgcttaacacagttgaagaaactacaaaagatgtatctggtctccattccaaactggatcgtaagaaggcagttgaccaacacaatgcagaagctcaggatatttttggcaaaaacctgaatagtctgtttaataatatggaagaattaattaaggatggcagctcaaagcaaaaggccatgctagaagtacataagaccttatttggtaatctgctgtcttccagtgtctctgcattagataccattactacagtagcacttggatctctcacatctattccagaaaatgtgtctactcatgtttctcagatttttaatatgatactaaaagaacaatcattagcagcagaaagtaaaactgtactacaggaattgattaatgtactcaagactgatcttctaagttcactggaaatgattttatccccaactgtggtgtctatactgaaaatcaatagtcaactaaagcatattttcaagacttcattgacagtggccgataagatagaagatcaaaaaaaggaactagatggctttctcagtatactgtgtaacaatctacatgaactacaagaaaataccatttgttccttggttgagtcacaaaagcaatgtggaaacctaactgaagacctgaagacaataaagcagacccattcccaggaactttgcaagttaatgaatctttggacagagagattctgtgctttggaggaaaagtgtgaaaatatacagaaaccacttagtagtgtccaggaaaatatacagcagaaatctaaggatatagtcaacaaaatgacttttcacagtcaaaaattttgtgctgattctgatggcttctcacaggaactcagaaattttaaccaagaaggtacaaaattggttgaagaatctgtgaaacactctgataaactcaatggcaacctggaaaaaatatctcaagagactgaacagagatgtgaatctctgaacacaagaacagtttatttttctgaacagtgggtatcttccttaaatgaaagggaacaggaacttcacaacttattggaggttgtaagccaatgttgtgaggcttcaagttcagacatcactgagaaatcagatggacgtaaggcagctcatgagaaacagcataacatttttcttgatcagatgactattgatgaagataaattgatagcacaaaatctagaacttaatgaaaccataaaaattggtttgactaagcttaattgctttctggaacaggatctgaaactggatatcccaacaggtacgacaccacagaggaaaagttatttatacccatcaacactggtaagaactgaaccacgtgaacatctccttgatcagctgaaaaggaaacagcctgagctgttaatgatgctaaactgttcagaaaacaacaaagaagagacaattccggatgtggatgtagaagaggcagttctggggcagtatactgaagaacctctaagtcaagagccatctgtagatgctggtgtggattgttcatcaattggcggggttccatttttccagcataaaaaatcacatggaaaagacaaagaaaacagaggcattaacacactggagaggtctaaagtggaagaaactacagagcacttggttacaaagagcagattacctctgcgagcccagatcaacctttaattcacttgggggttggcaattttatttttaaagaaaacttaaaaataaaacctgaaaccccagaacttgagccttgtgtatagattttaaaagaatatatatatcagccgggcgcggtggctcatgcctgtaatcccagcactttgggaggctgaggcgggtggattgcttgagcccaggagtttgagaccagcctggccaacgtggcaaaacctcgtctctgttaaaaattagccgggcgtggtggcacactcctgtaatcccagctactggggaggctgaggcacgagaatcacttgaacccaggaagcggggttgcagtgagccaaaggtacaccactacactccagcctgggcaacagagcaagactcggtctcaaaaacaaaatttaaaaaagatataaggcagtactgtaaattcagttgaattttgatatctacccatttttctgtcatccctatagttcactttgtattaaattgggtttcatttgggatttgcaatgtaaatacgtatttctagttttcatataaagtagttcttttataacaaatgaaaagtatttttcttgtatattattaagtaatgaatatataagaactgtactcttctcagcttgagcttaacataggtaaatatcaccaacatctgtccttagaaaggaccatctcatgttttttttcttgctatgacttgtgtattttcttgcatcctccctagacttccctatttcgctttctcctcggctcactttctccctttttatttttcaccaaaccatttgtagagctacaaaacctatcctttcttattttcagtagtcagaattttatctagaaatcttttaacacctttttagtggttatttctaaaatcactgtcaacaataaatctaaccctagttgtatccctcctttaagtatttaaaacttgttgccccaaatgtgaaagcatttaattcctttaagaggcctaactcattcaccctgacagagttcacaaaaagcccactttagagtatacattgctattatgggagaccacccagacatctgactaatggctctgtgccacactccaagacctgtgccttttagagaagctcacaatgatttaaggactgtttgaaacttccaattatgtctataatttatattcttttgtttacatgatgaaactttttgttgttgcttgtttgtatataatacaatgtgtacatgtatctttttctcgattcaaatcttaacccttaggactctggtatttttgatctggcaaccatatttctggaagttgagatgtttcagcttgaagaaccaaaacagaaggaatatgtacaaagaataaattttctgctcacgatgagtttagtgtgtaaagtttagagacatctgactttgatagctaaattaaaccaaaccctattgaagaattgaatatatgctacttcaagaaactaaattgatctcgtagaattatcttaataaaataatggctataatttctctgcaaaatcagatgtcagcataagcgatggataatacctaataaactgccctcagtaaatccatggttaataaatgtggtttctacatt

SEQ ID NO: 1359 - protein, 1056 aa, Homo sapien
MASQPNSSAKKKEEKGKNIQVVVRCRPFNLAERKASAHSIVECDPVRKEVSVRTGGLADKSSRKTYTFDMVFGASTKQIDVYRSVVCPILDEVIMGYNCTIFAYGQTGTGKTFTMEGERSPNEEYTWEEDPLAGIIPRTLHQIFEKLTDNGTEFSVKVSLLEIYNEELFDLLNPSSDVSERLQMFDDPRNKRGVIIKGLEEITVHNKDEVYQILEKGAAKRTTAATLMNAYSSRSHSVFSVTIHMKETTIDGEELVKIGKLNLVDLAGSENIGRSGAVDKRAREAGNINQSLLTLGRVITALVERTPHVPYRESKLTRILQDSLGGRTRTSIIATISPASLNLEETLSTLEYAHRAKNILNKPEVNQKLTKKALIKEYTEEIERLKRDLAAAREKNGVYISEENFRVMSGKLTVQEEQIVELIEKIGAVEEELNRVTELFMDNKNELDQCKSDLQNKTQELETTQKHLQETKLQLVKEEYITSALESTEEKLHDAASKLLNTVEETTKDVSGLHSKLDRKKAVDQHNAEAQDIFGKNLNSLFNNMEELIKDGSSKQKAMLEVHKTLFGNLLSSSVSALDTITTVALGSLTSIPENVSTHVSQIFNMILKEQSLAAESKTVLQELINVLKTDLLSSLEMILSPTVVSILKINSQLKHIFKTSLTVADKIEDQKKELDGFLSILCNNLHELQENTICSLVESQKQCGNLTEDLKTIKQTHSQELCKLMNLWTERFCALEEKCENIQKPLSSVQENIQQKSKDIVNKMTFHSQKFCADSDGFSQELRNFNQEGTKLVEESVKHSDKLNGNLEKISQETEQRCESLNTRTVYFSEQWVSSLNEREQELHNLLEVVSQCCEASSSDITEKSDGRKAAHEKQHNIFLDQMTIDEDKLIAQNLELNETIKIGLTKLNCFLEQDLKLDIPTGTTPQRKSYLYPSTLVRTEPREHLLDQLKRKQPELLMMLNCSENNKEETIPDVDVEEAVLGQYTEEPLSQEPSVDAGVDCSSIGGVPFFQHKKSHGKDKENRGINTLERSKVEETTEHLVTKSRLPLRAQINL

SEQ ID NO: 1360 - DNA, 2497 bp, Homo sapien
gggcgccgaggctccccgccgctcgctgctccccggcccgcgccatgccctcctacacggtcaccgtggccactggcagccagtggttcgccggcactgacgactacatctacctcagcctcgtgggctcggcgggctgcagcgagaagcacctgctggacaagcccttctacaacgacttcgagcgtggcgcggtggattcatacgacgtgactgtggacgaggaactgggcgagatccagctggtcagaatcgagaagcgcaagtactggctgaatgacgactggtacctgaagtacatcacgctgaagacgccccacggggactacatcgagttcccctgctaccgctggatcaccggcgatgtcgaggttgtcctgagggatggacgcgcaaagttggcccgagatgaccaaattcacattctcaagcaacaccgacgtaaagaactggaaacacggcaaaaacaatatcgatggatggagtggaaccctggcttccccttgagcatcgatgccaaatgccacaaggatttaccccgtgatatccagtttgatagtgaaaaaggagtggactttgttctgaattactccaaagcgatggagaacctgttcatcaaccgcttcatgcacatgttccagtcttcttggaatgacttcgccgactttgagaaaatctttgtcaagatcagcaacactatttctgagcgggtcatgaatcactggcaggaagacctgatgtttggctaccagttcctgaatggctgcaaccctgtgttgatccggcgctgcacagagctgcccgagaagctcccggtgaccacggagatggtagagtgcagcctggagcggcagctcagcttggagcaggaggtccagcaagggaacattttcatcgtggactttgagctgctggatggcatcgatgccaacaaaacagacccctgcacactccagttcctggccgctcccatctgcttgctgtataagaacctggccaacaagattgtccccattgccatccagctcaaccaaatcccgggagatgagaaccctattttcctcccttcggatgcaaaatacgactggcttttggccaaaatctgggtgcgttccagtgacttccacgtccaccagaccatcacccaccttctgcgaacacatctggtgtctgaggtttttggcattgcaatgtaccgccagctgcctgctgtgcaccccattttcaagctgctggtggcacacgtgagattcaccattgcaatcaacaccaaggcccgtgagcagctcatctgcgagtgtggcctctttgacaaggccaacgccacagggggcggtgggcacgtgcagatggtgcagagggccatgaaggacctgacctatgcctccctgtgctttcccgaggccatcaaggcccggggcatggagagcaaagaagacatcccctactacttctaccgggacgacgggctcctggtgtgggaagccatcaggacgttcacggccgaggtggtagacatctactacgagggcgaccaggtggtggaggaggacccggagctgcaggacttcgtgaacgatgtctacgtgtacggcatgcggggccgcaagtcctcaggcttccccaagtcggtcaagagccgggagcagctgtcggagtacctgaccgtggtgatcttcaccgcctccgcccagcacgccgcggtcaacttcggccagtacgactggtgctcctggatccccaatgcgcccccaaccatgcgagccccgccaccgactgccaagggcgtggtgaccattgagcagatcgtggacacgctgcccgaccgcggccgctcctgctggcatctgggtgcagtgtgggcgctgagccagttccaggaaaacgagctgttcctgggcatgtacccagaagagcattttatcgagaagcctgtgaaggaagccatggcccgattccgcaagaacctcgaggccattgtcagcgtgattgctgagcgcaacaagaagaagcagctgccatattactacttgtccccagaccggattccgaacagtgtggccatctgagcacactgccagtctcactgtgggaaggccagctgccccagccagatggactccagcctgcctggcaggctgtctggccaggcctcttggcagtcacatctcttcctccgaggccagtacctttccatttattctttgatcttcagggaactgcatagattgtatcaaagtgtaaacaccatagggacccattctacacagagcaggactgcacaggcgtcctgtccacacccagctcagcatttccacaccaagcagcaacagcaaatcacgaccactgatagatgtctattcttgttggagacatgggatgattattttctgttctatttgtgcttagtccaattccttgcacatagtaggtacccaattcaattactattgaatgaattaagaattggttgccataaaaataaatcagttcattt

SEQ ID NO: 1361 - protein, 674 aa, Homo sapien
MPSYTVTVATGSQWFAGTDDYIYLSLVGSAGCSEKHLLDKPFYNDFERGAVDSYDVTVDEELGEIQLVRIEKRKYWLNDDWYLKYITLKTPHGDYIEFPCYRWITGDVEVVLRDGRAKLARDDQIHILKQHRRKELETRQKQYRWMEWNPGFPLSIDAKCHKDLPRDIQFDSEKGVDFVLNYSKAMENLFINRFMHMFQSSWNDFADFEKIFVKISNTISERVMNHWQEDLMFGYQFLNGCNPVLIRRCTELPEKLPVTTEMVECSLERQLSLEQEVQQGNIFIVDFELLDGIDANKTDPCTLQFLAAPICLLYKNLANKIVPIAIQLNQIPGDENPIFLPSDAKYDWLLAKIWVRSSDFHVHQTITHLLRTHLVSEVFGIAMYRQLPAVHPIFKLLVAHVRFTIAINTKAREQLICECGLFDKANATGGGGHVQMVQRAMKDLTYASLCFPEAIKARGMESKEDIPYYFYRDDGLLVWEAIRTFTAEVVDIYYEGDQVVEEDPELQDFVNDVYVYGMRGRKSSGFPKSVKSREQLSEYLTVVIFTASAQHAAVNFGQYDWCSWIPNAPPTMRAPPPTAKGVVTIEQIVDTLPDRGRSCWHLGAVWALSQFQENELFLGMYPEEHFIEKPVKEAMARFRKNLEAIVSVIAERNKKKQLPYYYLSPDRIPNSVAI

SEQ ID NO: 1362 - DNA, 1978 bp, Homo sapien
cggaagccgactcaacagagctatggcgggtttgactgtgagagacccagcggtggatcgttctctacgttctgtgttcgtggggaacattccttatgaagctactgaagagcagttgaaggacatcttttctgaggttggacctgttgttagtttcagattggtatacgatagagagacaggaaagccaaagggttatggcttctgtgaataccaagaccaagagacagcacttagtgccatgcggaacctgaatgggcgcgaattcagtgggagagcacttcgagtggacaatgctgccagtgaaaagaacaaagaagagctgaagagccttggcactggtgcccctgtcattgagtcaccttatggagagaccatcagtcctgaggatgcccctgagtccattagcaaagcagttgccagccttccaccagagcagatgtttgagctgatgaaacaaatgaagctctgtgtccagaatagtccccaggaggcacggaacatgttacttcagaaccctcaactggcttatgctttgctgcaagcacaggtagtgatgagaattgtggatccggaaattgccctgaaaattctgcatcgccagacaaatatcccaacgctgattgcaggcaaccctcagccagtccatggtgctgggcctggctcaggatccaatgtgtcaatgaaccagcagaatcctcaggcccctcaggcccagtctttgggtggaatgcatgtcaatggcgcacctcctctgatgcaagcttctatgcagggtggagttccagcaccagggcaaatgccagctgctgtcacaggacctggccctggttccttagctcctggaggaggaatgcaggctcaggttggaatgccaggaagtggaccagtgtccatggaacgggggcaagtgccgatgcaagaccccagagcagctatgcagcggggatccttgcctgcgaatgtcccaacccctcgaggcttgttaggagatgctccgaatgatccacggggaggcactttactttctgtaactggagaggtagagcctagaggttacttgggaccacctcatcagggtccacccatgcaccatgtccctggccatgagagccgaggaccacccccacatgaactgaggggagggccattacccgagcccagacctctaatggcagaaccaagaggacccatgctagatcagaggggtccacccttggatggcagaggtggaagggatccccgaggaatagatgcacgagggatggaggcccgagccatggaggcaagagggttagatgccagaggattagaggcccgtgcaatggaggcccgtgcgatggaagctcgtgcaatggaggcccgagcgatggaggcccgtgcaatggaagtccgagggatggaggccagaggcatggataccagaggcccagtgcctggccccagaggacctatacctagtggaatgcagggtcccagtccaattaacatgggggcggttgtcccccagggatccagacaggtcccagtcatgcagggaacaggaatgcaaggagcaagtatacagggtggaagccagcctggcggctttagtcccgggcagaaccaagtcactccacaggatcatgagaaggctgctttgattatgcaggttctacaactgactgcagaccagattgccatgttgcctcctgagcaaaggcagagtatcctgattttaaaggaacaaatacagaaatccactggagcaccttgataggttttcaaaaatacctggcaagaaatctggaaattctataattttgttgaaatattgaaaaaagatgacctgcatcctaacccttgaatgactcaaatcagtgccaggtggaggactcccatcaccttctctcagaacaaaatcacttcattttattgtcttagtttgtatattttctgtgacttgaaataaactttgaacacaattttagtacactgc

SEQ ID NO: 1363 - protein, 577 aa, Homo sapien
MAGLTVRDPAVDRSLRSVFVGNIPYEATEEQLKDIFSEVGPVVSFRLVYDRETGKPKGYGFCEYQDQETALSAMRNLNGREFSGRALRVDNAASEKNKEELKSLGTGAPVIESPYGETISPEDAPESISKAVASLPPEQMFELMKQMKLCVQNSPQEARNMLLQNPQLAYALLQAQVVMRIVDPEIALKILHRQTNIPTLIAGNPQPVHGAGPGSGSNVSMNQQNPQAPQAQSLGGMHVNGAPPLMQASMQGGVPAPGQMPAAVTGPGPGSLAPGGGMQAQVGMPGSGPVSMERGQVPMQDPRAAMQRGSLPANVPTPRGLLGDAPNDPRGGTLLSVTGEVEPRGYLGPPHQGPPMHHVPGHESRGPPPHELRGGPLPEPRPLMAEPRGPMLDQRGPPLDGRGGRDPRGIDARGMEARAMEARGLDARGLEARAMEARAMEARAMEARAMEARAMEVRGMEARGMDTRGPVPGPRGPIPSGMQGPSPINMGAVVPQGSRQVPVMQGTGMQGASIQGGSQPGGFSPGQNQVTPQDHEKAALIMQVLQLTADQIAMLPPEQRQSILILKEQIQKSTGAP

SEQ ID NO: 1364 - DNA, 2283 bp, Homo sapien
cccacgcgtccgcccacgcgtccgagcctgcgcaggaggccaataggctgccaatactccttggactccccgccagggccctgctgtcagtgcgcctgcgcgcgggtccggcgccgaggttcttgactgctgtgccggacgccaggtgtagccatgcagcgagccgattccgagcagccctccaagcgtccccgttgcgatgacagcccgagaaccccctcaaacaccccttccgcagaggcagactggtccccgggcctggaactccatcccgactacaagacatggggtccggagcaggtgtgctccttcctcaggcgcggtggctttgaagagccggtgctgctgaagaacatccgagaaaatgaaatcacaggcgcattactgccttgtcttgatgagtctcgttttgaaaatcttggggtaagttccttgggggagaggaagaagctgcttagttatatccagcgattggttcaaatccacgttgatacaatgaaggtaattaatgatcctatccatggccacattgagctccatcctctcctcgtccgaatcattgatacacctcaatttcaacgtcttcgatacatcaaacagctgggaggtggttactatgtttttccaggagcttcacacaatcgatttgagcatagtctaggggtggggtatctagcaggatgtctagttcacgcactgggtgaaaaacaaccagagctgcagataagtgaacgagatgttctctgtgttcagattgctggactttgtcatgatctcggtcatgggccattttctcacatgtttgatggacgatttattccacttgctcgcccggaggtgaaatggacgcatgaacaaggctcagttatgatgtttgagcaccttattaattctaatggaattaagcctgtcatggaacaatatggtctcatccctgaagaagatatttgctttataaaggaacaaattgtaggaccacttgaatcacctgtcgaagattcattgtggccatataaagggcgtcctgaaaacaaaagcttcctttatgagatagtatctaataaaagaaatggcattgatgtggacaaatgggattattttgccagggactgccatcatcttgggatccaaaataattttgattacaagcgctttattaagtttgcccgtgtctgtgaagtagacaatgagttgcgtatttgtgctagagataaggaagttggaaatctgtatgacatgttccacactcgcaactctttacaccgtagagcttatcaacacaaagttggcaacattattgatacaatgattacagatgctttcctcaaagcaggtgactacatagagattacaggtgctggaggaaaaaagtatcgcatttctacagcaattgacgacatggaagcctatactaagctgacagataacatttttctggagattttatactctactgatcccaaattgaaagacgcacgagagattttaaaacaaattgaataccgtaatctattcaagtatgtgggtgagacgcagccaacaggacaaataaagattaaaagggaggactatgaatctcttccaaaagaggttgccagtgctaaacccaaagtattgctagacgtgaaactggaggctgaagattttatagtggatgttatcaacatggattatggaatgcaagaaaagaatccaattgatcatgttagcttctattgtaagactgcccccaacagagcaatcaggattactaaaaaccaggtttcacaacttctgccagagaaatttgcagagcagctgattcgagtatattgtaagaaggtggacagaaagagtttgtatgccgcaagacaatattttgttcagtggtgtgcagacagaaatttcaccaagccgcaggatggcgatgttatagccccactcataacgcctcaaaaaaaggaatggaacgacagtacttcagtccaaaatccaactcgcctccgagaagcatccaaaagcagagtccagctttttaaagatgacccaatgtgaatgtctgtagtcagttgtttacaaactccctctcctgcacaattcatttagaggcttcaatcatagaattctgcaaattaatgacaactcatgccttaattttgtattttgaatgtacacgcatgctgaagctaagtaacttttaatcaaagaaataagatggtattaggcaaatcttactatactatgaaaagcattaccttgcctatttttaatattattaaagcctttctccttcgaaaaaaaaaa

SEQ ID NO: 1365 - protein, 626 aa, Homo sapien
MQRADSEQPSKRPRCDDSPRTPSNTPSAEADWSPGLELHPDYKTWGPEQVCSFLRRGGFEEPVLLKNIRENEITGALLPCLDESRFENLGVSSLGERKKLLSYIQRLVQIHVDTMKVINDPIHGHIELHPLLVRIIDTPQFQRLRYIKQLGGGYYVFPGASHNRFEHSLGVGYLAGCLVHALGEKQPELQISERDVLCVQIAGLCHDLGHGPFSHMFDGRFIPLARPEVKWTHEQGSVMMFEHLINSNGIKPVMEQYGLIPEEDICFIKEQIVGPLESPVEDSLWPYKGRPENKSFLYEIVSNKRNGIDVDKWDYFARDCHHLGIQNNFDYKRFIKFARVCEVDNELRICARDKEVGNLYDMFHTRNSLHRRAYQHKVGNIIDTMITDAFLKAGDYIEITGAGGKKYRISTAIDDMEAYTKLTDNIFLEILYSTDPKLKDAREILKQIEYRNLFKYVGETQPTGQIKIKREDYESLPKEVASAKPKVLLDVKLEAEDFIVDVINMDYGMQEKNPIDHVSFYCKTAPNRAIRITKNQVSQLLPEKFAEQLIRVYCKKVDRKSLYAARQYFVQWCADRNFTKPQDGDVIAPLITPQKKEWNDSTSVQNPTRLREASKSRVQLFKDDPM

SEQ ID NO: 1366 - DNA, 1506 bp, Homo sapien
aagcttggatacctgagtaataacggacaacagataaagctccgcatccttgcgccacgtgcttcggtccgtggtttgcgtgcagacgtttgacctgtatggtgaccctcgcgatttgcaaatgtgctgaggatctggaatactgaagtggaaggcacctcttgttttggggagcatgtatatttccctcctgtgacgcactgcttccacagagaggtgcaaacgtgcaaacgctcagcgaccgcagcgctcctgcccctcccccaccgtaactccggggtcgcggatctgcccgccccgctctcccgaagctgttcgggcagtgtccgaacggcttcggaggggcgagaagccagcatccgagccgcctctccggaataccagcagcctgacgcacgcgtgctgtcgggggagggatgctgggacagctgctcccgcacacggctcgcggtctcggcgccgcggagatgcccggccagggtccggggtccgactggacggagcgtagctcttctgcagagccgcccgctgtggccgggaccgagggtggcggcggcggatcagctggatactcttgttaccagaattccaaaggttctgatagaatcaaagatggatacaaagtgaactcacacatagctaagctgcaagagttatggaaaactccccaaaatcaaacaatccacctctctaaatcaatgatggaggcgtcctttttcaagcatccagacctcaccacaggccagaagcgttacctgtgcagcattgctaaaatctataatgcaaactatctgaagatgttaatgaagaggcagtacatgcacgtacttcagcacagctcacaaaagccaggtgtcctcactcatcacagaagccgccttagctcccgttactcacagaaacagcattacccttgcactacatggcgacatcaactggagagagaggactcggggtcttctgatatcgcagctgcatctgcacctgaaatgctcatacagcattccctttggtggccagtgagaaacaaagaagggataaaaactggatatgcatctaaaacaagatgtaagtcactgaagatttttagaagaccaaggaaactgttcatgcaaacagtttcttcagatgattctgaatcacacatgagtgaagaaaaaaaggaagaagatttactaaataattttatgcaatcaatgtcaattgaagaacagggagaacatctgatgttaacttgacagtcttgtctcgtgtattgaattcgtgccaaaggtgagggtaaggggttgtgagttgtgtcctgtatgtttaggatggtattgttatttattaaatcattaagtaattttggtttgttcagaaacttaaaacaatgtaattggtctgatgtagttccatgtaccaatgatagttatgtaagaaaatttacatgtaacatatacttgtacttctagctagatacaattaaaacttttcttgcattcaaaaaaaaaaaaaaaaaaaaaa

SEQ ID NO: 1367 - protein, 273 aa, Homo sapien
MLGQLLPHTARGLGAAEMPGQGPGSDWTERSSSAEPPAVAGTEGGGGGSAGYSCYQNSKGSDRIKDGYKVNSHIAKLQELWKTPQNQTIHLSKSMMEASFFKHPDLTTGQKRYLCSIAKIYNANYLKMLMKRQYMHVLQHSSQKPGVLTHHRSRLSSRYSQKQHYPCTTWRHQLEREDSGSSDIAAASAPEMLIQHSLWWPVRNKEGIKTGYASKTRCKSLKIFRRPRKLFMQTVSSDDSESHMSEEKKEEDLLNNFMQSMSIEEQGEHLMLT

SEQ ID NO: 1368 - DNA, 2407 bp, Homo sapien
ctaaaggtcggcgaggcttctgaagacgcaattcctgcgacgcccgcggaggggccctggggggcggcgcgagcgtctggcctgtgttggctgtaggcaacgaaaggagccctcccggtctgcgccggatggccccgggcggtgactcggtccggagccctggaacgctacgcccacctggcggaaagcaccacggaaacgcatccttctgtggccactgttaggtctgccattttacacttttctgatctcctccttcccttctgtgagctatgtctcaggggtcagtgacattcagagatgtggccatagacttctcccaggaggagtggaaatggcttcagcctgctcaaagagatttgtacagatgtgtaatgttggagaactatggccatctggtctcactgggtctttccatttctaagccagatgtggtttccttattggagcaagggaaagaaccctggctggggaaaagggaagtgaaaagagatctgttttcagtttcagagtcaagtggtgagatcaaagacttttcaccaaaaaatgtcatttatgatgactcatcccagtatttgatcatggaaagaattctaagtcaaggccctgtgtattccagttttaaaggaggctggaaatgcaaggatcatactgagatgctgcaagaaaatcagggatgtattaggaaagtaacagtctctcatcaagaagccctggctcaacatatgaatatcagtactgtggagaggccctatggatgccatgaatgtggaaaaacttttggtcgacgcttttccctggtgttacaccagaggactcatactggagagaaaccatatgcatgtaaggaatgtggcaaaacctttagccagatttcaaaccttgtgaaacaccaaatgatacatactggaaagaaaccccatgagtgtaaggactgtaataaaacattcagttacctttcatttcttattgaacaccagagaacgcacactggggagaaaccttatgaatgtactgagtgtggaaaggcctttagccgtgcctccaacctcactcgacatcaaagaattcacataggaaagaaacaatatatatgtaggaaatgtggtaaagcatttagcagtggctcagaactcattcgccaccagattacacatactggagagaaaccttatgaatgcattgaatgtgggaaggcatttcgccgtttctcacaccttactcgacatcagagcatccatacaaccaaaaccccgtatgaatgtaatgaatgtaggaaagctttgcgttgtcactcattccttattaaacatcagagaattcatgctggagaaaagctctatgaatgtgatgaatgtggtaaagttttcacttggcatgcatcccttattcaacatacgaagagtcacactggagagaaaccctatgcgtgtgctgaatgtgataaagccttcagccggagcttttccctcattctacatcagagaactcatactggagagaaaccctatgtatgtaaggtatgcaacaaatccttcagctggagctcaaaccttgctaaacatcagaggacacacactcttgacaacccctatgaatatgaaaattcatttaattaccactcattccttactgaacaccagtgaatttacactgcaaagaaaaactatgaatgtatggaattttttaaaaagaagtataatgccttacttcagagaactcttggaaagaagccttatgtgaaagtgatgactgtgaagtaatatggcccacactttattcaccaccctggagaaaaaaaaacccaggaatatgtggaaaagccattaataaccactcttttatttttttgcaataacaaggtgaaatcaatattgttgagaagattcttccatctggtaatgttgagaagacttcatttggtaggagtcccttactttacgtgtgtaaattcctaccaggaaagaatacatatccaatagattggagaaagccagagattagccccgcattccgcatctgtcaaccaggacagaaagcatggacaagggatgagctttacaaagatgatgcactttggagatcagaaaattcatatttaagcaaagtgatacaaacacagtgatttgggaatgccttcatttacaatgcaatacttacattttaatactcttgtaggagaaaaagcaactgtataaatgaatgtagagtgactttctgcaatatttgcaacctatatcagagaattacactgtgggaaaactaccattgtaataagtgtagcaaaatctccttagatatctgaaaagtcatactggatggaatctgtaggaaacggttctattttgagggaagggggattcctttttgttttttaagtgaattcagaaaatgttataaactttag

SEQ ID NO: 1369 - protein, 457 aa, Homo sapien
MSQGSVTFRDVAIDFSQEEWKWLQPAQRDLYRCVMLENYGHLVSLGLSISKPDVVSLLEQGKEPWLGKREVKRDLFSVSESSGEIKDFSPKNVIYDDSSQYLIMERILSQGPVYSSFKGGWKCKDHTEMLQENQGCIRKVTVSHQEALAQHMNISTVERPYGCHECGKTFGRRFSLVLHQRTHTGEKPYACKECGKTFSQISNLVKHQMIHTGKKPHECKDCNKTFSYLSFLIEHQRTHTGEKPYECTECGKAFSRASNLTRHQRIHIGKKQYICRKCGKAFSSGSELIRHQITHTGEKPYECIECGKAFRRFSHLTRHQSIHTTKTPYECNECRKALRCHSFLIKHQRIHAGEKLYECDECGKVFTWHASLIQHTKSHTGEKPYACAECDKAFSRSFSLILHQRTHTGEKPYVCKVCNKSFSWSSNLAKHQRTHTLDNPYEYENSFNYHSFLTEHQ

SEQ ID NO: 1370 - DNA, 7102 bp, Homo sapien
aaaactgcgactgcgcggcgtgagctcgctgagacttcctggaccccgcaccaggctgtggggtttctcagataactgggcccctgcgctcaggaggccttcaccctctgctctggttcattggaacagaaagaaatggatttatctgctcttcgcgttgaagaagtacaaaatgtcattaatgctatgcagaaaatcttagagtgtcccatctgtctggagttgatcaaggaacctgtctccacaaagtgtgaccacatattttgcaaattttgcatgctgaaacttctcaaccagaagaaagggccttcacagtgtcctttatgtaagaatgatataaccaaaaggagcctacaagaaagtacgagatttagtcaacttgttgaagagctattgaaaatcatttgtgcttttcagcttgacacaggtttggagtatgcaaacagctataattttgcaaaaaaggaaaataactctcctgaacatctaaaagatgaagtttctatcatccaaagtatgggctacagaaaccgtgccaaaagacttctacagagtgaacccgaaaatccttccttgcaggaaaccagtctcagtgtccaactctctaaccttggaactgtgagaactctgaggacaaagcagcggatacaacctcaaaagacgtctgtctacattgaattgggatctgattcttctgaagataccgttaataaggcaacttattgcagtgtgggagatcaagaattgttacaaatcacccctcaaggaaccagggatgaaatcagtttggattctgcaaaaaaggctgcttgtgaattttctgagacggatgtaacaaatactgaacatcatcaacccagtaataatgatttgaacaccactgagaagcgtgcagctgagaggcatccagaaaagtatcagggtagttctgtttcaaacttgcatgtggagccatgtggcacaaatactcatgccagctcattacagcatgagaacagcagtttattactcactaaagacagaatgaatgtagaaaaggctgaattctgtaataaaagcaaacagcctggcttagcaaggagccaacataacagatgggctggaagtaaggaaacatgtaatgataggcggactcccagcacagaaaaaaaggtagatctgaatgctgatcccctgtgtgagagaaaagaatggaataagcagaaactgccatgctcagagaatcctagagatactgaagatgttccttggataacactaaatagcagcattcagaaagttaatgagtggttttccagaagtgatgaactgttaggttctgatgactcacatgatggggagtctgaatcaaatgccaaagtagctgatgtattggacgttctaaatgaggtagatgaatattctggttcttcagagaaaatagacttactggccagtgatcctcatgaggctttaatatgtaaaagtgaaagagttcactccaaatcagtagagagtaatattgaagacaaaatatttgggaaaacctatcggaagaaggcaagcctccccaacttaagccatgtaactgaaaatctaattataggagcatttgttactgagccacagataatacaagagcgtcccctcacaaataaattaaagcgtaaaaggagacctacatcaggccttcatcctgaggattttatcaagaaagcagatttggcagttcaaaagactcctgaaatgataaatcagggaactaaccaaacggagcagaatggtcaagtgatgaatattactaatagtggtcatgagaataaaacaaaaggtgattctattcagaatgagaaaaatcctaacccaatagaatcactcgaaaaagaatctgctttcaaaacgaaagctgaacctataagcagcagtataagcaatatggaactcgaattaaatatccacaattcaaaagcacctaaaaagaataggctgaggaggaagtcttctaccaggcatattcatgcgcttgaactagtagtcagtagaaatctaagcccacctaattgtactgaattgcaaattgatagttgttctagcagtgaagagataaagaaaaaaaagtacaaccaaatgccagtcaggcacagcagaaacctacaactcatggaaggtaaagaacctgcaactggagccaagaagagtaacaagccaaatgaacagacaagtaaaagacatgacagcgatactttcccagagctgaagttaacaaatgcacctggttcttttactaagtgttcaaataccagtgaacttaaagaatttgtcaatcctagccttccaagagaagaaaaagaagagaaactagaaacagttaaagtgtctaataatgctgaagaccccaaagatctcatgttaagtggagaaagggttttgcaaactgaaagatctgtagagagtagcagtatttcattggtacctggtactgattatggcactcaggaaagtatctcgttactggaagttagcactctagggaaggcaaaaacagaaccaaataaatgtgtgagtcagtgtgcagcatttgaaaaccccaagggactaattcatggttgttccaaagataatagaaatgacacagaaggctttaagtatccattgggacatgaagttaaccacagtcgggaaacaagcatagaaatggaagaaagtgaacttgatgctcagtatttgcagaatacattcaaggtttcaaagcgccagtcatttgctccgttttcaaatccaggaaatgcagaagaggaatgtgcaacattctctgcccactctgggtccttaaagaaacaaagtccaaaagtcacttttgaatgtgaacaaaaggaagaaaatcaaggaaagaatgagtctaatatcaagcctgtacagacagttaatatcactgcaggctttcctgtggttggtcagaaagataagccagttgataatgccaaatgtagtatcaaaggaggctctaggttttgtctatcatctcagttcagaggcaacgaaactggactcattactccaaataaacatggacttttacaaaacccatatcgtataccaccactttttcccatcaagtcatttgttaaaactaaatgtaagaaaaatctgctagaggaaaactttgaggaacattcaatgtcacctgaaagagaaatgggaaatgagaacattccaagtacagtgagcacaattagccgtaataacattagagaaaatgtttttaaagaagccagctcaagcaatattaatgaagtaggttccagtactaatgaagtgggctccagtattaatgaaataggttccagtgatgaaaacattcaagcagaactaggtagaaacagagggccaaaattgaatgctatgcttagattaggggttttgcaacctgaggtctataaacaaagtcttcctggaagtaattgtaagcatcctgaaataaaaaagcaagaatatgaagaagtagttcagactgttaatacagatttctctccatatctgatttcagataacttagaacagcctatgggaagtagtcatgcatctcaggtttgttctgagacacctgatgacctgttagatgatggtgaaataaaggaagatactagttttgctgaaaatgacattaaggaaagttctgctgtttttagcaaaagcgtccagaaaggagagcttagcaggagtcctagccctttcacccatacacatttggctcagggttaccgaagaggggccaagaaattagagtcctcagaagagaacttatctagtgaggatgaagagcttccctgcttccaacacttgttatttggtaaagtaaacaatataccttctcagtctactaggcatagcaccgttgctaccgagtgtctgtctaagaacacagaggagaatttattatcattgaagaatagcttaaatgactgcagtaaccaggtaatattggcaaaggcatctcaggaacatcaccttagtgaggaaacaaaatgttctgctagcttgttttcttcacagtgcagtgaattggaagacttgactgcaaatacaaacacccaggatcctttcttgattggttcttccaaacaaatgaggcatcagtctgaaagccagggagttggtctgagtgacaaggaattggtttcagatgatgaagaaagaggaacgggcttggaagaaaataatcaagaagagcaaagcatggattcaaacttaggtgaagcagcatctgggtgtgagagtgaaacaagcgtctctgaagactgctcagggctatcctctcagagtgacattttaaccactcagcagagggataccatgcaacataacctgataaagctccagcaggaaatggctgaactagaagctgtgttagaacagcatgggagccagccttctaacagctacccttccatcataagtgactcttctgcccttgaggacctgcgaaatccagaacaaagcacatcagaaaaagcagtattaacttcacagaaaagtagtgaataccctataagccagaatccagaaggcctttctgctgacaagtttgaggtgtctgcagatagttctaccagtaaaaataaagaaccaggagtggaaaggtcatccccttctaaatgcccatcattagatgataggtggtacatgcacagttgctctgggagtcttcagaatagaaactacccatctcaagaggagctcattaaggttgttgatgtggaggagcaacagctggaagagtctgggccacacgatttgacggaaacatcttacttgccaaggcaagatctagagggaaccccttacctggaatctggaatcagcctcttctctgatgaccctgaatctgatccttctgaagacagagccccagagtcagctcgtgttggcaacataccatcttcaacctctgcattgaaagttccccaattgaaagttgcagaatctgcccagagtccagctgctgctcatactactgatactgctgggtataatgcaatggaagaaagtgtgagcagggagaagccagaattgacagcttcaacagaaagggtcaacaaaagaatgtccatggtggtgtctggcctgaccccagaagaatttatgctcgtgtacaagtttgccagaaaacaccacatcactttaactaatctaattactgaagagactactcatgttgttatgaaaacagatgctgagtttgtgtgtgaacggacactgaaatattttctaggaattgcgggaggaaaatgggtagttagctatttctgggtgacccagtctattaaagaaagaaaaatgctgaatgagcatgattttgaagtcagaggagatgtggtcaatggaagaaaccaccaaggtccaaagcgagcaagagaatcccaggacagaaagatcttcagggggctagaaatctgttgctatgggcccttcaccaacatgcccacagatcaactggaatggatggtacagctgtgtggtgcttctgtggtgaaggagctttcatcattcacccttggcacaggtgtccacccaattgtggttgtgcagccagatgcctggacagaggacaatggcttccatgcaattgggcagatgtgtgaggcacctgtggtgacccgagagtgggtgttggacagtgtagcactctaccagtgccaggagctggacacctacctgataccccagatcccccacagccactactgactgcagccagccacaggtacaggccacaggaccccaagaatgagcttacaaagtggcctttccaggccctgggagctcctctcactcttcagtccttctactgtcctggctactaaatattttatgtacatcagcctgaaaaggacttctggctatgcaagggtcccttaaagattttctgcttgaagtctcccttggaaatctgccatgagcacaaaattatggtaatttttcacctgagaagattttaaaaccatttaaacgccaccaattgagcaagatgctgattcattatttatcagccctattctttctattcaggctgttgttggcttagggctggaagcacagagtggcttggcctcaagagaatagctggtttccctaagtttacttctctaaaaccctgtgttcacaaaggcagagagtcagacccttcaatggaaggagagtgcttgggatcgattatgtgacttaaagtcagaatagtccttgggcagttctcaaatgttggagtggaacattggggaggaaattctgaggcaggtattagaaatgaaaaggaaacttgaaacctgggcatggtggctcacgcctgtaatcccagcactttgggaggccaaggtgggcagatcactggaggtcaggagttcgaaaccagcctggccaacatggtgaaaccccatctctactaaaaatacagaaattagccggtcatggtggtggacacctgtaatcccagctactcaggtggctaaggcaggagaatcacttcagcccgggaggtggaggttgcagtgagccaagatcataccacggcactccagcctgggtgacagtgagactgtggctcaaaaaaaaaaaaaaaaaaggaaaatgaaactaggaaaggtttcttaaagtctgagatatatttgctagatttctaaagaatgtgttctaaaacagcagaagattttcaagaaccggtttccaaagacagtcttctaattcctcattagtaataagtaaaatgtttattgttgtagctctggtatataatccattcctcttaaaatataagacctctggcatgaatatttcatatctataaaatgacagatcccaccaggaaggaagctgttgctttctttgaggtgatttttttcctttgctccctgttgctgaaaccatacagcttcataaataattttgcttgctgaaggaagaaaaagtgtttttcataaacccattatccaggactgtttatagctgttggaaggactaggtcttccctagcccccccagtgtgcaagggcagtgaagacttgattgtacaaaatacgttttgtaaatgttgtgctgttaacactgcaaataaacttggtagcaaaca

SEQ ID NO: 1371 - protein, 1863 aa, Homo sapien
MDLSALRVEEVQNVINAMQKILECPICLELIKEPVSTKCDHIFCKFCMLKLLNQKKGPSQCPLCKNDITKRSLQESTRFSQLVEELLKIICAFQLDTGLEYANSYNFAKKENNSPEHLKDEVSIIQSMGYRNRAKRLLQSEPENPSLQETSLSVQLSNLGTVRTLRTKQRIQPQKTSVYIELGSDSSEDTVNKATYCSVGDQELLQITPQGTRDEISLDSAKKAACEFSETDVTNTEHHQPSNNDLNTTEKRAAERHPEKYQGSSVSNLHVEPCGTNTHASSLQHENSSLLLTKDRMNVEKAEFCNKSKQPGLARSQHNRWAGSKETCNDRRTPSTEKKVDLNADPLCERKEWNKQKLPCSENPRDTEDVPWITLNSSIQKVNEWFSRSDELLGSDDSHDGESESNAKVADVLDVLNEVDEYSGSSEKIDLLASDPHEALICKSERVHSKSVESNIEDKIFGKTYRKKASLPNLSHVTENLIIGAFVTEPQIIQERPLTNKLKRKRRPTSGLHPEDFIKKADLAVQKTPEMINQGTNQTEQNGQVMNITNSGHENKTKGDSIQNEKNPNPIESLEKESAFKTKAEPISSSISNMELELNIHNSKAPKKNRLRRKSSTRHIHALELVVSRNLSPPNCTELQIDSCSSSEEIKKKKYNQMPVRHSRNLQLMEGKEPATGAKKSNKPNEQTSKRHDSDTFPELKLTNAPGSFTKCSNTSELKEFVNPSLPREEKEEKLETVKVSNNAEDPKDLMLSGERVLQTERSVESSSISLVPGTDYGTQESISLLEVSTLGKAKTEPNKCVSQCAAFENPKGLIHGCSKDNRNDTEGFKYPLGHEVNHSRETSIEMEESELDAQYLQNTFKVSKRQSFAPFSNPGNAEEECATFSAHSGSLKKQSPKVTFECEQKEENQGKNESNIKPVQTVNITAGFPVVGQKDKPVDNAKCSIKGGSRFCLSSQFRGNETGLITPNKHGLLQNPYRIPPLFPIKSFVKTKCKKNLLEENFEEHSMSPEREMGNENIPSTVSTISRNNIRENVFKEASSSNINEVGSSTNEVGSSINEIGSSDENIQAELGRNRGPKLNAMLRLGVLQPEVYKQSLPGSNCKHPEIKKQEYEEVVQTVNTDFSPYLISDNLEQPMGSSHASQVCSETPDDLLDDGEIKEDTSFAENDIKESSAVFSKSVQKGELSRSPSPFTHTHLAQGYRRGAKKLESSEENLSSEDEELPCFQHLLFGKVNNIPSQSTRHSTVATECLSKNTEENLLSLKNSLNDCSNQVILAKASQEHHLSEETKCSASLFSSQCSELEDLTANTNTQDPFLIGSSKQMRHQSESQGVGLSDKELVSDDEERGTGLEENNQEEQSMDSNLGEAASGCESETSVSEDCSGLSSQSDILTTQQRDTMQHNLIKLQQEMAELEAVLEQHGSQPSNSYPSIISDSSALEDLRNPEQSTSEKAVLTSQKSSEYPISQNPEGLSADKFEVSADSSTSKNKEPGVERSSPSKCPSLDDRWYMHSCSGSLQNRNYPSQEELIKVVDVEEQQLEESGPHDLTETSYLPRQDLEGTPYLESGISLFSDDPESDPSEDRAPESARVGNIPSSTSALKVPQLKVAESAQSPAAAHTTDTAGYNAMEESVSREKPELTASTERVNKRMSMVVSGLTPEEFMLVYKFARKHHITLTNLITEETTHVVMKTDAEFVCERTLKYFLGIAGGKWVVSYFWVTQSIKERKMLNEHDFEVRGDVVNGRNHQGPKRARESQDRKIFRGLEICCYGPFTNMPTDQLEWMVQLCGASVVKELSSFTLGTGVHPIVVVQPDAWTEDNGFHAIGQMCEAPVVTREWVLDSVALYQCQELDTYLIPQIPHSHY

SEQ ID NO: 1372 - DNA, 1172 bp, Homo sapien
gagacattcctcaattgcttagacatattctgagcctacagcagaggaacctccagtctcagcaccatgaatcaaactgcgattctgatttgctgccttatctttctgactctaagtggcattcaaggagtacctctctctagaaccgtacgctgtacctgcatcagcattagtaatcaacctgttaatccaaggtctttagaaaaacttgaaattattcctgcaagccaattttgtccacgtgttgagatcattgctacaatgaaaaagaagggtgagaagagatgtctgaatccagaatcgaaggccatcaagaatttactgaaagcagttagcaaggaaatgtctaaaagatctccttaaaaccagaggggagcaaaatcgatgcagtgcttccaaggatggaccacacagaggctgcctctcccatcacttccctacatggagtatatgtcaagccataattgttcttagtttgcagttacactaaaaggtgaccaatgatggtcaccaaatcagctgctactactcctgtaggaaggttaatgttcatcatcctaagctattcagtaataactctaccctggcactataatgtaagctctactgaggtgctatgttcttagtggatgttctgaccctgcttcaaatatttccctcacctttcccatcttccaagggtactaaggaatctttctgctttggggtttatcagaattctcagaatctcaaataactaaaaggtatgcaatcaaatctgctttttaaagaatgctctttacttcatggacttccactgccatcctcccaaggggcccaaattctttcagtggctacctacatacaattccaaacacatacaggaaggtagaaatatctgaaaatgtatgtgtaagtattcttatttaatgaaagactgtacaaagtataagtcttagatgtatatatttcctatattgttttcagtgtacatggaataacatgtaattaagtactatgtatcaatgagtaacaggaaaattttaaaaatacagatagatatatgctctgcatgttacataagataaatgtgctgaatggttttcaaataaaaatgaggtactctcctggaaatattaagaaagactatctaaatgttgaaagatcaaaaggttaataaagtaattataact

SEQ ID NO: 1373 - protein, 98 aa, Homo sapien
MNQTAILICCLIFLTLSGIQGVPLSRTVRCTCISISNQPVNPRSLEKLEIIPASQFCPRVEIIATMKKKGEKRCLNPESKAIKNLLKAVSKEMSKRSP

SEQ ID NO: 1374 - DNA, 7034 bp, Homo sapien
  Unsure 6154-6216: Unknown base
ggcggcggctggctagggctgcggcgcgcgtggagggttcgctgctggtttgccgccgggtcgggctccgtgggccggggcaggaggaccagcacctgaggccgggcccgcagcccgcgacttcacagccaggcggcggcgctgctgctgctgcggggctctggcgcgcagcccggcgggacagcggggcggctggcgccgggggccggggagcgccagatgatggatttggacatgcttctatgaagaaatgccacatggtccgagagcaaacatgtccaggctactgccactttagtggactagggctcggtgccagcacttcccgggtaatcaggcgtggtctgaccgaggatcaagaagcacatcatcaccaatgacatcatgacagcaagagagcacagccctcgccatggtgccagggcccgtgcaatgcagcgggcttccaccatcgacgtggcggccgacatgctgggcctctctctggcaggaaatatacaagacccagatgagcccattttagaatttagcttagcttgcagtgagctgcatactccatcgctagatcgaaagccaaatagttttgttgcggtgagtgtcaccacccctcctcaggcattctggacgaagcatgcacagacggagatcattgagggaaccaacaatcctatatttctaagcagtattgccttctttcaagactctcttatcaatcagatgacacaagtcaaactctccgtgtatgatgtcaaagatagatctcagggaacaatgtatttactgggctctggaacgttcattgtcaaagatctgctccaggacaggcatcataggttgcatttaacactaaggtctgcagagagtgaccgagtaggtaacatcaccgtgattggctggcagatggaggagaagtcagaccaacggccccctgtgacccggtctgtggacactgtcaatgggaggatggttcttcctgtcgatgagagcttgacggaggcgttaggaatccgatccaaatacgcttcattgcgaaaggacactttgctgaaatcggtgttcggtggtgccatctgccgcatggtaccggtttccaaccactgatggtaaccatttgcggatcctggagcagatggcagagagcgtgctctccctgcacgtgccccggcagttcgtgaagctcctactagaggaagatgcagccagagtgtgtgagctggaggagctgggagagctgtccccttgctgggagagcctccggcgccaaattgtcacccagtaccagaccatcatcctcacataccaggagaacctgaccgacctccatcagtacagagggccctcgtttaaagcaagcagtttgaaagcagataaaaagttagaatttgttcccacaaacttgcacatacaaaggatgagagttcaagacgatggaggatcagatcagaactacgacatcgtcaccattggggcgccagcagcacactgccaaggttttaagtcaggaggtctccgcaaaaagctgcacaaatttgaagagaccaagaaacatacatcatctggctgccagtccataatctacataccccaggatgttgtcagagccaaggagatcatcgcccagatcaacaccctgaaaacccaagtgagttactacgcagagcggctgtcaagggcagccaaggacaggtctgccactggccttgagaggacactcgccatcttggcagacaagacacggcagctggtcacggtctgcgactgcaagctcctggccaactccatccatgggctgaacgctgcacggcctgactacattgcctccaaggcctctcccacttcgactgaggaggagcaggtgatgcttagaaatgaccaggacaccctcatggcccaggtggacagggagaaacagccgagtcttccctgcaggtggactggcacgaggaggagtgggagaaagtgtggctgaacgtggacaagagcctagagtgcatcattcagcgtgtgaacaagctgctgcagaaggagcagctgcatggcgagggctgtgaggatgtcttcccctgtgcaggcagctgcaccagcaagaaaggtaacccggacagccacgcctactggatcagaccagaagaccccttctgtgatgtcccctcctcaccatgcccctccaccatgccctccactgcatgccatcctcatctgaccacacattgcagtccccctcctgaagagtccagcccaggtgaatggagtgaggccctttacccgctgctgaccactctcaccgactgcgtggccatgatgagtgacaaggccaagaaggccatggtattcctgctcatgcaggacagcgcgcccaccatagccacctacctgagcctgcagtaccgccgtgacgtggtcttctgccagacgctgaccgccctcatctgcggcttcatcattaagctgaggaactgcctgcatgacgacggcttcctgcgccagctctacaccatcgggctgctggcccagttcgagagcctgctgagcacctacggggaggagctggcaatgctggaggacatgagccttgggatcatggacttgaggaacgtgaccttcaaagtcactcaggccacttccagcgcctccgcagacatgctgcccgtcatcacaggaaatcgcgacgggtttaacgtgcgggtccctctgccgggcccgctgtttgacgccttgccccgggagatccagagtggcatgctgctgcgagtgcagcccgtcctcttcaactgtgggcatcaatgagcagcagacactggccgagaggtttggcgatacgtctttacaagaagtcatcaacgtggagagtttggttgcggttaaattcctactttgagcagtttaaggaagttttgcctgaggattggcctgcctcggtctcgcagtcagacgtgcctgccagagctgctgcggtttctgggtcagaacgtgcatgcccggaagaataagaacgtcgacattctctggcaagctgctgagatctgccgccgccttaatggggtccggttcaccagctgcaagagcgctaaggaccgtacagccatgtcggtgacactggagcagtgcctgatcctgcaacacgagcatggcatggccccgcaggtcttcacccaggccctggagtgcatgcgcagtgagggttgtcgaagagaaaatacaatgaagaatgttggaagtcgcaaatatgcatttaattccctgcagctgaaggctttccccaagcattacaggcctcccgaagggacttacggaaaagttgaaacgtgaacacacggtttcctctaattagctgttacataataaatgtgggtaccctctagtgtcatatatgaattcttcaagaagacctgaaggattggtttttattttttgtggtttttttaaaaaaaacatttcactaaagagtctctggagcatgttttttgttttttgggtttttttccccattggaatcaataggaggtaatgtttggctcaatagtgtggatagtaacaactgcctatttaaattaaatagcctttggctgtaactacacagatctcatcaatagttacctacatgaatcaagctaggtttgtctgaaatgctagaagactttttcaaatgcctgcttgctcacttacttttctacagagtaactcaaaagtaaccattgaattacaatccactttgtaaaaatctgaatgtaaaacagtaaataataaattaaataattggatcctaggcataccaataaatgttatttggggaaagaagctagcactatctcatgcagtgagaataacgggttctagtgaattatcctatctacactaccacctgaagaagttgaaagaaagattgataaatcaacgggagataagactttattagaaggtaacacctgcaaggtaccccacatagttggggccactcttttttctgtcccttatgagttacagaacagggagtctgctggagacacaaagccagcagtaaggtccctttagcctgtctcctgttctctgaagctccctgccgaggctccctcacgcccagaggacacatctccccttcttctctagatgttaatgtagggcctcagatgtggcatgtcaacactcccatggggaatttatgaccatagagatagtagaaacctaaatattttcagaaaaaaattttttttgcaggatttccaatttatctttgaaaagacagtacaatcatgtttgaatgtctgatgaaagtgtcttatttttaggtttgcaataattgttactttcttattctcattcttatgtaagatgactattgagaaacagttgaaatttattctcctcaaatgagattttgaaagggatttatgggccataaaacttaggaatttcatagaaaattttgtctggtcatcttttataagatgatgatgagtcttatctgcacatagcagagtttgtttcttaggagtttatatgttttattgattctgtttacgatgtttacatgttcttgaaaaggttgtaaaagaaatacatatggcacatattaatgatgctgatcctaatgatttgtgaacctcttagaaattcttttgtctaaaagcctagagattcttctggttcctttagaaacatgtaacaaacttgggccaggggtgctgaggcatggggaggactgcttattggcaggaacacagagggggtgggcatcaggtagggtggaactggatgaccttccagaccccctcctactcagaagtcagcatgcaagcagcgcctgctgtctcccgatgcctgcagggaggaaaatgtctgtgaaggacactttaatgaaggacgaagctctctgctgctccctcaaagctgagttcactgtggcaggcaggaagcagagaagctcctgcccgccaaacccactgcacaggtggctgctgctggtatcagattctcctttttaagtgtcaatttctgttcacagacagtttgttttcaatatggctgatttaccctttcacctctccaccatctcatttaatttgtaaatttttagttctgtcttttctcattttaacttttaaaaaatctccttgctttttaaaaataaatattacccacatagttttcagatcttttttgtctggagagcattaaatatctgcactcatcaaagggaatatagcaaatgttgatcatctgtcagcagttttgcatgtgacacctttatatgaattattttcccaatttttgctctatgtaatgggtcaccataaaactgtaagacttggcaaatgctatagaaaaggttcaggtttcagtattctctctgaaggcatcattcctgggcttccggcagcatcacacgcttccagtgcctgcagggtgagggtgtgtggcacagaggcaagcagctcctctcttctgtaggagctttgggttttcagaggtgcagggaaggcagttttacaggttaccgtaaaacagaggttccgtccagtgttccttatgatgcctccccatttaaaaagaaaagagatctatggaaaactgggaatgtaatgtggattctgtcagagctcctacagagcacagttgcctttagtttcctttaaagatgtaaaaatattgtataatacagttttgtccctacacaattgtatttgccaagcttagtgcattatgatacctttatttatttgttttgggcagtattactatatatatataaacatacagttactgttttatatattcttaggtcattcaaagccatgtatgctgtaaatgtgctagtctttagaatgacacataataaataactgacaagatattaaatgtggtcttgcctgattcatcctattaggaggactagttctatgtgaccagcctgtgactggaccattgttcttgggcattgcattgagtgctcgggtgctgaatacatgtttgtaaacatgggaccatgggagacttccattttataagcttgtttctgcctaatttgaagcagaggggcaacagcgttgaggttaagagcacggactttgggagcacacagaccaggtccctaatcctggttctgcccctgatctggctggtgactctgagcaagttgcttgacctctccaagccnnnnnnnnnnnnnnnnnnnnnnnnnnnnnnnnnnnnnnnnnnnnnnnnnnnnnnnnnnnnnnncgcctcagaagtacgtgttcataaatggtagccattgttgttaccttcccgtctgtgaacatggatcacatcatctctgtgggtaacccagtcctcgttgtatgacttgtcaaaatgcagttccacttgtattaatattgaccctgttcatcgtcaccaggactgcatcttgcaccactgtgccgtcttctaggcacacacgacccgttatctcccttggaaaaattcctctcactggaaatgtacaattaaaggatgattgaaatgtttaactcttggagtttttagtattaccaaactcctagaaatttaagctaccaccaaaaataacatgtgccttttccctttattctcattgatggtagcagtgcacctcgtttcagtgtcctgattccttgattactgtgaacactgaacatcttttatacctttatgatatttctatgtttgtgacttcattggaatgttgatctatttcatatagattgtttttaatatacaatgtattagcccctgtcatatgttgcacactttttaacctatttgtcagctgtcttttggtctgtggtaggagttatacagtattttaaatggtttatgtagtcacatatacctgtctttcattttgatgcttgttctgaaatggagtcctggcttcaccatggaaggtgggacatatgggacagccatgtccttgtgggcatggtggtgtggctgcgtgcccacgacgaggggctggactaaagtgctcactggcaccttgcttggtgcatggggccatgctcagtttaatattattaacagtttctaccttcact

SEQ ID NO: 1375 - protein, 800 aa, Homo sapien
MTAREHSPRHGARARAMQRASTIDVAADMLGLSLAGNIQDPDEPILEFSLACSELHTPSLDRKPNSFVAVSVTTPPQAFWTKHAQTEIIEGTNNPIFLSSIAFFQDSLINQMTQVKLSVYDVKDRSQGTMYLLGSGTFIVKDLLQDRHHRLHLTLRSAESDRVGNITVIGWQMEEKSDQRPPVTRSVDTVNGRMVLPVDESLTEALGIRSKYASLRKDTLLKSVFGGAICRMVPVSNHDGNHLRILEQMAESVLSLHVPRQFVKLLLEEDAARVCELEELGELSPCWESLRRQIVTQYQTIILTYQENLTDLHQYRGPSFKASSLKADKKLEFVPTNLHIQRMRVQDDGGSDQNYDIVTIGAPAAHCQGFKSGGLRKKLHKFEETKKHTSSGCQSIIYIPQDVVRAKEIIAQINTLKTQVSYYAERLSRAAKDRSATGLERTLAILADKTRQLVTVCDCKLLANSIHGLNAARPDYIASKASPTSTEEEQVMLRNDPGHPHGPGGQGETAESSLQVDWHEEEWEKVWLNVDKSLECIIQRVNKLLQKEQLHGEGCEDVFPCAGSCTSKKGNPDSHAYWIRPEDPFCDVPSSPCPSTMPSTACHPHLTTHCSPPPEESSPGEWSEALYPLLTTLTDCVAMMSDKAKKAMVFLLMQDSAPTIATYLSLQYRRDVVFCQTLTALICGFIIKLRNCLHDDGFLRQLYTIGLLAQFESLLSTYGEELAMLEDMSLGIMDLRNVTFKVTQATSSASADMLPVITGNRDGFNVRVPLPGPLFDALPREIQSGMLLRVQPVLFNCGHQ

SEQ ID NO: 1376 - DNA, 5065 bp, Homo sapien
cgctcgatcttgggacccaccgctgccctcagctccgagtccagggcgagtgcagagcacagcgggcggaggaccccgggcgcgggcgcggacggcacgcggggcatgaacctggagggcggcggccgaggcggagagttcggcatgagcgcggtgagctgcggcaacgggaagctccgccagtggctgatcgaccagatcgacagcggcaagtaccccgggctggtgtgggagaacgaggagaagagcatcttccgcatcccctggaagcacgcgggcaagcaggactacaaccgcgaggaggacgccgcgctcttcaaggcttgggcactgtttaaaggaaagttccgagaaggcatcgacaagccggaccctcccacctggaagacgcgcctgcggtgcgctttgaacaagagcaatgactttgaggaactggttgagcggagccagctggacatctcagacccgtacaaagtgtacaggattgttcctgagggagccaaaaaaggagccaagcagctcaccctggaggacccgcagatgtccatgagccacccctacaccatgacaacgccttacccttcgctcccagcccagcaggttcacaactacatgatgccacccctcgaccgaagctggagggactacgtcccggatcagccacacccggaaatcccgtaccaatgtcccatgacgtttggaccccgcggccaccactggcaaggcccagcttgtgaaaatggttgccaggtgacaggaaccttttatgcttgtgccccacctgagtcccaggctcccggagtccccacagagccaagcataaggtctgccgaagccttggcgttctcagactgccggctgcacatctgcctgtactaccgggaaatcctcgtgaaggagctgaccacgtccagccccgagggctgccggatctcccatggacatacgtatgacgccagcaacctggaccaggtcctgttcccctacccagaggacaatggccacaggaaaaacattgagaacctgctgagccacctggagaggggcgtggtcctctggatggcccccgacgggctctatgcgaaaagactgtgccagagcacgatctactgggacgggcccctggcgctgtgcaacgaccggcccaacaaactggagagagaccagacctgcaagctctttgacacacagcagttcttgtcagagctgcaagcgtttgctcaccacggccgctccctgccaagattccaggtgactctatgctttggagaggagtttccagaccctcagaggcaaagaaagctcatcacagctcacgtagaacctctgctagccagacaactatattattttgctcaacaaaacagtggacatttcctgaggggctacgatttaccagaacacatcagcaatccagaagattaccacagatctatccgccattcctctattcaagaatgaaaaatgtcaagatgagtggttttctttttccttttttttttttttttttttgatacggagatacggggtcttgctctgtctcccaggctggagtgcagtgacacaatctcagctcactgtgacctccgcctcctgggttcaagagactctcctgcctcagcctccctggtagctgggattacaggtgtgagccactgcacccacccaagacaagtgattttcattgtaaatatttgactttagtgaaagcgtccaattgactgccctcttactgttttgaggaactcagaagtggagatttcagttcagcggttgaggagaattgcggcgagacaagcatggaaaatcagtgacatctgattggcagatgagcttatttcaaaaggaagggtggctttgcattttcttgtgttctgtagactgccatcattgatgatcactgtgaaaattgaccaagtgatgtgtttacatttactgaaatgcgctctttaatttgttgtagattaggtcttgctggaagacagagaaaacttgcctttcagtattgacactgactagagtgatgactgcttgtaggtatgtctgtgccatttctcagggaagtaagatgtaaattgaagaagcctcacacgtaaaagaaatgtattaatgtatgtaggagctgcagttcttgtggaagacacttgctgagtgaaggaaatgaatctttgactgaagccgtgcctgtagccttggggaggcccatcccccacctgccagcggtttcctggtgtgggtccctctgccccaccctccttcccattggctttctctccttggcctttcctggaagccagttagtaaacttcctattttcttgagtcaaaaaacatgagcgctactcttggatgggacatttttgtctgtcctacaatctagtaatgtctaagtaatggttaagttttcttgtttctgcatctttttgaccctcattctttagagatgctaaaattcttcgcataaagaagaagaaattaaggaacataaatcttaatacttgaactgttgcccttctgtccaagtacttaactatctgttcccttcctctgtgccacgctcctctgtttgtttggctgtccagcgatcagccatggcgacactaaaggaggaggagccggggactcccaggctggagagcactgccaggacccaccactggaagcaggatggagctgactacggaactgcacactcagtgggctgtttctgcttatttcatctgttctatgcttcctcgtgccaattatagtttgacagggccttaaaattacttggctttttccaaatgcttctatttatagaaatcccaaagacctccacttgcttaagtatacctatcacttacatttttgtggttttgagaaagtacagcagtagactggggcgtcacctccaggccgtttctcatactacaggatatttactattactcccaggattcagcagaagattgcgttagctctcaaatgtgtgttcctgcttttctaatggatattttaaattcattcaacaagcacctagtaagtgcctgctgtatccctacattacacagttcagcctttatcaagcttagtgagcagtgagcactgaaacattattttttaatgtttaaaaagtttctaatattaaagtcagaatattaatacaattaatattaatattaactacagaaaagacaaacagtagagaacagcaaaaaaataaaaaggatctccttttttcccagcccaaattctcctctctaaaagtgtccacaagaaggggtgtttattcttccaacacatttcacttttctgtaaatatacataaacttaaaaagaaaacctcatggagtcatcttgcacacacttttcatgcagtgctctttgtagctaaacagtgaagatttacctcgttctgctcagaggccttgctgtggagctccactgccatgtacccagtagggtttgacatttcattagccatgcaacatggatatgtattgggcagcagactgtgtttcgtgaactgcagtgatgtatacatcttatagatgcaaagtattttggggtatattatcctaagggaagataaagatgatattaagaactgctgtttcacggggcccttacctgtgaccctctttgctgaagaatatttaaccccacacagcacttcaaagaagctgtcttggaagtctgtctcaggagcaccctgtcttcttaattctccaagcggatgctccatttcaattgctttgtgacttcttcttctttgtttttttaaatattatgctgctttaacagtggagctgaattttctggaaaatgcttcttggctggggccactacctcctttcctatctttacatctatgtgtatgttgactttttaaaattctgagtgatccagggtatgacctagggaatgaactagctatggaaataactcagggttaggaatcctagcacttgtctcaggactctgaaaaggaacggcttcctcattccttgtcttgataaagtggaattggcaaactagaatttagtttgtactcagtggacagtgctgttgaagatttgaggacttgttaaagagcactgggtcatatggaaaaaatgtatgtgtctccccaggtgcattttcttggtttatgtcttgttcttgagattttgtatatttaggaaaacctcaagcagtaattaatatctcctggaacactatagagaaccaagtgaccgactcatttacaactgaaacctaggaagcccctgagtcctgagcgaaaacaggagagttagtcgccctacagaaaacccagctagactattgggtatgaactaaaaagagactgtgccatggtgagaaaaatgtaaaatcctacagtggaatgagcagcccttacagtgttgttaccaccaagggcaggtaggtattagtgtttgaaaaagctggtctttgagcgagggcataaatacagctagccccaggggtggaacaactgtgggagtcttgggtactcgcacctcttggctttgttgatgctccgccaggaaggccacttgtgtgtgcgtgtcagttacttttttagtaacaattcagatccagtgtaaacttccgttcattgctctccagtcacatgcccccacttccccacaggtgaaagtttttctgaagtgttgggattggttaaggtctttatttgtattacgtatctccccaagtcctctgtggccagctgcatctgtctgaatggtgcgtgaaggctctcagaccttacacaccattttgtaagttatgttttacatgccccgtttttgagactgatctcgatgcaggtggatctccttgagatcctgatagcctgttacaggaatgaagtaaaggtcagttttttttgtattgattttcacagctttgaggaacatgcataagaaatgtagctgaagtagaggggacgtgagagaagggccaggccggcaggccaaccctcctccaatggaaattcccgtgttgcttcaaactgagacagatgggacttaacaggcaatggggtccacttccccctcttcagcatcccccgtacc

SEQ ID NO: 1377 - protein, 451 aa, Homo sapien
MNLEGGGRGGEFGMSAVSCGNGKLRQWLIDQIDSGKYPGLVWENEEKSIFRIPWKHAGKQDYNREEDAALFKAWALFKGKFREGIDKPDPPTWKTRLRCALNKSNDFEELVERSQLDISDPYKVYRIVPEGAKKGAKQLTLEDPQMSMSHPYTMTTPYPSLPAQQVHNYMMPPLDRSWRDYVPDQPHPEIPYQCPMTFGPRGHHWQGPACENGCQVTGTFYACAPPESQAPGVPTEPSIRSAEALAFSDCRLHICLYYREILVKELTTSSPEGCRISHGHTYDASNLDQVLFPYPEDNGHRKNIENLLSHLERGVVLWMAPDGLYAKRLCQSTIYWDGPLALCNDRPNKLERDQTCKLFDTQQFLSELQAFAHHGRSLPRFQVTLCFGEEFPDPQRQRKLITAHVEPLLARQLYYFAQQNSGHFLRGYDLPEHISNPEDYHRSIRHSSIQE

SEQ ID NO: 1378 - DNA, 734 bp, Homo sapien
gaaagtcagtgagcaaatcgcggaccaccggggctgccagctcgcctgactcccggcctcttgcgctcctaggggcggagaagggtgcgggctcttcgccctttgtgtcctccttctttcactaacttctggactttccagctcttccgaagttcgttcttgcgcaaagcccaaaggctggaaaaccgtccacgatgaccagcatgactcagtctctgcgggaggtgataaaggccatgaccaaggctcgcaattttgagagagttttgggaaagattactcttgtctctgctgctcctgggaaagtgatttgtgaaatgaaagtagaagaagagcataccaatgcaataggcactctccacggcggtttgacagccacgttagtagataacatatcaacaatggctctgctatgcacggaaaggggagcacccggagtcagtgtcgatatgaacataacgtacatgtcacctgcaaaattaggagaagatatagtgattacagcacatgttctgaagcaaggaaaaacacttgcatttacctctgtggatctgaccaacaaggccacaggaaaattaatagcacaaggaagacacacaaaacacctgggaaactgagagaacagcagaatgacctaaagaaacccaacaatgaatatcaagtatagatttgactcaaacaattgtaatttttgaaataaactagcaaaaccagaaaaaaaaaaaaaaaaaaaa

SEQ ID NO: 1379 - protein, 140 aa, Homo sapien
MTSMTQSLREVIKAMTKARNFERVLGKITLVSAAPGKVICEMKVEEEHTNAIGTLHGGLTATLVDNISTMALLCTERGAPGVSVDMNITYMSPAKLGEDIVITAHVLKQGKTLAFTSVDLTNKATGKLIAQGRHTKHLGN

SEQ ID NO: 1380 - DNA, 2930 bp, Homo sapien
gaattccggtttcttcctaaaaaatgtctgatggccgctttctcggtcggcaccgccatgaatgccagcagttactctgcagagatgacggagcccaagtcggtgtgtgtctcggtggatgaggtggtgtccagcaacatggaggccactgagacggacctgctgaatggacatctgaaaaaagtagataataacctcacggaagcccagcgcttctcctccttgcctcggagggcagctgtgaacattgaattcagggacctttcctattcggttcctgaaggaccctggtggaggaagaaaggatacaagaccctcctgaaaggaatttccgggaagttcaatagtggtgagttggtggccattatgggtccttccggggccgggaagtccacgctgatgaacatcctggctggatacagggagacgggcatgaagggggccgtcctcatcaacggcctgccccgggacctgcgctgcttccggaaggtgtcctgctacatcatgcaggatgacatgctgctgccgcatctcactgtgcaggaggccatgatggtgtcggcacatctgaagcttcaggagaaggatgaaggcagaagggaaatggtcaaggagatactgacagcgctgggcttgctgtcttgcgccaacacgcggaccgggagcctgtcaggtggtcagcgcaagcgcctggccatcgcgctggagctggtgaacaaccctccagtcatgttcttcgatgagcccaccagcggcctggacagcgcctcctgcttccaggtggtctcgctgatgaaagggctcgctcaagggggtcgctccatcatttgcaccatccaccagcccagcgccaaactcttcgagctgttcgaccagctttacgtcctgagtcaaggacaatgtgtgtaccggggaaaagtctgcaatcttgtgccatatttgagggatttgggtctgaactgcccaacctaccacaacccagcagattttgtcatggaggttgcatccggcgagtacggtgatcagaacagtcggctggtgagagcggttcgggagggcatgtgtgactcagaccacaagagagacctcgggggtgatgccgaggtgaacccttttctttggcaccgcccctctgaagaggtaaagcagacaaaacgattaaaggggttgagaaaggactcctcgtccatggaaggctgccacagcttctctgccagctgcctcacgcagttctgcatcctcttcaagaggaccttcctcagcatcatgagggactcggtcctgacacacctgcgcatcacctcgcacattgggatcggcctcctcattggcctgctgtacttggggatcgggaacgaaaccaagaaggtcttgagcaactccggcttcctcttcttctccatgctgttcctcatgttcgcggccctcatgcctactgttctgacatttcccctggagatgggagtctttcttcgggaacacctgaactactggtacagcctgaaggcctactacctggccaagaccatggcagacgtgccctttcagatcatgttcccagtggcctactgcagcatcgtgtactggatgacgtcgcagccgtccgacgccgtgcgctttgtgctgtttgccgcgctgggcaccatgacctccctggtggcacagtccctgggcctgctgatcggagccgcctccacgtccctgcaggtggccactttcgtgggcccagtgacagccatcccggtgctcctgttctcggggttcttcgtcagcttcgacaccatccccacgtacctacagtggatgtcctacatctcctatgtcaggtatgggttcgaaggggtcatcctctccatctatggcttagaccgggaagatctgcactgtgacatcgacgagacgtgccacttccagaagtcggaggccatcctgcgggagctggacgtggaaaatgccaagctgtacctggacttcatcgtactcgggattttcttcatctccctccgcctcattgcctatttggtcctcaggtacaaaatccgggcagagaggtaaaacacctgaatgccaggaaacaggaagattagacactgtggccgagggcacgtctagaatcgaggaggcaagcctgtgcccgaccgacgacacagagactcttctgatccaacccctagaaccgcgttgggtttgtgggtgtctcgtgctcagccactctgcccagctgggttggatcttctctccattcccctttctagctttaactaggaagatgtaggcagattggtggttttttttttttttttaacatacagaattttaaataccacaactggggcagaatttaaagctgcaacacagctggtgatgagaggcttcctcagtccagtcgctccttagcaccaggcaccgtgggtcctggatggggaactgcaagcagcctctcagctgatggctgcacagtcagatgtctggtggcagagagtccgagcatggagcgattccattttatgactgttgtttttcacattttcatctttctaaggtgtgtctcttttccaatgagaagtcatttttgcaagccaaaagtcgatcaatcgcattcattttaagaaattatacctttttagtacttgctgaagaatgattcagggtaaatcacatactttgtttagagaggcgaggggtttaacccgagtcacccagctggtctcatacatagacagcacttgtgaaggattgaatgcaggttccaggtggagggaagacgtggacaccatctccactgagccatgcagacatttttaaaagctatacacaaaattgtgagaagacattggccaactctttcaaagtctttctttttccacgtgcttcttattttaagcgaaatatattgtttgtttcttcctaaaaaaaaaaaaaaaaaaaaa

SEQ ID NO: 1381 - protein, 674 aa, Homo sapien
MAAFSVGTAMNASSYSAEMTEPKSVCVSVDEVVSSNMEATETDLLNGHLKKVDNNLTEAQRFSSLPRRAAVNIEFRDLSYSVPEGPWWRKKGYKTLLKGISGKFNSGELVAIMGPSGAGKSTLMNILAGYRETGMKGAVLINGLPRDLRCFRKVSCYIMQDDMLLPHLTVQEAMMVSAHLKLQEKDEGRREMVKEILTALGLLSCANTRTGSLSGGQRKRLAIALELVNNPPVMFFDEPTSGLDSASCFQVVSLMKGLAQGGRSIICTIHQPSAKLFELFDQLYVLSQGQCVYRGKVCNLVPYLRDLGLNCPTYHNPADFVMEVASGEYGDQNSRLVRAVREGMCDSDHKRDLGGDAEVNPFLWHRPSEEVKQTKRLKGLRKDSSSMEGCHSFSASCLTQFCILFKRTFLSIMRDSVLTHLRITSHIGIGLLIGLLYLGIGNETKKVLSNSGFLFFSMLFLMFAALMPTVLTFPLEMGVFLREHLNYWYSLKAYYLAKTMADVPFQIMFPVAYCSIVYWMTSQPSDAVRFVLFAALGTMTSLVAQSLGLLIGAASTSLQVATFVGPVTAIPVLLFSGFFVSFDTIPTYLQWMSYISYVRYGFEGVILSIYGLDREDLHCDIDETCHFQKSEAILRELDVENAKLYLDFIVLGIFFISLRLIAYLVLRYKIRAER

SEQ ID NO: 1382 - DNA, 4943 bp, Homo sapien
attgataagggtccgtgtcgactttgaggtcaggacagaaatactgaatgactttacacttaggaaaaaatagctaaataattaagatgcaggctgtagtgttcaaaccaatagagcagggaaagggaaatgtagatactttattaattcagtggaagataggaaagttagaagcaaaggaggctgggcacagtggctcatgcctgtaatcctagcactttgggaggccaagacaggtggatcacctgaggttaggggtttcaccatgttggccaggatggtcttgatctcctaacctcttgatctgccctccttggcctcccaaagtgctgcgattacaggcgtgagccaccgcactggcctaatttctcttttctctgcattgaactagaaaaacatcgttctctttttcgtaatgttccatagttacaaaagctataacataaggtctttttcttcattatgttttctgacatatctgaaaataagcagtgatcccaggtagataatcatattaaccataagagaccaacgtttgtgatatttattacatgcttttttcagagatggaaaataatgtcctgcaagatgaggattgaacagttaaaacaaacaatatgtaaaggaaatgaagaaatggagaaaaattctgaaggccttctcaaaaccaaggaaaagaatcagaagctttacagtcgagcacaacggcaccaagagaaaaaggagaagattcagaggcataatcgcaaacttggtgacctggtagaaaaaaagaccattgacttaagaagtcattatgagcgtctggcaaatcttcgacgatcccatatattagagctcacctctgtcatttttccaatcgaggaagtaaagacgggtgtgagagaccccgcagatgtgtcttcagagagtgacagtgccatgacctccagcactgtgagcaagcttgctgaagcccggaggacaacttacctctcaggacgatgggtctgtgacgatcacaacggagacaccagcattagcattacagggccttggattagcctccctaacaatggggactactctgcctactacagctgggtggaggagaagaaaacaacccaggggcctgacatggagcagagtaaccctgcctacaccatcagtgctgcgctgtgctatgcaactcagctggtcaacattctgtctcatatacttgatgtaaatcttcccaaaaagctctgcaacagtgaattttgtggcgaaaatctaagcaagcagaaatttactcgagcagtgaagaaactgaatgcaaatattctttacctttgtttttctcagcatgtaaatttagatcaattacaaccactgcataccctcaggaatctaatgtacctggtcagtccaagctctgaacacctaggcaggtcagggccctttgaagtacgagcagaccttgaggagtccatggaatttgtggatcccggagttgctggagaatcagatgagagcggagatgagcgcgtcagcgatgaagaaaccgacctgggcacagactgggagaacttgcctagtccccggttttgtgatatcccttcccagtctgtggaagtctcccagagtcagagcacccaggcgtccccacccatcgcgagcagcagtgcaggtgggatgatctcctctgcagcagcctcggtgacctcctggtttaaagcttacactggacaccgttaacgagcatggaccaaaacataccaaatctgcatcaagaaagttcttctcccactacactctagtaaacattttctgtttaagttaagatagtgtctggaacaaagaggttaaagtgttgttttgttttgtctttttaagcagggagacaaacatttctatttgccaagtggcctgtgatggtgaccaacatgcttatgataattaagagaacaggggtcgaaggtctttctacccagaccagtgctggtggaaggaggacctgtgcgtgtggccagttctgccaaggaagcagttgatttgggttccctctgggcccgggccaccgggcccacagatatgggtcagtgtgctggtccttgcggtgctgagactgttcctgacactttaagttttagaggttggttgaatcacaagaggtgattcttgattattaggacatgaaagataaaagctctttaataagagtttttctgccattgttttttgtatgagaaccagcaggcaatttaaaatttctaatttggtcctttgattttgtttgggaggggtgagttacacgtattttattcatgctgctctgtcgtagtttgtcagacattcctgtttttctttcccccacacaccaaagaaaatgaaagtctttttctttaggacccacatccataaatggaagaaatcctggctgcaataatgtctagagagtttttaactattttcttgtattctgaggggaattaagcttattcttacctagttgaattcctgccatccacactatgagcattttgaaattgaacttatattttctgggtgaaaataagtcatgaaggtcattcccttatgtaagctcaatgcctgcctgggcacaggggaaaagccacttagttaagtggcctctggtcattcttgtggtgtccactttctttctatgggattgagtaggtggcaggtgttttcaggggaaaccatcctacttgtttccccgaactctttgttgctctgaggacacagctttgctcagaaatgcagcgcagatccttacggctgatgctactctgctctgttctggggaaagcacaatataaagaaagaatttcccagccgggcgcggtggctcacgcctgtaatcccggcactttgggaggccgaggcaggcggatcacttgaggtcaggagtttgagagcagcctggctaacatggtgaaaccctgtttctgctagaagtgcagaaaattaccgggtgtggtggcgcacgcctgtaatcccagctactcgggaggctgcggcgggagaatcgcttgaaccgggaggcggaggttgcagtgagccgagattgtgccattgcactccagcctgggcaacaagagcgaggctccgtctcaaaaaaaaaaagaatttccctcagcaggagatcattttcagctcacgtgtcttgtcattcttttagtgacaatcttacaagaaaactataatgagagaggcattatgtacaaatatgtaagtagtttatttttaataactgcaaaaatatcctatgtaacaactaccaaaagaaatcctatgaaagagtcctaacaggcattattaccatatcttatgtgattggcatgatagcacctctgataaatcattcagaggtttgccatgccccagcttcttttctcatcataataattgtagttgatactttgcctccaagtccgaggtgctatatagcttttgctaatggtatatttggtgttttgtatagttttgggtagagttgcagaacggagtttatttctatccggtagtcacaaattccttggctctatgaattttccatgaaaggaggaagtaggcttttctcgttgtgggtggtcttttttttttttggagacggagtctcgctcagctgcccaggctggagtgtggtggcgccatctccgctcgctgcaaccaccatctcctgggttcaggcgattcttccgtctcagcctcccgagtagctgggattataggcacctgccatcatgcccagctaatttttgtattttggtagagacgggggttttcaccatgttggccaggctggtcttgaactcctggcttcgggtgatccgcttgccttggcctcctagggtgctgggattgcaggcctgagccaccgcgcccggccccttatgggttcttctacactgctgggatctctgttttaagtgctcagcttcatgattgattgctgggcttccattttcccatccagttctggagttcgtagagagtgaagatggtagacttgaacagataaataaacttaacgatcttgtaagagttgtctagctacttaaaaccctcagaagtaagagcttagtctcacgagttgtaagagtgggatttggagcttggtggtggagactgacttcagctgagagatgcacaacagtcatggttttcttaagcctcttatgaaaccatgaatgagagatgaagctaaagaatagaatccagagatcacaaactcatctagagtacttccacaaaatttacaaagatgtgggaactttatggataggatatattttgtttgttgttgttaatatcaactagaggcactttacatagggttaagtgatcgaacccttttgtggttttgaacaccaacatactggcttacactgctgaaatattttgggtttcattattttgcactggatccaccctgtaaatactcttaagtatacatttcaaccactgttttttctactctttttgctgctcattaaaatctttcatgtaggtgccagaaccatatgtaaacagctttttaaaaaattgaagctggtattttgtttaaacaaaaagccatagaacttggtcatgttttccattttaaaatgatttactgaaacaaagtaatactaataaaaacccacaggcaccaaacaggctgcttaaaatggtctgttaaagacattttttggttatggaatataagaaaagttttgcacatctgtaagggggaaaaacagtatatcaccattgggtagagtggacgggactcatgtaaggactcaatttggggaagagcattcagtggcatgctgttagaggactagtgtccgagaatctcctcacagtatcatgttgcaggaattccccattgctctgcaacttccaaaccagtttgagtcatacaaatgttttctaaacttttattgtattactgcaataaatcttttaacagt

SEQ ID NO: 1383 - protein, 379 aa, Homo sapien
MSCKMRIEQLKQTICKGNEEMEKNSEGLLKTKEKNQKLYSRAQRHQEKKEKIQRHNRKLGDLVEKKTIDLRSHYERLANLRRSHILELTSVIFPIEEVKTGVRDPADVSSESDSAMTSSTVSKLAEARRTTYLSGRWVCDDHNGDTSISITGPWISLPNNGDYSAYYSWVEEKKTTQGPDMEQSNPAYTISAALCYATQLVNILSHILDVNLPKKLCNSEFCGENLSKQKFTRAVKKLNANILYLCFSQHVNLDQLQPLHTLRNLMYLVSPSSEHLGRSGPFEVRADLEESMEFVDPGVAGESDESGDERVSDEETDLGTDWENLPSPRFCDIPSQSVEVSQSQSTQASPPIASSSAGGMISSAAASVTSWFKAYTGHR

SEQ ID NO: 1384 - DNA, 3319 bp, Homo sapien; identical to SEQ ID NO: 29

SEQ ID NO: 1385 - protein, 896 aa, Homo sapien; identical to SEQ ID NO: 30

SEQ ID NO: 1386 - DNA, 2727 bp, Homo sapien
ggggattttgggcgccgaccagacgcggcattttcggaaaatagcgccctgtgcagctgaagcgctttgtgtgtagcggggccgcgtcagcccggccgggtacgaggcgcctcgggtccccgcaccacctcctgctgccttcccgtcgccgctcccgaagcttttccagatgtccctggtagatttgggaaagaagcttttagaagcggcacgagcaggtcaagatgatgaagttcgtattttgatggcaaatggagctccctttactacagactggctgggaacttctccacttcatctagcagcacagtatggtcattattccaccacagaggtactgctgcgagctggtgtgagcagagatgccagaaccaaagtggaccgaacaccattacatatggcagcttctgagggccatgccagcatagtagaggttttacttaagcatggtgctgatgtcaatgcaaaggacatgttaaagatgacagctctccattgggccacagaacacaatcatcaagaggtggtggaacttttaatcaaatatggtgctgatgtacacacgcaaagtaaattttgtaaaactgcatttgatatttcaatagacaatggaaatgaagatttagcagagatattacagattgctatgcagaaccaaatcaacacaaacccagagagtcctgacactgtgacaatacatgctgcaacaccacagtttatcattggacctggaggggtggtgaacctaacaggtctggtatcttcagaaaattcatccaaggcaacagatgaaacgggtgtatctgctgttcagtttggaaactcttctacatcagtattagctacattagctgccttagctgaagcatctgctccattgtccaattcttcagaaactccagtagtggccacagaagaagtagttactgcagaatctgtggatggtgccattcagcaagtagttagttcagggggtcagcaagtcatcacaatagttacagatggaattcagcttggaaatttgcactctattccaaccagtggaattggtcagcccatcattgtgaccatgccagatggacaacaagtattaacagtaccagcaacagacattgctgaagaaactgttataagtgaagaaccaccagctaagagacaatgtatcgaaataattgaaaaccgggtggaatctgcagaaatagaagagagagaagctcttcagaaacagctggatgaagcaaatcgagaagcacaaaaatatcgacagcagctcctaaagaaagaacaggaagcagaggcctacagacagaagttggaagctatgactcgtcttcagactaataaagaagctgtttaattgaaatgaacatgtagtttgattttacttttggtcaagaaagaatacaatcttgaactgtacacaacaaaggtacagccatgggaatacagaatgatagaagagactacagatggataattggacttaagccatgagctctgagttcttgtaacataaaactttactttagaagttgtgaaatgtatttaaaactgaattctgtaaatagtttttttttttttacagttccaaatgagttgataaagattgttgaagagatccaaaaccagaataagccactgtttttgtgaattctttttgattttagtacaaaccttaatttctcagaaacggaacagttttaagggtgatcgttgttggttaggccaaatgttgtgtaataattatggtggactgatgctggaattactcctgtaggtataaacctctgtatgaagagaagatttctcccaggaaatctttgtacagctttaagttgtgtcagattctctgaaaacattttttagaaagcaaaatttttatatttgttcaatttcagctatacccaagtagatttacatgtatatgaagcaaatatttttaaaaatttctgtttgtacatattctgcatgttttataatttcaaaatgcatcacttacataggtatttctcccacagaaatgatgaaagtgaccagaaaaaaacaaaaacaaaacccctttactctgtaggtcattgaaacgaagtaagctggcagctggttttattggaatgacagtgttctcggaaggagcagcctacaagataacttgaatttgccaattctgcaaaatctgtgcttttttgaaaatttaagagtggggacgtgaaactgtattctgtgccttccatcatgatttccacatgaaagcactttaaggcactgattttaagataatgtttttggaaaacccaatgcatatgggtttctgaaatattttatggacttatttctccccaggaaacgattcttacggaaaaaaattgcttttgtatgtagaacaggaactttttgtattacagtgatgcaatagacatgtctaatgtaacttctacttttccttttgaaagctcagtgtctgtgctatgacttgctctcatcacaatattgttgaattccacaatgtatggacattaaacactggcagactgttcactttttctttttttttttttggtaaaatattacttcaaacccctttttcttgctttatttttcagtgttttattgctttatgaactgtttaaccctgaaatccctctaggttatctatactgtataaaaaagcaattacccttaaaactgtactctggcctacttttctattttgcaattaaatatcttttt

SEQ ID NO: 1387 - protein, 395 aa, Homo sapien
MSLVDLGKKLLEAARAGQDDEVRILMANGAPFTTDWLGTSPLHLAAQYGHYSTTEVLLRAGVSRDARTKVDRTPLHMAASEGHASIVEVLLKHGADVNAKDMLKMTALHWATEHNHQEVVELLIKYGADVHTQSKFCKTAFDISIDNGNEDLAEILQIAMQNQINTNPESPDTVTIHAATPQFIIGPGGVVNLTGLVSSENSSKATDETGVSAVQFGNSSTSVLATLAALAEASAPLSNSSETPVVATEEVVTAESVDGAIQQVVSSGGQQVITIVTDGIQLGNLHSIPTSGIGQPIIVTMPDGQQVLTVPATDIAEETVISEEPPAKRQCIEIIENRVESAEIEEREALQKQLDEANREAQKYRQQLLKKEQEAEAYRQKLEAMTRLQTNKEAV

SEQ ID NO: 1388 - DNA, 3427 bp, Homo sapien
gctcgcgcacggctccgcggtcccttttgcctgtccagccggccgcctgtccctgctccctccctccgtgagtgtccgggttcccttcgcccagctctcccacccctacccgaccccggcgcccgggctcccagagggaactgcacttcggcagagttgaatgaatgaagagagacgcggagaactcctaaggaggagattggacaggctggactccccattgcttttctaaaaatcttggaaactttgtccttcattgaattacgacactgtccacctttaatttcctcgaaaacgcctgtaactcggctgaagccatgccttgtgttcaggcgcagtatgggtcctcgcctcaaggagccagccccgcttctcagagctacagttaccactcttcgggagaatacagctccgatttcttaactccagagtttgtcaagtttagcatggacctcaccaacactgaaatcactgccaccacttctctccccagcttcagtacctttatggacaactacagcacaggctacgacgtcaagccaccttgcttgtaccaaatgcccctgtccggacagcagtcctccattaaggtagaagacattcagatgcacaactaccagcaacacagccacctgcccccccagtctgaggagatgatgccgcactccgggtcggtttactacaagccctcctcgcccccgacgcccaccaccccgggcttccaggtgcagcacagccccatgtgggacgacccgggatctctccacaacttccaccagaactacgtggccactacgcacatgatcgagcagaggaaaacgccagtctcccgcctctccctcttctcctttaagcaatcgccccctggcaccccggtgtctagttgccagatgcgcttcgacgggcccctgcacgtccccatgaacccggagcccgccggcagccaccacgtggtggacgggcagaccttcgctgtgcccaaccccattcgcaagcccgcgtccatgggcttcccgggcctgcagatcggccacgcgtctcagctgctcgacacgcaggtgccctcaccgccgtcgcggggctccccctccaacgaggggctgtgcgctgtgtgtggggacaacgcggcctgccaacactacggcgtgcgcacctgtgagggctgcaaaggcttctttaagcgcacagtgcaaaaaaatgcaaaatacgtgtgtttagcaaataaaaactgcccagtggacaagcgtcgccggaatcgctgtcagtactgccgatttcagaagtgcctggctgttgggatggtcaaagaagtggttcgcacagacagtttaaaaggccggagaggtcgtttgccctcgaaaccgaagagcccacaggagccctctcccccttcgcccccggtgagtctgatcagtgccctcgtcagggcccatgtcgactccaacccggctatgaccagcctggactattccaggttccaggcgaaccctgactatcaaatgagtggagatgacacccagcatatccagcaattctatgatctcctgactggctccatggagatcatccggggctgggcagagaagatccctggcttcgcagacctgcccaaagccgaccaagacctgctttttgaatcagctttcttagaactgtttgtccttcgattagcatacaggtccaacccagtggagggtaaactcatcttttgcaatggggtggtcttgcacaggttgcaatgcgttcgtggctttggggaatggattgattccattgttgaattctcctccaacttgcagaatatgaacatcgacatttctgccttctcctgcattgctgccctggctatggtcacagagagacacgggctcaaggaacccaagagagtggaagaactgcaaaacaagattgtaaattgtctcaaagaccacgtgactttcaacaatggggggttgaaccgccccaattatttgtccaaactgttggggaagctcccagaacttcgtaccctttgcacacaggggctacagcgcattttctacctgaaattggaagacttggtgccaccgccagcaataattgacaaacttttcctggacactttacctttctaagacctcctcccaagcacttcaaaggaactggaatgataatggaaactgtcaagagggggcaagtcacatgggcagagatagccgtgtgagcagtctcagctcaagctgccccccatttctgtaaccctcctagcccccttgatccctaaagaaaacaaacaaacaaacaaaaactgttgctatttcctaacctgcaggcagaacctgaaagggcattttggctccggggcatcctggatttagaacatggactacacacaatacagtggtataaactttttattctcagtttaaaaatcagtttgttgttcagaagaaagattgctataaggtataatgggaaatgtttggccatgcttggttgttgcagttcagacaaatgtaacacacacacacatacacacacacacacacacagagacacatcttaaggggacccacaagtattgccctttaacaagacttcaaagttttctgctgtaaagaaagctgtaatatatagtaaaactaaatgttgcgtgggtggcatgagttgaagaaggcaaaggcttgtaaatttacccaatgcagtttggctttttaaattattttgtgcctatttatgaataaatattacaaattctaaaagataagtgtgtttgcaaaaaaaaagaaaataaatacataaaaaagggacaagcatgttgattctaggttgaaaatgttataggcacttgctacttcagtaatgtctatattatataaatagtatttcagacactatgtagtctgttagattttataaagattggtagttatctgagcttaaacattttctcaattgtaaaataggtgggcacaagtattacacatcagaaaatcctgacaaaagggacacatagtgtttgtaacaccgtccaacattccttgtttgtaagtgttgtatgtaccgttgatgttgataaaaagaaagtttatatcttgattattttgttgtctaaagctaaacaaaacttgcatgcagcagcttttgactgtttccagagtgcttataatatacataactccctggaaataactgagcactttgaattttttttatgtctaaaattgtcagttaatttattattttgtttgagtaagaattttaatattgccatattctgtagtatttttctttgtatatttctagtatggcacatgatatgagtcactgcctttttttctatggtgtatgacagttagagatgctgattttttttctgataaattctttctttgagaaagacaattttaatgtttacaacaataaaccatgtaaatgaaaaaaaaaa

SEQ ID NO: 1389 - protein, 598 aa, Homo sapien
MPCVQAQYGSSPQGASPASQSYSYHSSGEYSSDFLTPEFVKFSMDLTNTEITATTSLPSFSTFMDNYSTGYDVKPPCLYQMPLSGQQSSIKVEDIQMHNYQQHSHLPPQSEEMMPHSGSVYYKPSSPPTPTTPGFQVQHSPMWDDPGSLHNFHQNYVATTHMIEQRKTPVSRLSLFSFKQSPPGTPVSSCQMRFDGPLHVPMNPEPAGSHHVVDGQTFAVPNPIRKPASMGFPGLQIGHASQLLDTQVPSPPSRGSPSNEGLCAVCGDNAACQHYGVRTCEGCKGFFKRTVQKNAKYVCLANKNCPVDKRRRNRCQYCRFQKCLAVGMVKEVVRTDSLKGRRGRLPSKPKSPQEPSPPSPPVSLISALVRAHVDSNPAMTSLDYSRFQANPDYQMSGDDTQHIQQFYDLLTGSMEIIRGWAEKIPGFADLPKADQDLLFESAFLELFVLRLAYRSNPVEGKLIFCNGVVLHRLQCVRGFGEWIDSIVEFSSNLQNMNIDISAFSCIAALAMVTERHGLKEPKRVEELQNKIVNCLKDHVTFNNGGLNRPNYLSKLLGKLPELRTLCTQGLQRIFYLKLEDLVPPPAIIDKLFLDTLPF

SEQ ID NO: 1390 - DNA, 3427 bp, Homo sapien; identical to SEQ ID NO: 1388

SEQ ID NO: 1391 - protein, 598 aa, Homo sapien; identical to SEQ ID NO: 1389

SEQ ID NO: 1392 - DNA, 3831 bp, Homo sapien
aactcatgcggccagagcgggaaagagactcgtctttgcgtccgagttctggagccgccgcaccccgactcctggggccgcggcagcggctgcgaggggacgggcgtccgctgtctcctgggttcccctcgtagcgacccgcgggatcggaaaaaaaggagaagatggaggaggagggtggcagcagcggcggcgccgcggggaccagcgcggacggcggcgacggaggagagcagctcctcactgtcaagcacgagctgcggactgctaatttgacaggacatgctgagaaggtgggaatagaaaattttgagctcctgaaggtcctaggaactggagcttatggaaaagtatttctagttcgtaaaataagtggccatgatactggaaagctgtatgccatgaaagttttgaaaaaggcaacaatcgttcaaaaggccaaaaccacagagcatacaaggacagaacgacaagtcctggaacacattaggcagtcgccatttttggtaacattacattatgctttccagacagaaaccaaacttcatctcattttagattatataaatggtggtgaactttttactcatctttctcaaagagagcgtttcacagagcatgaggtgcagatttatgttggagagattgtgcttgccctcgaacatctccacaagttggggattatatatcgtgatattaagcttgagaatattctacttgattctaatggccatgtggtgctgacagattttggtctgagtaaggagtttgtggctgatgaaactgaaagagcatattccttttgtggaactattgaatacatggcaccagatattgtcagagggggagattcaggacatgacaaggcagttgactggtggagtttgggtgttctaatgtatgaattactaactggagcatctcctttcactgttgatggagaaaaaaattcccaagctgagatatctaggagaatattaaaaagtgagcctccatatccccaagaaatgagtgctttagcgaaagacctaattcagcgtcttttgatgaaagatcccaagaagagattgggatgtggtccacgtgatgcagatgaaatcaaagaacatctcttctttcagaaaataaattgggatgatttagccgccaaaaaagtgcctgcaccatttaagccagtcattcgagatgaattagatgtgagtaactttgcagaagagttcacagaaatggatcccacttattctcccgcagccctgccccagagttctgagaagctgtttcagggctattcctttgttgctccttccatcctattcaagcgtaatgcagctgtcatagaccctcttcagtttcacatgggagttgaacgtcctggagtgacaaatgttgccaggagtgcaatgatgaaggactctccattctatcaacactatgacctagatttgaaggacaaacccctgggagaaggtagtttttcaatttgtcgaaagtgtgtgcataaaaaaagtaaccaagctttgcaagtcaaaataatcagcaaaaggatggaagccaatactcaaaaggaaataacagctctgaaactctgtgaaggacaccccaatattgtgaagttgcatgaagtttttcatgatcagcttcacacgtttctagtgatggaacttctgaatggaggagaactgtttgacgcattaagaaaaaagaagcacttcagtgagacggaagccagctacatcatgaggaagcttgtttcagctctaagccacatgcatgatcttggagtggtgcacagggatctgaaacctgagaatttattgttcaccgatgaaaatgacaatttggaaattaaaataattgattttggatttgcacggctaaagccaccggataatcagcccctgaagactccatgcttcacccttcattcatgccgcccagagctcttgaatcagaacggctacgatgagtcctgtgacctgtggagcttgggcgtcattttgtacacaatgttgtcaggacaggttcccttccaatctcatgaccgaagtttgacgtgtaccagcgcggtggaaatcatgaagaaaattaaaaagggagatttctcctttgaaggagaagcctggaagaatgtatcccaagaggctaaagatttgatccaaggacttctcacagtagatccaaacaaaaggcttaaaatgtctggcttgaggtacaatgaatggctacaagatggaagtcagctgtcctccaatcctctgatgactccggatattctaggatcttccggagctgccgtgcatacctgtgtgaaagcaaccttccacgcctttaacaaatacaagagagaggggttttgccttcagaatgttgataaggcccctttggctaagagaagaaaaatgaaaaagactagcaccagtaccgagacgcgcagagggtccagtgagagttcccattcttcttcctctcattctcacggtaaaactacacccaccaagacactgcagcccagcaatcctgccgacagcaataacccggagaccctcttccagttctcggactcagagcttaggcatggtaggagtgatcagtgatccattgcacctttattccctcagcatatgcctgagtcgatcttttatgcttttaaaaatgtttcccgttggtctcattggaatctgcctcctaatgatttttttcaggaaaacctgtttggttatcctcattcaaaagcactggacagagaatgttactgtgaatagagcacatattactctttttacgaacctagcatgatgccaacaagactattcttgaaagagcaaaggttcctgtaaatttaattagggctagatttgagctgcttgtaagtcacaggttttccagatgtctgccaacaagaaatgactcatactgtgatgataccttttgctttgccttgtggacaatgtgggtttttgaaatttgcacccttcaaacaatgatttatcagagaaaggggtctgttttcaaaaaagattctgtaatgaattttatgtgtggcatatacttatttcttgagagaagattttaacttattgtttttattttatggttacatatgatgataacctgctattattaaactttttctaaaaagtgaaaaaaaataaaaaagatataagaactcaaggtcccatactctgtattcgggatccatctgagatgcatgctaagctatgtgtatgtttttaattttgcactgctctttcctggcaatttgttttaatggttattgcagaatattaaggtacatgtctctctgttttaagtaatattgcactttataaaaaagtatgaataaagcaaactattttataaagtgcactgtttaaagcatttgcactgtatttttgccatttattttcattttctactttaaatttgtcctcacatgcctcttctactttgtatgcaacaagtagaatggggccttgttgtgtcatgtagtcagccacttatgcaccaatgtgaggaaaacctaaagggaaattaaactaaacactgtgcttcatatttgtacactgtgttgtactacagtgaggaatttcctcctgtagtcatatattatgtacataatattttagaatcatacctatgacttgtttggaaatttttctgttgaattttaaatccagaaagcatattttataaacttatgcagagcacttttattgctcaaaagttctgaattcatacagaaaacaagtactatgtgatgaaaacatttcattgaaagattgcggcatttaaaaatacaattaattcgttccctatgcaaaaaaaaaaaaa

SEQ ID NO: 1393 - protein, 809 aa, Homo sapien
MEEEGGSSGGAAGTSADGGDGGEQLLTVKHELRTANLTGHAEKVGIENFELLKVLGTGAYGKVFLVRKISGHDTGKLYAMKVLKKATIVQKAKTTEHTRTERQVLEHIRQSPFLVTLHYAFQTETKLHLILDYINGGELFTHLSQRERFTEHEVQIYVGEIVLALEHLHKLGIIYRDIKLENILLDSNGHVVLTDFGLSKEFVADETERAYSFCGTIEYMAPDIVRGGDSGHDKAVDWWSLGVLMYELLTGASPFTVDGEKNSQAEISRRILKSEPPYPQEMSALAKDLIQRLLMKDPKKRLGCGPRDADEIKEHLFFQKINWDDLAAKKVPAPFKPVIRDELDVSNFAEEFTEMDPTYSPAALPQSSEKLFQGYSFVAPSILFKRNAAVIDPLQFHMGVERPGVTNVARSAMMKDSPFYQHYDLDLKDKPLGEGSFSICRKCVHKKSNQALQVKIISKRMEANTQKEITALKLCEGHPNIVKLHEVFHDQLHTFLVMELLNGGELFDALRKKKHFSETEASYIMRKLVSALSHMHDLGVVHRDLKPENLLFTDENDNLEIKIIDFGFARLKPPDNQPLKTPCFTLHSCRPELLNQNGYDESCDLWSLGVILYTMLSGQVPFQSHDRSLTCTSAVEIMKKIKKGDFSFEGEAWKNVSQEAKDLIQGLLTVDPNKRLKMSGLRYNEWLQDGSQLSSNPLMTPDILGSSGAAVHTCVKATFHAFNKYKREGFCLQNVDKAPLAKRRKMKKTSTSTETRRGSSESSHSSSSHSHGKTTPTKTLQPSNPADSNNPETLFQFSDSELRHGRSDQ

SEQ ID NO: 1394 - DNA, 2119 bp, Homo sapien
ggcacgagtaggggtggcgggtcagtgctgctcgggggcttctccatccaggtccctggagttcctggtccctggagctccgcacttggcgcgcaacctgcgtgaggcagcgcgactctggcgactggccggccatgccttcccgggctgaggactatgaagtgttgtacaccattggcacaggctcctacggccgctgccagaagatccggaggaagagtgatggcaagatattagtttggaaagaacttgactatggctccatgacagaagctgagaaacagatgcttgtttctgaagtgaatttgcttcgtgaactgaaacatccaaacatcgttcgttactatgatcggattattgaccggaccaatacaacactgtacattgtaatggaatattgtgaaggaggggatctggctagtgtaattacaaagggaaccaaggaaaggcaatacttagatgaagagtttgttcttcgagtgatgactcagttgactctggccctgaaggaatgccacagacgaagtgatggtggtcataccgtattgcatcgggatcttaaaccagccaatgttttcctggatggcaagcaaaacgtcaagcttggagactttgggctagctagaatattaaaccatgacacgagttttgcaaaaacatttgttggcacaccttattacatgtctcctgaacaaatgaatcgcatgtcctacaatgagaaatcagatatctggtcattgggctgcttgctgtatgagttatgtgcattaatgcctccatttacagcttttagccagaaagaactcgctgggaaaatcagagaaggcaaattcaggcgaattccataccgttactctgatgaattgaatgaaattattacgaggatgttaaacttaaaggattaccatcgaccttctgttgaagaaattcttgagaaccctttaatagcagatttggttgcagacgagcaaagaagaaatcttgagagaagagggcgacaattaggagagccagaaaaatcgcaggattccagccctgtattgagtgagctgaaactgaaggaaattcagttacaggagcgagagcgagctctcaaagcaagagaagaaagattggagcagaaagaacaggagctttgtgttcgtgagagactagcagaggacaaactggctagagcagaaaatctgttgaagaactacagcttgctaaaggaacggaagttcctgtctctggcaagtaatccagaacttcttaatcttccatcctcagtaattaagaagaaagttcatttcagtggggaaagtaaagagaacatcatgaggagtgagaattctgagagtcagctcacatctaagtccaagtgcaaggacctgaagaaaaggcttcacgctgcccagctgcgggctcaagccctgtcagatattgagaaaaattaccaactgaaaagcagacagatcctgggcatgcgctagccaggtagagagacacagagctgtgtacaggatgtaatattaccaacctttaaagactgatattcaaatgctgtagtgttgaatacttggccccatgagccatgcctttctgtatagtacacatgatatttcggaattggttttactgttcttcagcaactattgtacaaaatgttcacatttaatttttctttcttcttttaagaacatattataaaaagaatactttcttggttgggcttttaatcctgtgtgtgattactagtaggaacatgagatgtgacattctaaatcttgggagaaaaaataatattaggaaaaaaatatttatgcaggaagagtagcactcactgaatagttttaaatgactgagtggtatgcttacaattgtcatgtctagatttaaattttaagtctgagattttaaatgtttttgagcttagaaaacccagttagatgcaatttggtcattaataccatgacatcttgcttataaatattccattgctctgtagttcaaatctgttagctttgtgaaaattcatcactgtgatgtttgtattctttttttttttctgtttaacagaatatgagctgtctgtcatttacctacttctttcccactaaataaaagaattcttcagtta

SEQ ID NO: 1395 - protein, 445 aa, Homo sapien
MPSRAEDYEVLYTIGTGSYGRCQKIRRKSDGKILVWKELDYGSMTEAEKQMLVSEVNLLRELKHPNIVRYYDRIIDRTNTTLYIVMEYCEGGDLASVITKGTKERQYLDEEFVLRVMTQLTLALKECHRRSDGGHTVLHRDLKPANVFLDGKQNVKLGDFGLARILNHDTSFAKTFVGTPYYMSPEQMNRMSYNEKSDIWSLGCLLYELCALMPPFTAFSQKELAGKIREGKFRRIPYRYSDELNEIITRMLNLKDYHRPSVEEILENPLIADLVADEQRRNLERRGRQLGEPEKSQDSSPVLSELKLKEIQLQERERALKAREERLEQKEQELCVRERLAEDKLARAENLLKNYSLLKERKFLSLASNPELLNLPSSVIKKKVHFSGESKENIMRSENSESQLTSKSKCKDLKKRLHAAQLRAQALSDIEKNYQLKSRQILGMR

SEQ ID NO: 1396 - DNA, 2753 bp, Homo sapien
gtcgggggcagcagcaagatgcgaagcgagccgtacagatcccgggctctccgaacgcaacttcgccctgcttgagcgaggctgcggtttccgaggccctctccagccaaggaaaagctacacaaaaagcctggatcactcatcgaaccacccctgaagccagtgaaggctctctcgcctcgccctctagcgttcgtctggagtagcgccaccccggcttcctggggacacagggttggcaccatggggcccaccagcgtcccgctggtcaaggcccaccgcagctcggtctctgactacgtcaactatgatatcatcgtccggcattacaactacacgggaaagctgaatatcagcgcggacaaggagaacagcattaaactgacctcggtggtgttcattctcatctgctgctttatcatcctggagaacatctttgtcttgctgaccatttggaaaaccaagaaattccaccgacccatgtactattttattggcaatctggccctctcagacctgttggcaggagtagcctacacagctaacctgctcttgtctggggccaccacctacaagctcactcccgcccagtggtttctgcgggaagggagtatgtttgtggccctgtcagcctccgtgttcagtctcctcgccatcgccattgagcgctatatcacaatgctgaaaatgaaactccacaacgggagcaataacttccgcctcttcctgctaatcagcgcctgctgggtcatctccctcatcctgggtggcctgcctatcatgggctggaactgcatcagtgcgctgtccagctgctccaccgtgctgccgctctaccacaagcactatatcctcttctgcaccacggtcttcactctgcttctgctctccatcgtcattctgtactgcagaatctactccttggtcaggactcggagccgccgcctgacgttccgcaagaacatttccaaggccagccgcagctctgagaagtcgctggcgctgctcaagaccgtaattatcgtcctgagcgtcttcatcgcctgctgggcaccgctcttcatcctgctcctgctggatgtgggctgcaaggtgaagacctgtgacatcctcttcagagcggagtacttcctggtgttagctgtgctcaactccggcaccaaccccatcatttacactctgaccaacaaggagatgcgtcgggccttcatccggatcatgtcctgctgcaagtgcccgagcggagactctgctggcaaattcaagcgacccatcatcgccggcatggaattcagccgcagcaaatcggacaattcctcccacccccagaaagacgaaggggacaacccagagaccattatgtcttctggaaacgtcaactcttcttcctagaactggaagctgtccacccaccggaagcgctctttacttggtcgctggccaccccagtgtttggaaaaaaatctctgggcttcgactgctgccagggaggagctgctgcaagccagagggaggaagggggagaatacgaacagcctggtggtgtcgggtgttggtgggtagagttagttcctgtgaacaatgcactgggaagggtggagatcaggtcccggcctggaatatatattctacccccctggagctttgattttgcactgagccaaaggtctagcattgtcaagctcctaaagggttcatttggcccctcctcaaagactaatgtccccatgtgaaagcgtctctttgtctggagctttgaggagatgttttccttcactttagtttcaaacccaagtgagtgtgtgcacttctgcttctttagggatgccctgtacatcccacaccccaccctcccttcccttcatacccctcctcaacgttcttttactttatactttaactacctgagagttatcagagctggggttgtggaatgatcgatcatctatagcaaataggctatgttgagtacgtaggctgtgggaagatgaagatggtttggaggtgtaaaacaatgtccttcgctgaggccaaagtttccatgtaagcgggatccgttttttggaatttggttgaagtcactttgatttctttaaaaaacatcttttcaatgaaatgtgttaccatttcatatccattgaagccgaaatctgcataaggaagcccactttatctaaatgatattagccaggatccttggtgtcctaggagaaacagacaagcaaaacaaagtgaaaaccgaatggattaacttttgcaaaccaagggagatttcttagcaaatgagtctaacaaatatgacatccgtctttcccacttttgttgatgtttatttcagaatcttgtgtgattcatttcaagcaacaacatgttgtattttgttgtgttaaaagtacttttcttgatttttgaatgtatttgtttcaggaagaagtcattttatggatttttctaacccgtgttaacttttctagaatccaccctcttgtgcccttaagcattactttaactggtagggaacgccagaacttttaagtccagctattcattagatagtaattgaagatatgtataaatattacaaagaataaaaatatattactgtctctttagtatggttttcagtgcaattaaaccgagagatgtcttgtttttttaaaaagaatagtatttaataggtttctgacttttgtggatcattttgcacatagctttatcaacttttaaacattaataaactgatttttttaaag

SEQ ID NO: 1397 - protein, 382 aa, Homo sapien
MGPTSVPLVKAHRSSVSDYVNYDIIVRHYNYTGKLNISADKENSIKLTSVVFILICCFIILENIFVLLTIWKTKKFHRPMYYFIGNLALSDLLAGVAYTANLLLSGATTYKLTPAQWFLREGSMFVALSASVFSLLAIAIERYITMLKMKLHNGSNNFRLFLLISACWVISLILGGLPIMGWNCISALSSCSTVLPLYHKHYILFCTTVFTLLLLSIVILYCRIYSLVRTRSRRLTFRKNISKASRSSEKSLALLKTVIIVLSVFIACWAPLFILLLLDVGCKVKTCDILFRAEYFLVLAVLNSGTNPIIYTLTNKEMRRAFIRIMSCCKCPSGDSAGKFKRPIIAGMEFSRSKSDNSSHPQKDEGDNPETIMSSGNVNSSS

SEQ ID NO: 1398 - DNA, 430 bp, Homo sapien; identical to SEQ ID NO: 43

SEQ ID NO: 1399 - protein, 61 aa, Homo sapien; identical to SEQ ID NO: 44

SEQ ID NO: 1400 - DNA, 2417 bp, Homo sapien; identical to SEQ ID NO: 49

SEQ ID NO: 1401 - protein, 555 aa, Homo sapien
LESTPFSGVANQIHTLCERPTYGEVKDGALDVKRQHKCPGPTSGPSPGTNLSGCIRMNDDPSMEENGVERVCPESLLQSRGYSSLPLPRHTSSTDGTITSSDPGLEILNMASCDLDRNSLCKKEEDTRSASPTIEAQGTSPAHDNIAFQDSTSKDKTILNLEAKEEPETIEEHKKEHASGDSVVSPLPVTTVKSVNVRQSENTSANEKEVEAEFLRLSLGFKCDWFTLEKRVKLEERSRDWAEENLKKEITNSLKLLESLTPLCEDDNQAQEIIKKLEKSIKFLSQCAARVASRAEMLGAINQESRVSKAVEVMIQHVENLKRMYAKEHAELEELKQVLLQNERSFNPLEDDDDCQIKKRSASLNSKPSSLRRVTIASLPRNIGNAGMVAGMENNDRFSRRSSSWRILGSKQSEHRPSLPRFISTYSWADAEEEKCELKTKDDSEPSGEETVERTRKPSLSEKKNNPSKWDVSSVYDTIASWATNLKSSIRKANKALWLSIAFIVLFAALMSFLTGQLFQKSVDAAPTQQEDSWTSLEHILWPFTRLRHNGPPPV

SEQ ID NO: 1402 - DNA, 1035 bp, Homo sapien
atctccctccaggcagcccttggctggtccctgcgagcccgtggagactgccagagatgtcctctttcggttacaggaccctgactgtggccctcttcaccctgatctgctgtccaggatcggatgagaaggtattcgaggtacacgtgaggccaaagaagctggcggttgagcccaaagggtccctcgaggtcaactgcagcaccacctgtaaccagcctgaagtgggtggtctggagacctctctaaataagattctgctggacgaacaggctcagtggaaacattacttggtctcaaacatctcccatgacacggtcctccaatgccacttcacctgctccgggaagcaggagtcaatgaattccaacgtcagcgtgtaccagcctccaaggcaggtcatcctgacactgcaacccactttggtggctgtgggcaagtccttcaccattgagtgcagggtgcccaccgtggagcccctggacagcctcaccctcttcctgttccgtggcaatgagactctgcactatgagaccttcgggaaggcagcccctgctccgcaggaggccacagccacattcaacagcacggctgacagagaggatggccaccgcaacttctcctgcctggctgtgctggacttgatgtctcgcggtggcaacatctttcacaaacactcagccccgaagatgttggagatctatgagcctgtgtcggacagccagatggtcatcatagtcacggtggtgtcggtgttgctgtccctgttcgtgacatctgtcctgctctgcttcatcttcggccagcacttgcgccagcagcggatgggcacctacggggtgcgagcggcttggaggaggctgccccaggccttccggccatagcaaccatgagtggcatggccaccaccacggtggtcactggaactcagtgtgactcctcagggttgaggtccagccctggctgaaggactgtgacaggcagcagagacttgggacattgccttttctagcccgaatacaaacacctggactt

SEQ ID NO: 1403 - protein, 275 aa, Homo sapien
MSSFGYRTLTVALFTLICCPGSDEKVFEVHVRPKKLAVEPKGSLEVNCSTTCNQPEVGGLETSLNKILLDEQAQWKHYLVSNISHDTVLQCHFTCSGKQESMNSNVSVYQPPRQVILTLQPTLVAVGKSFTIECRVPTVEPLDSLTLFLFRGNETLHYETFGKAAPAPQEATATFNSTADREDGHRNFSCLAVLDLMSRGGNIFHKHSAPKMLEIYEPVSDSQMVIIVTVVSVLLSLFVTSVLLCFIFGQHLRQQRMGTYGVRAAWRRLPQAFRP

SEQ ID NO: 1404 - DNA, 2836 bp, Homo sapien; identical to SEQ ID NO: 59

SEQ ID NO: 1405 - protein, 832 aa, Homo sapien [sequence omitted]

SEQ ID NO: 1406 - DNA, 2419 bp, Homo sapien
cgaaaggccggccttggctgcgacagcctgggtaagaggtgtaggtcggcttggttttctgctacccggagctgggcaagcgggttgggagaacagcgaagacagcgtgagcctgggccgttgcctcgaggctctcgcccggcttctcttgccgacccgccacgtttgtttggatttaatcttacagctggttgccggcgcccgcccgcccgctggcctcgcggtgtgagagggaagcacccgtgcctgtggctggtggctggcgcctggagggtccgcacacccgcccggccgcgccgctttgcccgcggcagccgcgtccctgaaccgcggagtcgtgtttgtgtttgacccgcgggcgccggtggcgcgcggccgaggccggtgtcggcggggcggggcggtcgcggcggaggcagaggaagagggagcgggagctctgcgaggccgggcgccgccatggaactgggcccgagccccgcaccgcgccgcctgctcttcgcctgcagcccccctcccgcgtcgcagcccgtcgtgaaggcgctatttggcgcttcagccgccgggggactgtcgcctgtcaccaacctgaccgtcactatggaccagctgcagggtctgggcagtgattatgagcaaccactggaggtgaagaacaacagtaatctgcagagaatgggctcctccgagtcaacagattcaggtttctgtctagattctcctgggccattggacagtaaagaaaaccttgaaaatcctatgagaagaatacattccctacctcaaaagctgttgggatgtagtccagctctgaagaggagccattctgattctcttgaccatgacatctttcagctcatcgacccagatgagaacaaggaaaatgaagcctttgagtttaagaagccagtaagacctgtatctcgtggctgcctgcactctcatggactccaggagggtaaagatctcttcacacagaggcagaactctgcccagctcggaatgctttcctcaaatgaaagagatagcagtgaaccagggaatttcattcctctttttacaccccagtcacctgtgacagccactttgtctgatgaggatgatggcttcgtggaccttctcgatggagagaatctgaagaatgaggaggagaccccctcgtgcatggcaagcctctggacagctcctctcgtcatgagaactacaaaccttgacaaccgatgcaagctgtttgactccccttccctgtgtagctccagcactcggtcagtgttgaagagaccagaacgttctcaagaggagtctccacctggaagtacaaagaggaggaagagcatgtctggggccagccccaaagagtcaactaatccagagaaggcccatgagactcttcatcagtctttatccctggcatcttcccccaaaggaaccattgagaacattttggacaatgacccaagggaccttataggagacttctccaagggttatctctttcatacagttgctgggaaacatcaggatttaaaatacatctctccagaaattatggcatctgttttgaatggcaagtttgccaacctcattaaagagtttgttatcatcgactgtcgatacccatatgaatacgagggaggccacatcaagggtgcagtgaacttgcacatggaagaagaggttgaagacttcttattgaagaagcccattgtacctactgatggcaagcgtgtcattgttgtgtttcactgcgagttttcttctgagagaggtccccgcatgtgccggtatgtgagagagagagatcgcctgggtaatgaataccccaaactccactaccctgagctgtatgtcctgaaggggggatacaaggagttctttatgaaatgccagtcttactgtgagccccctagctaccggcccatgcaccacgaggactttaaagaagacctgaagaagttccgcaccaagagccggacctgggcaggggagaagagcaagagggagatgtacagtcgtctgaagaagctctgagggcggcaggaccagccagcagcagcccaagcttccctccatccccctttaccctctttcctgcagagaaacttaagcaaaggggacagctgtgtgacatttggagagggggcctgggacttccatgccttaaacctacctcccacactcccaaggttggagcccagggcatcttgctggctacgcctcttctgtccctgttagacgtcctccgtccatatcagaactgtgccacaatgcagttctgagcaccgtgtcaagctgctctgagccacagtgggatgaaccagccggggccttatcgggctccagcatctcatgaggggagaggagacggaggggagtagagaagtttacacagaaatgctgctggccaaatagcaaagag

SEQ ID NO: 1407 - protein, 523 aa, Homo sapien
MELGPSPAPRRLLFACSPPPASQPVVKALFGASAAGGLSPVTNLTVTMDQLQGLGSDYEQPLEVKNNSNLQRMGSSESTDSGFCLDSPGPLDSKENLENPMRRIHSLPQKLLGCSPALKRSHSDSLDHDIFQLIDPDENKENEAFEFKKPVRPVSRGCLHSHGLQEGKDLFTQRQNSAQLGMLSSNERDSSEPGNFIPLFTPQSPVTATLSDEDDGFVDLLDGENLKNEEETPSCMASLWTAPLVMRTTNLDNRCKLFDSPSLCSSSTRSVLKRPERSQEESPPGSTKRRKSMSGASPKESTNPEKAHETLHQSLSLASSPKGTIENILDNDPRDLIGDFSKGYLFHTVAGKHQDLKYISPEIMASVLNGKFANLIKEFVIIDCRYPYEYEGGHIKGAVNLHMEEEVEDFLLKKPIVPTDGKRVIVVFHCEFSSERGPRMCRYVRERDRLGNEYPKLHYPELYVLKGGYKEFFMKCQSYCEPPSYRPMHHEDFKEDLKKFRTKSRTWAGEKSKREMYSRLKKL

SEQ ID NO: 1408 - DNA, 2618 bp, Homo sapien
atgaagcacctgaagcggtggtggtcggccggcggcggcctcctgcacctcaccctcctgctgagcttggcggggctccgcgtagacctagatctttacctgctgctgccgccgcccaccctgctgcaggacgagctgctgttcctgggcggcccggccagctccgcctacgcgctcagccccttctcggcctcgggagggtgggggcgcgcgggccacttgcaccccaagggccgggagctggaccctgccgcgccgcccgagggccagctgctccgggaggtgcgcgcgctcggggtccccttcgtccctcgcaccagcgtggatgcatggctggtgcacagcgtggctgccgggagcgcggacgaggcccacgggctgctcggcgccgccgccgcctcgtccaccggaggagccggcgccagcgtggacggcggcagccaggctgtgcaggggggcggcggggacccccgagcggctcggagtggccccttggacgccggggaagaggagaaggcacccgcggaaccgacggctcaggtgccggacgctggcggatgtgcgagcgaggagaatggggtactaagagaaaagcacgaagctgtggatcatagttcccagcatgaggaaaatgaagaaagggtgtcagcccagaaggagaactcacttcagcagaatgatgatgatgaaaacaaaatagcagagaaacctgactgggaggcagaaaagaccactgaatctagaaatgagagacatctgaatgggacagatacttctttctctctggaagacttattccagttgctttcatcacagcctgaaaattcactggagggcatctcattgggagatattcctcttccaggcagtatcagtgatggcatgaattcttcagcacattatcatgtaaacttcagccaggctataagtcaggatgtgaatcttcatgaggccatcttgctttgtcccaacaatacatttagaagagatccaacagcaaggacttcacagtcacaagaaccatttctgcagttaaattctcataccaccaatcctgagcaaacccttcctggaactaatttgacaggatttctttcaccggttgacaatcatatgaggaatctaacaagccaagacctactgtatgaccttgacataaatatatttgatgagataaacttaatgtcattggccacagaagacaactttgatccaatcgatgtttctcagctttttgatgaaccagattctgattctggcctttctttagattcaagtcacaataatacctctgtcatcaagtctaattcctctcactctgtgtgtgatgaaggtgctataggttattgcactgaccatgaatctagttcccatcatgacttagaaggtgctgtaggtggctactacccagaacccagtaagctttgtcacttggatcaaagtgattctgatttccatggagatcttacatttcaacacgtatttcataaccacacttaccacttacagccaactgcaccagaatctacttctgaaccttttccgtggcctgggaagtcacagaagataaggagtagataccttgaagacacagatagaaacttgagccgtgatgaacagcgtgctaaagctttgcatatccctttttctgtagatgaaattgtcggcatgcctgttgattctttcaatagcatgttaagtagatattatctgacagacctacaagtctcacttatccgtgacatcagacgaagagggaaaaataaagttgctgcgcagaactgtcgtaaacgcaaattggacataattttgaatttagaagatgatgtatgtaacttgcaagcaaagaaggaaactcttaagagagagcaagcacaatgtaacaaagctattaacataatgaaacagaaactgcatgacctttatcatgatatttttagtagattaagagatgaccaaggtaggccagtcaatcccaaccactatgctctccagtgtacccatgatggaagtatcttgatagtacccaaagaactggtggcctcaggccacaaaaaggaaacccaaaagggaaagagaaagtgagaagaaactgaagatggactctattatgtgaagtagtaatgttcagaaactgattatttggatcagaaaccattgaaactgcttcaagaattgtatctttaagtactgctacttgaataactcagttaacgctgttttgaagcttacatggacaaatgtttaggacttcaagatcacacttgtgggcaatctgggggagccacaacttttcatgaagtgcattgtatacaaaattcatagttatgtccaaagaataggttaacatgaaaacccagtaagactttccatcttggcagccatcctttttaagagtaagttggttacttcaaaaagagcaaacactggggatcaaattattttaagaggtatttcagttttaaatgcaaaatagccttattttcatttagtttgttagcactatagtgagcttttcaaacactattttaatctttatatttaacttataaattttgctttctatggaaataaattttgtatttgtattaaaaattaacttttcccttttatacaga

SEQ ID NO: 1409 - protein, 694 aa, Homo sapien
MKHLKRWWSAGGGLLHLTLLLSLAGLRVDLDLYLLLPPPTLLQDELLFLGGPASSAYALSPFSASGGWGRAGHLHPKGRELDPAAPPEGQLLREVRALGVPFVPRTSVDAWLVHSVAAGSADEAHGLLGAAAASSTGGAGASVDGGSQAVQGGGGDPRAARSGPLDAGEEEKAPAEPTAQVPDAGGCASEENGVLREKHEAVDHSSQHEENEERVSAQKENSLQQNDDDENKIAEKPDWEAEKTTESRNERHLNGTDTSFSLEDLFQLLSSQPENSLEGISLGDIPLPGSISDGMNSSAHYHVNFSQAISQDVNLHEAILLCPNNTFRRDPTARTSQSQEPFLQLNSHTTNPEQTLPGTNLTGFLSPVDNHMRNLTSQDLLYDLDINIFDEINLMSLATEDNFDPIDVSQLFDEPDSDSGLSLDSSHNNTSVIKSNSSHSVCDEGAIGYCTDHESSSHHDLEGAVGGYYPEPSKLCHLDQSDSDFHGDLTFQHVFHNHTYHLQPTAPESTSEPFPWPGKSQKIRSRYLEDTDRNLSRDEQRAKALHIPFSVDEIVGMPVDSFNSMLSRYYLTDLQVSLIRDIRRRGKNKVAAQNCRKRKLDIILNLEDDVCNLQAKKETLKREQAQCNKAINIMKQKLHDLYHDIFSRLRDDQGRPVNPNHYALQCTHDGSILIVPKELVASGHKKETQKGKRK

SEQ ID NO: 1410 - DNA, 3324 bp, Homo sapien
gcagagcaccgcgccttagccgcgaagttctagttcttgctgccggtcctaacgtcccgcagtcttcgccagccagccgtcccgcatgcgcgtttgggcggcgtggagcctgctgccatgaagtcagcgagagctaagacaccccggaaacctaccgtgaaaaaagggtcccaaacgaaccttaaagacccagttggggtatactgtagggtgcgcccactgggctttcctgatcaagagtgttgcatagaagtgatcaataatacaactgttcagcttcatactcctgagggctacagactcaaccgaaatggagactataaggagactcagtattcatttaaacaagtatttggcactcacaccacccagaaggaactctttgatgttgtggctaatcccttggtcaatgacctcattcatggcaaaaatggtcttctttttacatatggtgtgacgggaagtggaaaaactcacacaatgactggttctccaggggaaggagggctgcttcctcgttgtttggacatgatctttaacagtatagggtcatttcaagctaaacgatatgttttcaaatctaatgataggaatagtatggatatacagtgtgaggttgatgccttattagaacgtcagaaaagagaagctatgcccaatccaaagacttcttctagcaaacgacaagtagatccagagtttgcagatatgataactgtacaagaattctgcaaagcagaagaggttgatgaagatagtgtctatggtgtatttgtctcttatattgaaatatataataattacatatatgatctattggaagaggtgccgtttgatcccataaaacccaaacctccacaatctaaattgcttcgtgaagataagaaccataacatgtatgttgcaggatgtacagaagttgaagtgaaatctactgaggaggcttttgaagttttctggagaggccagaaaaagagacgtattgctaatacccatttgaatcgtgagtccagccgttcccatagcgtgttcaacattaaattagttcaggctcccttggatgcagatggagacaatgtcttacaggaaaaagaacaaatcactataagtcagttgtccttggtagatcttgctggaagtgaaagaactaaccggaccagagcagaagggaacagattacgtgaagctggtaatattaatcagtcactaatgacgctaagaacatgtatggatgtcctaagagagaaccaaatgtatggaactaacaagatggttccatatcgagattcaaagttaacccatctgttcaagaactactttgatggggaaggaaaagtgcggatgatcgtgtgtgtgaaccccaaggctgaagattatgaagaaaacttgcaagtcatgagatttgcggaagtgactcaagaagttgaagtagcaagacctgtagacaaggcaatatgtggtttaacgcctgggaggagatacagaaaccagcctcgaggtccagttggaaatgaaccattggttactgacgtggttttgcagagttttccacctttgccgtcatgcgaaattttggatatcaacgatgagcagacacttccaaggctgattgaagccttagagaaacgacataacttacgacaaatgatgattgatgagtttaacaaacaatctaatgcttttaaagctttgttacaagaatttgacaatgctgttttaagtaaagaaaaccacatgcaagggaaactaaatgaaaaggagaagatgatctcaggacagaaattggaaatagaacgactggaaaagaaaaacaaaactttagaatataagattgagattttagagaaaacaactactatctatgaggaagataaacgcaatttgcaacaggaacttgaaactcagaaccagaaacttcagcgacagttttctgacaaacgcagattagaagccaggttgcaaggcatggtgacagaaacgacaatgaagtgggagaaagaatgtgagcgtagagtggcagccaaacagctggagatgcagaataaactctgggttaaagatgaaaagctgaaacaactgaaggctattgttactgaacctaaaactgagaagccagagagaccctctcgggagcgagatcgagaaaaagttactcaaagatctgtttctccatcacctgtgcctttactctttcaacctgatcagaacgcaccaccaattcgtctccgacacagacgatcacgctctgcaggagacagatgggtagatcataagcccgcctctaacatgcaaactgaaacagtcatgcagccacatgtccctcatgccatcacagtatctgttgcaaatgaaaaggcactagctaagtgtgagaagtacatgctgacccaccaggaactagcctccgatggggagattgaaactaaactaattaagggtgatatttataaaacaaggggtggtggacaatctgttcagtttactgatattgagactttaaagcaagaatcaccaaatggtagtcgaaaacgaagatcttccacagtagcacctgcccaaccagatggtgcagagtctgaatggaccgatgtagaaacaaggtgttctgtggctgtggagatgagagcaggatcccagctgggacctggatatcagcatcacgcacaacccaagcgcaaaaagccatgaactgacagtcccagtactgaaagaacattttcatttgtgtggatgatttctcgaaagccatgccagaagcagtcttccaggtcatcttgtagaactccagctttgttgaaaatcacggacctcagctacatcatacactgacccagagcaaagctttccctatggttccaaagacaactagtattcaacaaaccttgtatagtatatgttttgccatatttaatattaatagcagaggaagactccttttttcatcactgtatgaattttttataatgtttttttaaaatatatttcatgtatacttataaactaattcacacaagtgtttgtcttagatgattaaggaagactatatctagatcatgtctgattttttattgtgacttctccagccctggtctgaatttcttaaggttttataaacaaatgctgctatttattagctgcaagaatgcactttagaactatttgacaattcagactttcaaaataaagatgtaaatgactggccaataataaccattttaggaaggtgttttgaattctgtatgtatatattcactttctgacatttagatatgccaaaagaattaaaatcaaaagcactaagaaataaaaaaaaaaaaaaaaaaa

SEQ ID NO: 1411 - protein, 960 aa, Homo sapien
MKSARAKTPRKPTVKKGSQTNLKDPVGVYCRVRPLGFPDQECCIEVINNTTVQLHTPEGYRLNRNGDYKETQYSFKQVFGTHTTQKELFDVVANPLVNDLIHGKNGLLFTYGVTGSGKTHTMTGSPGEGGLLPRCLDMIFNSIGSFQAKRYVFKSNDRNSMDIQCEVDALLERQKREAMPNPKTSSSKRQVDPEFADMITVQEFCKAEEVDEDSVYGVFVSYIEIYNNYIYDLLEEVPFDPIKPKPPQSKLLREDKNHNMYVAGCTEVEVKSTEEAFEVFWRGQKKRRIANTHLNRESSRSHSVFNIKLVQAPLDADGDNVLQEKEQITISQLSLVDLAGSERTNRTRAEGNRLREAGNINQSLMTLRTCMDVLRENQMYGTNKMVPYRDSKLTHLFKNYFDGEGKVRMIVCVNPKAEDYEENLQVMRFAEVTQEVEVARPVDKAICGLTPGRRYRNQPRGPVGNEPLVTDVVLQSFPPLPSCEILDINDEQTLPRLIEALEKRHNLRQMMIDEFNKQSNAFKALLQEFDNAVLSKENHMQGKLNEKEKMISGQKLEIERLEKKNKTLEYKIEILEKTTTIYEEDKRNLQQELETQNQKLQRQFSDKRRLEARLQGMVTETTMKWEKECERRVAAKQLEMQNKLWVKDEKLKQLKAIVTEPKTEKPERPSRERDREKVTQRSVSPSPVPLSSNYIAQISNGQQLMSQPQLHRRSNSCSSISVASCISEWEQKIPTYNTPLKVTSIARRRQQEPGQSKTCIVSDRRRGMYWTEGREVVPTFRNEIEIEEDHCGRLLFQPDQNAPPIRLRHRRSRSAGDRWVDHKPASNMQTETVMQPHVPHAITVSVANEKALAKCEKYMLTHQELASDGEIETKLIKGDIYKTRGGGQSVQFTDIETLKQESPNGSRKRRSSTVAPAQPDGAESEWTDVETRCSVAVEMRAGSQLGPGYQHHAQPKRKKP

SEQ ID NO: 1412 - DNA, 6914 bp, Homo sapien
tcattgcagctgggacagcccggagtgtggttagcagctcggcaagcgctgcccaggtcctggggtggtggcagccagcgggagcaggaaaggaagcatgttcccaggctgcccacgcctctgggtcctggtggtcttgggcaccagctgggtaggctgggggagccaagggacagaagcggcacagctaaggcagttctacgtggctgctcagggcatcagttggagctaccgacctgagcccacaaactcaagtttgaatctttctgtaacttcctttaagaaaattgtctacagagagtatgaaccatattttaagaaagaaaaaccacaatctaccatttcaggacttcttgggcctactttatatgctgaagtcggagacatcataaaagttcactttaaaaataaggcagataagcccttgagcatccatcctcaaggaattaggtacagtaaattatcagaaggtgcttcttaccttgaccacacattccctgcagagaagatggacgacgctgtggctccaggccgagaatacacctatgaatggagtatcagtgaggacagtggacccacccatgatgaccctccatgcctcacacacatctattactcccatgaaaatctgatcgaggatttcaactctgggctgattgggcccctgcttatctgtaaaaaagggaccctaactgagggtgggacacagaagacgtttgacaagcaaatcgtgctactatttgctgtgtttgatgaaagcaagagctggagccagtcatcatccctaatgtacacagtcaatggatatgtgaatgggacaatgccagatataacagtttgtgcccatgaccacatcagctggcatctgctgggaatgagctcggggccagaattattctccattcatttcaacggccaggtcctggagcagaaccatcataaggtctcagccatcacccttgtcagtgctacatccactaccgcaaatatgactgtgggcccagagggaaagtggatcatatcttctctcaccccaaaacatttgcaagctgggatgcaggcttacattgacattaaaaactgcccaaagaaaaccaggaatcttaagaaaataactcgtgagcagaggcggcacatgaagaggtgggaatacttcattgctgcagaggaagtcatttgggactatgcacctgtaataccagcgaatatggacaaaaaatacaggtctcagcatttggataatttctcaaaccaaattggaaaacattataagaaagttatgtacacacagtacgaagatgagtccttcaccaaacatacagtgaatcccaatatgaaagaagatgggattttgggtcctattatcagagcccaggtcagagacacactcaaaatcgtgttcaaaaatatggccagccgcccctatagcatttaccctcatggagtgaccttctcgccttatgaagatgaagtcaactcttctttcacctcaggcaggaacaacaccatgatcagagcagttcaaccaggggaaacctatacttataagtggaacatcttagagtttgatgaacccacagaaaatgatgcccagtgcttaacaagaccatactacagtgacgtggacatcatgagagacatcgcctctgggctaataggactacttctaatctgtaagagcagatccctggacaggcgaggaatacagagggcagcagacatcgaacagcaggctgtgtttgctgtgtttgatgagaacaaaagctggtaccttgaggacaacatcaacaagttttgtgaaaatcctgatgaggtgaaacgtgatgaccccaagttttatgaatcaaacatcatgagcactatcaatggctatgtgcctgagagcataactactcttggattctgctttgatgacactgtccagtggcacttctgtagtgtggggacccagaatgaaattttgaccatccacttcactgggcactcattcatctatggaaagaggcatgaggacaccttgaccctcttccccatgcgtggagaatctgtgacggtcacaatggataatgttggaacttggatgttaacttccatgaattctagtccaagaagcaaaaagctgaggctgaaattcagggatgttaaatgtatcccagatgatgatgaagactcatatgagatttttgaacctccagaatctacagtcatggctacacggaaaatgcatgatcgtttagaacctgaagatgaagagagtgatgctgactatgattaccagaacagactggctgcagcattaggaattaggtcattccgaaactcatcattgaaccaggaagaagaagagttcaatcttactgccctagctctggagaatggcactgaattcgtttcttcgaacacagatataattgttggttcaaattattcttccccaagtaatattagtaagttcactgtcaataaccttgcagaacctcagaaagccccttctcaccaacaagccaccacagctggttccccactgagacacctcattggcaagaactcagttctcaattcttccacagcagagcattccagcccatattctgaagaccctatagaggatcctctacagccagatgtcacagggatacgtctactttcacttggtgctggagaattcagaagtcaagaacatgctaagcgtaagggacccaaggtagaaagagatcaagcagcaaagcacaggttctcctggatgaaattactagcacataaagttgggagacacctaagccaagacactggttctccttccggaatgaggccctgggaggaccttcctagccaagacactggttctccttccagaatgaggccctgggaggaccctcctagtgatctgttactcttaaaacaaagtaactcatctaagattttggttgggagatggcatttggcttctgagaaaggtagctatgaaataatccaagatactgatgaagacacagctgttaacaattggctgatcagcccccagaatgcctcacgtgcttggggagaaagcacccctcttgccaacaagcctggaaagcagagtggccacccaaagtttcctagagttagacataaatctctacaagtaagacaggatggaggaaagagtagactgaagaaaagccagtttctcattaagacacgaaaaaagaaaaaagagaagcacacacaccatgctcctttatctccgaggacctttcaccctctaagaagtgaagcctacaacacattttcagaaagaagacttaagcattcgttggtgcttcataaatccaatgaaacatctcttcccacagacctcaatcagacattgccctctatggattttggctggatagcctcacttcctgaccataatcagaattcctcaaatgacactggtcaggcaagctgtcctccaggtctttatcagacagtgcccccagaggaacactatcaaacattccccattcaagaccctgatcaaatgcactctacttcagaccccagtcacagatcctcttctccagagctcagtgaaatgcttgagtatgaccgaagtcacaagtccttccccacagatataagtcaaatgtccccttcctcagaacatgaagtctggcagacagtcatctctccagacctcagccaggtgaccctctctccagaactcagccagacaaacctctctccagacctcagccacacgactctctctccagaactcattcagagaaacctttccccagccctcggtcagatgcccatttctccagacctcagccatacaaccctttctccagacctcagccatacaaccctttctttagacctcagccagacaaacctctctccagaactcagtcagacaaacctttctccagccctcggtcagatgcccctttctccagacctcagccatacaaccatttctctagacttcagccagacaaacctctctccagaactcagccatatgactctctctccagaactcagtcagacaaacctttccccagccctcggtcagatgcccatttctccagacctcagccatacaaccctttctctagacttcagccagacaaacctctctccagaactcagtcaaacaaacctttccccagccctcggtcagatgcccctttctccagaccccagccatacaaccctttctctagacctcagccagacaaacctctctccagaactcagtcagacaaacctttccccagacctcagtgagatgcccctctttgcagatctcagtcaaattccccttaccccagacctcgaccagatgacactttctccagaccttggtgagacagatctttccccaaactttggtcagatgtccctttccccagacctcagccaggtgactctctctccagacatcagtgacaccacccttctcccggatctcagccagatatcacctcctccagaccttgatcagatattctacccttctgaatctagtcagtcattgcttcttcaagaatttaatgagtcttttccttatccagaccttggtcagatgccatctccttcatctcctactctcaatgatacttttctatcaaaggaatttaatccactggttatagtgggcctcagtaaagatggtacagattacattgagatcattccaaaggaagaggtccagagcagtgaagatgactatgctgaaattgattatgtgccctatgatgacccctacaaaactgatgttaggacaaacatcaactcctccagagatcctgacaacattgcagcatggtacctccgcagcaacaatggaaacagaagaaattattacattgctgctgaagaaatatcctgggattattcagaatttgtacaaagggaaacagatattgaagactctgatgatattccagaagataccacatataagaaagtagtttttcgaaagtacctcgacagcacttttaccaaacgtgatcctcgaggggagtatgaagagcatctcggaattcttggtcctattatcagagctgaagtggatgatgttatccaagttcgttttaaaaatttagcatccagaccgtattctctacatgcccatggactttcctatgaaaaatcatcagagggaaagacttatgaagatgactctcctgaatggtttaaggaagataatgctgttcagccaaatagcagttatacctacgtatggcatgccactgagcgatcagggccagaaagtcctggctctgcctgtcgggcttgggcctactactcagctgtgaacccagaaaaagatattcactcaggcttgataggtcccctcctaatctgccaaaaaggaatactacataaggacagcaacatgcctgtggacatgagagaatttgtcttactatttatgacctttgatgaaaagaagagctggtactatgaaaagaagtcccgaagttcttggagactcacatcctcagaaatgaaaaaatcccatgagtttcacgccattaatgggatgatctacagcttgcctggcctgaaaatgtatgagcaagagtgggtgaggttacacctgctgaacataggcggctcccaagacattcacgtggttcactttcacggccagaccttgctggaaaatggcaataaacagcaccagttaggggtctggccccttctgcctggttcatttaaaactcttgaaatgaaggcatcaaaacctggctggtggctcctaaacacagaggttggagaaaaccagagagcagggatgcaaacgccatttcttatcatggacagagactgtaggatgccaatgggactaagcactggtatcatatctgattcacagatcaaggcttcagagtttctgggttactgggagcccagattagcaagattaaacaatggtggatcttataatgcttggagtgtagaaaaacttgcagcagaatttgcctctaaaccttggatccaggtggacatgcaaaaggaagtcataatcacagggatccagacccaaggtgccaaacactacctgaagtcctgctataccacagagttctatgtagcttacagttccaaccagatcaactggcagatcttcaaagggaacagcacaaggaatgtgatgtattttaatggcaattcagatgcctctacaataaaagagaatcagtttgacccacctattgtggctagatatattaggatctctccaactcgagcctataacagacctacccttcgattggaactgcaaggttgtgaggtaaatggatgttccacacccctgggtatggaaaatggaaagatagaaaacaagcaaatcacagcttcttcgtttaagaaatcttggtggggagattactgggaacccttccgtgcccgtctgaatgcccagggacgtgtgaatgcctggcaagccaaggcaaacaacaataagcagtggctagaaattgatctactcaagatcaagaagataacggcaattataacacagggctgcaagtctctgtcctctgaaatgtatgtaaagagctataccatccactacagtgagcagggagtggaatggaaaccatacaggctgaaatcctccatggtggacaagatttttgaaggaaatactaataccaaaggacatgtgaagaactttttcaaccccccaatcatttccaggtttatccgtgtcattcctaaaacatggaatcaaagtattgcacttcgcctggaactctttggctgtgatatttactagaattgaacattcaaaaacccctggaagagactctttaagacctcaaaccatttagaatgggcaatgtattttacgctgtgttaaatgttaacagttttccactatttctctttcttttctattagtgaataaaattttatac

SEQ ID NO: 1413 - protein, 2000 aa, Homo sapien
MFPGCPRLWVLVVLGTSWVGWGSQGTEAAQLRQFYVAAQGISWSYRPEPTNSSLNLSVTSFKKIVYREYEPYFKKEKPQSTISGLLGPTLYAEVGDIIKVHFKNKADKPLSIHPQGIRYSKLSEGASYLDHTFPAEKMDDAVAPGREYTYEWSISEDSGPTHDDPPCLTHIYYSHENLIEDFNSGLIGPLLICKKGTLTEGGTQKTFDKQIVLLFAVFDESKSWSQSSSLMYTVNGYVNGTMPDITVCAHDHISWHLLGMSSGPELFSIHFNGQVLEQNHHKVSAITLVSATSTTANMTVGPEGKWIISSLTPKHLQAGMQAYIDIKNCPKKTRNLKKITREQRRHMKRWEYFIAAEEVIWDYAPVIPANMDKKYRSQHLDNFSNQIGKHYKKVMYTQYEDESFTKHTVNPNMKEDGILGPIIRAQVRDTLKIVFKNMASRPYSIYPHGVTFSPYEDEVNSSFTSGRNNTMIRAVQPGETYTYKWNILEFDEPTENDAQCLTRPYYSDVDIMRDIASGLIGLLLICKSRSLDRRGIQRAADIEQQAVFAVFDENKSWYLEDNINKFCENPDEVKRDDPKFYESNIMSTINGYVPESITTLGFCFDDTVQWHFCSVGTQNEILTIHFTGHSFIYGKRHEDTLTLFPMRGESVTVTMDNVGTWMLTSMNSSPRSKKLRLKFRDVKCIPDDDEDSYEIFEPPESTVMATRKMHDRLEPEDEESDADYDYQNRLAAALGIRSFRNSSLNQEEEEFNLTALALENGTEFVSSNTDIIVGSNYSSPSNISKFTVNNLAEPQKAPSHQQATTAGSPLRHLIGKNSVLNSSTAEHSSPYSEDPIEDPLQPDVTGIRLLSLGAGEFRSQEHAKRKGPKVERDQAAKHRFSWMKLLAHKVGRHLSQDTGSPSGMRPWEDLPSQDTGSPSRMRPWEDPPSDLLLLKQSNSSKILVGRWHLASEKGSYEIIQDTDEDTAVNNWLISPQNASRAWGESTPLANKPGKQSGHPKFPRVRHKSLQVRQDGGKSRLKKSQFLIKTRKKKKEKHTHHAPLSPRTFHPLRSEAYNTFSERRLKHSLVLHKSNETSLPTDLNQTLPSMDFGWIASLPDHNQNSSNDTGQASCPPGLYQTVPPEEHYQTFPIQDPDQMHSTSDPSHRSSSPELSEMLEYDRSHKSFPTDISQMSPSSEHEVWQTVISPDLSQVTLSPELSQTNLSPDLSHTTLSPELIQRNLSPALGQMPISPDLSHTTLSPDLSHTTLSLDLSQTNLSPELSQTNLSPALGQMPLSPDLSHTTISLDFSQTNLSPELSHMTLSPELSQTNLSPALGQMPISPDLSHTTLSLDFSQTNLSPELSQTNLSPALGQMPLSPDPSHTTLSLDLSQTNLSPELSQTNLSPDLSEMPLFADLSQIPLTPDLDQMTLSPDLGETDLSPNFGQMSLSPDLSQVTLSPDISDTTLLPDLSQISPPPDLDQIFYPSESSQSLLLQEFNESFPYPDLGQMPSPSSPTLNDTFLSKEFNPLVIVGLSKDGTDYIEIIPKEEVQSSEDDYAEIDYVPYDDPYKTDVRTNINSSRDPDNIAAWYLRSNNGNRRNYYIAAEEISWDYSEFVQRETDIEDSDDIPEDTTYKKVVFRKYLDSTFTKRDPRGEYEEHLGILGPIIRAEVDDVIQVRFKNLASRPYSLHAHGLSYEKSSEGKTYEDDSPEWFKEDNAVQPNSSYTYVWHATERSGPESPGSACRAWAYYSAVNPEKDIHSGLIGPLLICQKGILHKDSNMPVDMREFVLLFMTFDEKKSWYYEKKSRSSWRLTSSEMKKSHEFHAINGMIYSLPGLKMYEQEWVRLHLLNIGGSQDIHVVHFHGQTLLENGNKQHQLGVWPLLPGSFKTLEMKASKPGWWLLNTEVGENQRAGMQTPFLIMDRDCRMPMGLSTGIISDSQIKASEFLGYWEPRLARLNNGGSYNAWSVEKLAAEFASKPWIQVDMQKEVIITGIQTQGAKHYLKSCYTTEFYVAYSSN

SEQ ID NO: 1414 - DNA, 6914 bp, Homo sapien; identical to SEQ ID NO: 1412

SEQ ID NO: 1415 - protein, 2224 aa, Homo sapien
MFPGCPRLWVLVVLGTSWVGWGSQGTEAAQLRQFYVAAQGISWSYRPEPTNSSLNLSVTSFKKIVYREYEPYFKKEKPQSTISGLLGPTLYAEVGDIIKVHFKNKADKPLSIHPQGIRYSKLSEGASYLDHTFPAEKMDDAVAPGREYTYEWSISEDSGPTHDDPPCLTHIYYSHENLIEDFNSGLIGPLLICKKGTLTEGGTQKTFDKQIVLLFAVFDESKSWSQSSSLMYTVNGYVNGTMPDITVCAHDHISWHLLGMSSGPELFSIHFNGQVLEQNHHKVSAITLVSATSTTANMTVGPEGKWIISSLTPKHLQAGMQAYIDIKNCPKKTRNLKKITREQRRHMKRWEYFIAAEEVIWDYAPVIPANMDKKYRSQHLDNFSNQIGKHYKKVMYTQYEDESFTKHTVNPNMKEDGILGPIIRAQVRDTLKIVFKNMASRPYSIYPHGVTFSPYEDEVNSSFTSGRNNTMIRAVQPGETYTYKWNILEFDEPTENDAQCLTRPYYSDVDIMRDIASGLIGLLLICKSRSLDRRGIQRAADIEQQAVFAVFDENKSWYLEDNINKFCENPDEVKRDDPKFYESNIMSTINGYVPESITTLGFCFDDTVQWHFCSVGTQNEILTIHFTGHSFIYGKRHEDTLTLFPMRGESVTVTMDNVGTWMLTSMNSSPRSKKLRLKFRDVKCIPDDDEDSYEIFEPPESTVMATRKMHDRLEPEDEESDADYDYQNRLAAALGIRSFRNSSLNQEEEEFNLTALALENGTEFVSSNTDIIVGSNYSSPSNISKFTVNNLAEPQKAPSHQQATTAGSPLRHLIGKNSVLNSSTAEHSSPYSEDPIEDPLQPDVTGIRLLSLGAGEFRSQEHAKRKGPKVERDQAAKHRFSWMKLLAHKVGRHLSQDTGSPSGMRPWEDLPSQDTGSPSRMRPWEDPPSDLLLLKQSNSSKILVGRWHLASEKGSYEIIQDTDEDTAVNNWLISPQNASRAWGESTPLANKPGKQSGHPKFPRVRHKSLQVRQDGGKSRLKKSQFLIKTRKKKKEKHTHHAPLSPRTFHPLRSEAYNTFSERRLKHSLVLHKSNETSLPTDLNQTLPSMDFGWIASLPDHNQNSSNDTGQASCPPGLYQTVPPEEHYQTFPIQDPDQMHSTSDPSHRSSSPELSEMLEYDRSHKSFPTDISQMSPSSEHEVWQTVISPDLSQVTLSPELSQTNLSPDLSHTTLSPELIQRNLSPALGQMPISPDLSHTTLSPDLSHTTLSLDLSQTNLSPELSQTNLSPALGQMPLSPDLSHTTISLDFSQTNLSPELSHMTLSPELSQTNLSPALGQMPISPDLSHTTLSLDFSQTNLSPELSQTNLSPALGQMPLSPDPSHTTLSLDLSQTNLSPELSQTNLSPDLSEMPLFADLSQIPLTPDLDQMTLSPDLGETDLSPNFGQMSLSPDLSQVTLSPDISDTTLLPDLSQISPPPDLDQIFYPSESSQSLLLQEFNESFPYPDLGQMPSPSSPTLNDTFLSKEFNPLVIVGLSKDGTDYIEIIPKEEVQSSEDDYAEIDYVPYDDPYKTDVRTNINSSRDPDNIAAWYLRSNNGNRRNYYIAAEEISWDYSEFVQRETDIEDSDDIPEDTTYKKVVFRKYLDSTFTKRDPRGEYEEHLGILGPIIRAEVDDVIQVRFKNLASRPYSLHAHGLSYEKSSEGKTYEDDSPEWFKEDNAVQPNSSYTYVWHATERSGPESPGSACRAWAYYSAVNPEKDIHSGLIGPLLICQKGILHKDSNMPVDMREFVLLFMTFDEKKSWYYEKKSRSSWRLTSSEMKKSHEFHAINGMIYSLPGLKMYEQEWVRLHLLNIGGSQDIHVVHFHGQTLLENGNKQHQLGVWPLLPGSFKTLEMKASKPGWWLLNTEVGENQRAGMQTPFLIMDRDCRMPMGLSTGIISDSQIKASEFLGYWEPRLARLNNGGSYNAWSVEKLAAEFASKPWIQVDMQKEVIITGIQTQGAKHYLKSCYTTEFYVAYSSNQINWQIFKGNSTRNVMYFNGNSDASTIKENQFDPPIVARYIRISPTRAYNRPTLRLELQGCEVNGCSTPLGMENGKIENKQITASSFKKSWWGDYWEPFRARLNAQGRVNAWQAKANNNKQWLEIDLLKIKKITAIITQGCKSLSSEMYVKSYTIHYSEQGVEWKPYRLKSSMVDKIFEGNTNTKGHVKNFFNPPIISRFIRVIPKTWNQSIALRLELFGCDIY

SEQ ID NO: 1416 - DNA, 4010 bp, Homo sapien
cggagggggcgggccgggctgcgttcgctccagccgcggctctacagcagcgggcggcgggacccgggacccagcttggcgacggcgattctcgacgcgggcccccaggattctcccggcgccccacctctggagcagcccctgccgccagcgtcaggtccaccccggaatcccagggactctcggcgccgaacggacccgggccggtgcaacggggtccccggactggagaagacgcgggtggcaccgtgcgagctccaggagccccgggtccactgcgaggcctcggggggcgcagacctgcagagactgcggccaacgggaagaaataaagggattatagtccacccaattcacagacttctgagactcagacacgaggagagatagagaaccgccaatctctagatcaacaagcaaaggaggtgccaagcctgtttgtcttcattgtgacactggagtctagatgctgggaagtccaagatcagggtgccggcatggtcagttcctggcgaagcctctcttctaggtttcagactgccctcttctttgttgtgtcctcgaatggcagaaaaaggggtggctgttggaggaagggaggagagtaaatgaagagaaagaactggaataaccccttgcagaaaaaaaaaaaaagggaagcttagctgtacaccctgagtcttgcaaaagctgcagccccacccaggagcagggtggtggctggggcgatggtggacgccctgaagatgtcccatggctactgaaggggctgcccagttagggaacagagtggcgggcatggtgtgtagcctatgggtgctgctcctggtgtcttcagttctggctctggaagaggtattgctggacaccaccggagagacatctgagattggctggctcacctacccaccaggggggtgggacgaggtgagtgttctggacgaccagcgacgcctgactcggacctttgaggcatgtcatgtggcaggggcccctccaggcaccgggcaggacaattggttgcagacacactttgtggagcggcgcggggcccagagggcgcacattcgactccacttctctgtgcgggcatgctccagcctgggtgtgagcggcggcacctgccgggagaccttcaccctttactaccgtcaggctgaggagcccgacagccctgacagcgtttcctcctggcacctcaaacgctggaccaaggtggacacaattgcagcagacgagagctttccctcctcctcctcctcctcctcctcttcttcctctgcagcgtgggctgtgggaccccacggggctgggcagcgggctggactgcaactgaacgtcaaagagcggagctttgggcctctcacccaacgcggcttctacgtggccttccaggacacgggggcctgcctggccctggtcgctgtcaggctcttctcctacacctgccctgccgtgctccgatcctttgcttcctttccagagacgcaggccagtggggctgggggggcctccctggtggcagctgtgggcacctgtgtggctcatgcagagccagaggaggatggagtagggggccaggcaggaggcagcccccccaggctgcactgcaacggggagggcaagtggatggtagctgtcgggggctgccgctgccagcctggataccaaccagcacgaggagacaaggcctgccaagcctgcccacgggggctctataagtcttctgctgggaatgctccctgctcaccatgccctgcccgcagtcacgctcccaacccagcagcccccgtttgcccctgcctggagggcttctaccgggccagttccgacccaccagaggccccctgcactggtcctccatcggctccccaggagctttggtttgaggtgcaaggctcagcactcatgctacactggcgcctgcctcgggagctggggggtcgaggggacctgctcttcaatgtcgtgtgcaaggagtgtgaaggccgccaggaacctgccagcggtggtgggggcacttgtcaccgctgcagggatgaggtccacttcgaccctcgccagagaggcctgactgagagccgagtgttagtggggggactccgggcacacgtaccctacatcttagaggtgcaggctgttaatggggtgtctgagctcagccctgaccctcctcaggctgcagccatcaatgtcagcaccagccatgaagtgccctctgctgtccctgtggtgcaccaggtgagccgggcatccaacagcatcacggtgtcctggccgcagcccgaccagaccaatgggaacatcctggactatcagctccgctactatgaccaggcagaagacgaatcccactccttcaccctgaccagcgagaccaacactgccaccgtgacacagctgagccctggccacatctatggtttccaggtgcgggcccggactgctgccggccacggcccctacgggggcaaagtctatttccagacacttcctcaaggggagctgtcttcccagcttccggaaagactctccttggtgatcggctccatcctgggggctttggccttcctcctgctggcagccatcaccgtgctggcggtcgtcttccagcggaagcggcgtgggactggctacacggagcagctgcagcaatacagcagcccaggactcggggtgaagtattacatcgacccctccacctacgaggacccctgtcaggccatccgagaacttgcccgggaagtcgatcctgcttatatcaagattgaggaggtcattgggacaggctcttttggagaagtgcgccagggccgcctgcagccacggggacggagggagcagactgtggccatccaggccctgtgggccgggggcgccgaaagcctgcagatgaccttcctgggccgggccgcagtgctgggtcagttccagcaccccaacatcctgcggctggagggcgtggtcaccaagagccgacccctcatggtgctgacggagttcatggagcttggccccctggacagcttcctcaggcagcgggagggccagttcagcagcctgcagctggtggccatgcagcggggagtggctgctgccatgcagtacctgtccagctttgccttcgtccatcgctcgctgtctgcccacagcgtgctggtgaatagccacttggtgtgcaaggtggcccgtcttggccacagtcctcagggcccaagttgtttgcttcgctgggcagccccagaggtcattgcacatggaaagcatacaacatccagtgatgtctggagctttgggatactcatgtgggaagtgatgagttatggagaacggccttactgggacatgagtgagcaggaggtactaaatgcaatagagcaggagttccggctgcccccgcctccaggctgtcctcctggattacatctacttatgttggacacttggcagaaggaccgtgcccggcggcctcattttgaccagctggtggctgcatttgacaagatgatccgcaagccagataccctgcaggctggcggggacccaggggaaaggccttcccaggcccttctgacccctgtggccctggactttccttgtctggactcaccccaggcctggctttcagccattggactggagtgctaccaggacaacttctccaagtttggcctctgtaccttcagtgatgtggctcagctcagcctagaagacctgcctgccctgggcatcaccctggctggccaccagaagaagctgctgcaccacatccagctccttcagcaacacctgaggcagcagggctcagtggaggtctgagaatgacgatacccgtgactcagccctggacactggtccgagaagggacatgtgggacgtgagccgggctccaacagcctctgtgagagatgccccacaccaaacccaaccctcccgatggctgcattccctggtcctccgcctctccaccagccccctcctcattaaagggaaagaagggaatttgcaaa

SEQ ID NO: 1417 - protein, 1006 aa, Homo sapien
MVCSLWVLLLVSSVLALEEVLLDTTGETSEIGWLTYPPGGWDEVSVLDDQRRLTRTFEACHVAGAPPGTGQDNWLQTHFVERRGAQRAHIRLHFSVRACSSLGVSGGTCRETFTLYYRQAEEPDSPDSVSSWHLKRWTKVDTIAADESFPSSSSSSSSSSSAAWAVGPHGAGQRAGLQLNVKERSFGPLTQRGFYVAFQDTGACLALVAVRLFSYTCPAVLRSFASFPETQASGAGGASLVAAVGTCVAHAEPEEDGVGGQAGGSPPRLHCNGEGKWMVAVGGCRCQPGYQPARGDKACQACPRGLYKSSAGNAPCSPCPARSHAPNPAAPVCPCLEGFYRASSDPPEAPCTGPPSAPQELWFEVQGSALMLHWRLPRELGGRGDLLFNVVCKECEGRQEPASGGGGTCHRCRDEVHFDPRQRGLTESRVLVGGLRAHVPYILEVQAVNGVSELSPDPPQAAAINVSTSHEVPSAVPVVHQVSRASNSITVSWPQPDQTNGNILDYQLRYYDQAEDESHSFTLTSETNTATVTQLSPGHIYGFQVRARTAAGHGPYGGKVYFQTLPQGELSSQLPERLSLVIGSILGALAFLLLAAITVLAVVFQRKRRGTGYTEQLQQYSSPGLGVKYYIDPSTYEDPCQAIRELAREVDPAYIKIEEVIGTGSFGEVRQGRLQPRGRREQTVAIQALWAGGAESLQMTFLGRAAVLGQFQHPNILRLEGVVTKSRPLMVLTEFMELGPLDSFLRQREGQFSSLQLVAMQRGVAAAMQYLSSFAFVHRSLSAHSVLVNSHLVCKVARLGHSPQGPSCLLRWAAPEVIAHGKHTTSSDVWSFGILMWEVMSYGERPYWDMSEQEVLNAIEQEFRLPPPPGCPPGLHLLMLDTWQKDRARRPHFDQLVAAFDKMIRKPDTLQAGGDPGERPSQALLTPVALDFPCLDSPQAWLSAIGLECYQDNFSKFGLCTFSDVAQLSLEDLPALGITLAGHQKKLLHHIQLLQQHLRQQGSVEV

SEQ ID NO: 1418 - DNA, 4050 bp, Homo sapien
gaattcggcacgaggtcacccggataggtaaaggaaaacatgcctgccacacggaagccaatgagatatgggcatacagagggacacacggaggtctgttttgatgattctgggagttttattgtgacttgtggaagtgatggtgatgtgaggatttgggaagacttggatgatgatgatcctaagttcattaatgttggagaaaaggcatattcatgtgctttgaagagtggaaaactggtcactgcagtttctaataatactattcaagtccacacatttcctgaaggagttccagatggtatattgactcgcttcactacaaatgcaaaccatgtggtctttaatggggatggtactaaaattgctgctggatctagtgattttctagtcaaaattgtggatgtgatggatagcagccaacagaaaacatttcgaggacatgatgcccctgttttaagtctttcctttgatcctaaggacatctttctggcatcagctagttgtgatggatctgtcagagtgtggcaaatttcagatcagacatgtgctattagttggccactgctacaaaaatgcaacgatgtgataaatgcaaaatcaatctgcagacttgcttggcagccaaaaagtgggaagttactggcaattcctgtggaaaaatctgttaagctatatagaagagaatcttggagtcatcaatttgatctttcagataatttcatctctcagaccctcaatatagtaacctggtctccctgtgggcaatatttagctgcaggtagtattaatggtctaatcatagtttggaatgtggaaaccaaagactgcatggaaagggtgaaacatgagaaaggttatgcaatttgtggtctggcatggcatcctacttgtggtcgaatatcgtatactgatgcggaaggaaatctagggcttctagagaatgtttgtgaccccagtggaaagacatcaagcagtaaggtatctagcagagtggaaaaggattataatgatctttttgatggagatgatatgagtaatgctggtgattttctaaatgacaatgcagttgagatcccttctttttcaaaagggattataaatgatgatgaggatgatgaagacctcatgatggcttcaggtcgtcctagacagcgaagtcacatcctagaagatgatgaaaactcagttgatatttcaatgctaaaaactggttctagtcttctcaaagaggaggaggaagatggtcaagaaggcagcattcacaatctaccacttgtaacatcccaaaggccattttatgatggacccatgccaactccccggcaaaagccatttcagtcaggttctacaccgttgcatctcactcacagattcatggtgtggaactctattggaattattcgctgctataatgatgagcaagacaatgccatagatgtggagttccatgatacctccatacaccatgcaacacacttatcaaacactttgaattatacaatagcagatctttcccacgaagctattttgttggcatgtgaaagcactgatgaactagcaagcaagcttcactgcctgcactttagttcttgggattcaagcaaagagtggataatagacttgcctcagaatgaggatattgaagccatatgtctcggtcaaggatgggctgctgccgctactagtgccctgcttcttcgattgtttactattggaggggttcaaaaagaggtattcagccttgctggacctgtggtgtcaatggcaggacatggagaacagcttttcattgtttatcacagaggtacaggatttgatggggatcagtgccttggagttcaactgctagagctggggaaaaagaaaaaacaaattttgcatggtgaccctcttcctcttacaaggaaatcctaccttgcatggattgggttttcagctgaaggtaccccttgttacgtggattcagaaggaattgttcgaatgcttaacagaggacttggtaatacgtggactcctatatgtaatacaagagagcactgcaaaggaaaatctgatcactactgggtggttggtatccatgaaaatccccagcaactaaggtgcattccttgtaaaggttctcggtttcccccaacccttccacgccctgctgttgctatattatcctttaagcttccttactgtcagattgcaacagagaaaggacaaatggaggagcaattttggcgttcagttatatttcacaaccaccttgattatttagctaaaaatggttatgaatatgaagagagcactaaaaatcaagcaacaaaagagcaacaggaacttttaatgaaaatgcttgcgctttcttgtaaactggagcgagaattccgttgtgtggaacttgctgatctaatgactcaaaatgctgtgaatttagccattaaatatgcttctcgctctcggaaattaatactggctcaaaaactaagtgaactggctgtagagaaggcagccgaattgacagcaacccaggtggaagaggaagaagaagaagaagatttcagaaaaaagctgaatgctggttacagcaatactgctacagagtggagccaaccaaggttcagaaatcaagttgaagaagatgctgaggacagtggagaagctgatgatgaagaaaaaccagaaatacataagcctggacagaactcgttttccaaaagtacaaattcctctgatgtttcagctaagtcaggtgcagttacctttagcagccaaggacgagtaaatccctttaaggtatcagccagttccaaagaaccagccatgtcaatgaattcagcacgttcaactaatattttagacaatatgggcaaatcatccaagaaatccactgcacttagtcgaactacaaataatgaaaagtctcccattataaagcctctgattccaaagccgaagcctaagcaggcatctgcagcatcctatttccagaaaagaaattctcaaactaataaaactgaggaagtgaaagaagaaaatcttaaaaatgtattatctgaaaccccagctatatgtcctcctcaaaacactgaaaaccaaaggccaaagaccgggttccagatgtggttagaagaaaatagaagtaatattttgtctgacaatcctgacttttcagatgaagcagacataataaaagaaggaatgattcgatttagagtattgtcaactgaagaaagaaaggtgtgggctaacaaagccaaaggagaaacggcaagtgaaggaactgaagcaaagaagcgaaaacgtgtggttgatgaaagtgatgaaacagaaaaccaggaagaaaaagcaaaagagaacctgaatttgtctaaaaagcagaaacctttagatttttctacaaatcagaaactatcagcttttgcatttaagcaggagtaaaggaagaaagtgaccctagggaagtaatggattttttttactcatctttgaatatagactcgagtctttgggaaactcattatatatatattttttaaagagtttgaagcaactgtttgtctttataagataatgtagtaattatattggtgtaggtaacaggacatatgtaaaaactatcatctttgcagattactctgcctccaaatgcagggcctttcagagatgcattgtgattgtaattactgagttgaagctccaaccaatttgaatttgtttcttaaccttgaaaaatcattaaagccaaggtattaaaacctttgtgcattaataccttctaggggtttggttcatttggtttttgtcatgtgcaaggaaggacaatagtcctctttccaagtgtgttagcatagacttctctatatgtttctactagacctaggggatgacgtcttttaataatactggccctaaacatgtaaataatcttgtaggtgagactttttcttttgtgtttcggaaatttcctatgtggctttcagttgtctgtttgtatagcctggatttttttgaggtaaatgaaactttctcatttgtaaaaaaaaaaaaaaaaaactcgag

SEQ ID NO: 1419 - protein, 1129 aa, Homo sapien
MPATRKPMRYGHTEGHTEVCFDDSGSFIVTCGSDGDVRIWEDLDDDDPKFINVGEKAYSCALKSGKLVTAVSNNTIQVHTFPEGVPDGILTRFTTNANHVVFNGDGTKIAAGSSDFLVKIVDVMDSSQQKTFRGHDAPVLSLSFDPKDIFLASASCDGSVRVWQISDQTCAISWPLLQKCNDVINAKSICRLAWQPKSGKLLAIPVEKSVKLYRRESWSHQFDLSDNFISQTLNIVTWSPCGQYLAAGSINGLIIVWNVETKDCMERVKHEKGYAICGLAWHPTCGRISYTDAEGNLGLLENVCDPSGKTSSSKVSSRVEKDYNDLFDGDDMSNAGDFLNDNAVEIPSFSKGIINDDEDDEDLMMASGRPRQRSHILEDDENSVDISMLKTGSSLLKEEEEDGQEGSIHNLPLVTSQRPFYDGPMPTPRQKPFQSGSTPLHLTHRFMVWNSIGIIRCYNDEQDNAIDVEFHDTSIHHATHLSNTLNYTIADLSHEAILLACESTDELASKLHCLHFSSWDSSKEWIIDLPQNEDIEAICLGQGWAAAATSALLLRLFTIGGVQKEVFSLAGPVVSMAGHGEQLFIVYHRGTGFDGDQCLGVQLLELGKKKKQILHGDPLPLTRKSYLAWIGFSAEGTPCYVDSEGIVRMLNRGLGNTWTPICNTREHCKGKSDHYWVVGIHENPQQLRCIPCKGSRFPPTLPRPAVAILSFKLPYCQIATEKGQMEEQFWRSVIFHNHLDYLAKNGYEYEESTKNQATKEQQELLMKMLALSCKLEREFRCVELADLMTQNAVNLAIKYASRSRKLILAQKLSELAVEKAAELTATQVEEEEEEEDFRKKLNAGYSNTATEWSQPRFRNQVEEDAEDSGEADDEEKPEIHKPGQNSFSKSTNSSDVSAKSGAVTFSSQGRVNPFKVSASSKEPAMSMNSARSTNILDNMGKSSKKSTALSRTTNNEKSPIIKPLIPKPKPKQASAASYFQKRNSQTNKTEEVKEENLKNVLSETPAICPPQNTENQRPKTGFQMWLEENRSNILSDNPDFSDEADIIKEGMIRFRVLSTEERKVWANKAKGETASEGTEAKKRKRVVDESDETENQEEKAKENLNLSKKQKPLDFSTNQKLSAFAFKQE

SEQ ID NO: 1420 - DNA, 7239 bp, Homo sapien
cggacgcgtgggctgctgcggagccggcagcgcaggcgggcggagcggagctgcccccgtggtggcgggcgatgcccccgtgagcctccctcgccgcccctccccgccccgcgtgcctatccactcggagtccgcgccagcctggggccgggccgcgcctactgccgggttcgcggggcggggtcccggggcagcacctgccccgccttgcggagccgcctcggcctgtggaggccccctccctgtctggaccccggccccacctccggacccttttatcacatcgcctcctctgggagcctgccctgattgccttcacctcatttcttgaaaattggtgttttggcagaagtcaattgaagccttgtgcaaatgccctaggggtgtgctgttgggaggcagccccctgtgatgcggaacaccaggctcagattcatcagttcgagctgcctgaggccctgccaccccggggaccatgtttaacggggagccaggtcctgcctcatctggggcctccaggaatgtggtgcggagctccagcattggcggtgaaatctgcggatcccagcaagccgggggcggggctgggaccaccaccgccaagaagcggcggagcagcctgggtgccaagatggtggccatcgtgggcctgactcagtggagcaagagcacactccagcttccgcagcctgaaggggccaccaagaagctgcgcagcaacatccgccggagcacggagacaggcatcgcggtggagatgcggagccgggtcacacgccagggcagccgggagtccaccgatgggagcaccaacagcaacagctccgacggcacgttcatcttccccactacccggctaggggctgaaagccagttcagcgatttcctggatgggctgggaccagctcagattgtggggcgacagacactggcaacaccacccatgggagatgtgcacattgccatcatggaccggagtggccagctggaggtggaagtgattgaagctcggggcctgacccccaaaccaggctccaaatccctcccagccacctatatcaaggtttacctgctggagaatggggcctgcttggccaagaagaagacaaagatgaccaagaagacctgtgatcccctgtaccagcaggctctgctctttgacgagggaccccagggcaaggtgctgcaggtgatcgtctggggagactatggccgcatggaccacaagtgcttcatgggcatggcccagatcatgctggacgagctggacctcagcgccgcggtcaccggctggtacaaactcttccccacctcctcagtggcagactccacactcggatccctcaccaggcgcctgtcccagtcttccctggagagtgccaccagcccctcatgctcttaaggatgtcaggaagaggccaggatggtggtgtggggaggggtgcctgctggccccatgtcctcccctgtacatagtcttcgtgtctttctggaccccttgtcctgctgcatgcctgttggctactgggctcatcccagctggcagtggagactgtagtgtgtgcgtgtgtgcgtgcgtgtgtgtgtgtgtgtacgtgaccacgttctatctgttcatttgtctgggtatagtcactcctggtgatgatatgggctgaaatgtctccacgtctctttgtgtcttgttgaaaagaaacccaaaggagtgttgtgtggacatgactcaccctgaggagtctccagggatggaggtggggcatgcggccactggtcggtgctgcctggtcctggcctggggcagagcctgtgtgttcttcacctgtgcctgctcctggtggtctctgctttgttttctgtcttgtcttttgttccactcttgactctcccggctctgccactgttttctgagaaatgtagcatccgctgcagctggccacactgagggccctctgggaaccccaccccactggagccgctccggcagctcttcctgccactgaatgcgttctgcagcatgtagcatgcccacctagctccctggccagggccctggggaggcagagggtacccaggggactgagggcttagaaatgactttctctatgaggctggaacctcctccttcttccagtgaagcacgaggtcttggttccagggttcctggccaggtgcccccttagcatttgttcttcatctcctgtctcttcaagcctccccactccaccgtgccgaaggagctctgccagtgggcctgggcaggcagccacagagggcatgttatctgctaaagcaaacagtcctcctgaggccctgagggtggccctgaccccctcagggctcattcctggtgggcatgactcggtaaggaggttctgtgggtagggctgtttgctggaataaggagggctgaggctgagttgttccccgccactgttgaggatcccatctgacatttggggattcactgcatgaagttgttcatttggggctccagtttttgtgcatttccagaccagggtccctgtctgggagctcagacttagctgggctccagcagcctggctccggactctcgtctgccaccatcaccagctctgtctaagcaatacttacccctccgggcttccctgctttcctgtgccccactgctgccctctgcagagccatctgctccaggcacccacctgcctctgcttgctttctcacccatgtctggttggagcttctcacagccactcaaaccctgacttgatttgacaactgggccctgttggtggagaccagtgcctgaactggaccctgtgaaatctgtcccgtgggaatcctgaagtctgactcaggaatgcccagacctgtccctgtccctcctcagctctagggtgaaaggcgagaggttgcacaggacatggacagagcagcccttgggtttgtatctggtaggggagaaagcagcaggacagtggaggtgtgtggaaggcactctttccacctctctccaggcattatccccaggtgctgaaatggctgtggccccagcacctgaggcaggggtacgctacctggggtagcagtagaaaggtcttggggtctgaatgacttggggcctccattcataaccaaagttgtaggggcatggaggcagtggcgccttatggataggtcatctcagcccaaagggcctccttggctggcatggttctgtgttacgttgaagccagagtcttataacacctcccaagaaagataggggaagaagccagaaccccacctggcctgcccacaggacaagaagtgggtaagggcaggaaggaaatgaacggagttagctcccaggctcctatctctgcctgagcctctattcttatattatcagagaaagggaccattgggtgcatagagatggggaggaggccactgggctgaattttctctttaggcggaaatgctctccccaggcccattgcgttcgtcaagttcttggaaatggacaaagggctctgtcctcctcgaccctagtgggggatcaagaaggaaactccgttgcaaaagggtattttaatctcctgtttatgatatattcacctctagagcagtcactgtcagggtgttgcgaaaatactctacacctttgggatgatagggttgttagtgacccacaggacagtatagatgtttgtggatgtagcactgagtggtgatacccagaccagcagtcaccccaggaagtgggggctacccataccctcattcctctggtggggagctgcctgcagagaggcctgccactgggggttccaggccgtggtgacccttgcctctggggaagggttagcacaggggaggttctagctggaggaggggtctgatgtgctggtaacttgggctgacctacctacagtccctggctgccaaaactgctcagcagttgggccactccactattccacctctctaaaagaaggtaatttcctccccaaattgaccttggggaattattcttttaaccctttgcaccaaataagttactcatccccacctggattttaccccatgagggtaaagttgtgtgaggctgacacgtctgtgtgatgcagtgtggctgcacttaagggtctgtttctcagcatcatggatgcaggggcttgtctgaaaagccactctggacctagcctgtcccagaagaggagaatgcacaagtgtaactcctggttgtttgctggggtgggggagcatctgctgtttgaggacggggggtggggaaggaaggaacatgatccctccagaagtctcccaccctggggccaactcactgccatgttcagtgtcccggctccaaatgcccccttgcccagatgaaaccctgcagtggttacaggaatggagctctttgtcattccacctcctctggtcaggcgaggttcactgtgcatatggcagagacaggagtggccctgcagtgatgttgggttgtgggcagggacagtgatggatgactcagagcgtctgtctttgtatttctgctctgttcattctgtcccactttcttcatagactccttttccctgcaatgggtttttggtatgaaaaaggctccagtaaatggagccaagtcttggtttgacaaggggaacttgatccttcagggaagaatcatctccaaaatgactccccatctggtttcttctaccacccaattctactaggaaaggagcacttaggaggctcttgggatgcagcaagtcccaggcaatgccagcatttcatgggggctgaggcagaacccaggagctccaagaaaggccacccatagagctcatcctctgtggaatcactgccggttagaacactgaggtcaagccagtcctcccatggtcatgccacccaccagggaagcatgcctgatctcttctttactgccagccttgaggagagcagaagcctccatttttaaagacaataaagacctccaagggtacttctttggaaatgaaatgtagcacaatcttagcctacgttaccaggagccctgacatgcaaccagggtccctcttccatgccctgctgcccaggagttgctgagctcctcttcccctggggttccagccctcctaatacctcatattccccatcttcctcagcccagaaagcaatggggctttagtgatgctcctcttttgtgtctctctggttgcctctagcactgtgcaaactctgcaagaaattgctgcctttgcttgatgttgtagatgagttgccctccacctggctggagagatggcacatcattcagggccagaaggttgtccagcagtgtttctgcagtggctgcagggagatggaaaagaagagccctgcttccctgcctcctcctacctttctcttccactcctcagagttttcttctccagtatcctgacatgtaaagagattctttaaaatgctgcttcttctactggactgtctttcactgagtagtcagggaggagatgaaaatgtggacacatccccccgccttctccctcaaccttttcactcacgtcagaagaggttggggcaaaacaaaacaagcatgattgaagagcaggggaagcccacacaatcaggtgagccctgatgggggctggactggcctggtctggctgggaaaggattcttttaaaagcgtgcctgagcatctcagagcaatgtcagtgatgccaaagagagcaacttggcctccttgggcaccaactctgatggctgagttgcacaaacgtggctcagatgttggcatgcccgatggtgggaccttgttctctgataaagggcttaatctttccatgtagcaaagcaactttccctccctcccctccccccgaaccctgagcttgggcttgtgtgggcccagcatggctgtgcctgtgagggaagccacatcagtgagagaaagttgcattctctcaggggcctagattggcttggggcaggtgcttgttgaaaagcatgagtgtttctgctttgggaaacccttccagggctctggttggaaacttggccagtaaggacagggccttgggcctcccaaggagttcacaatgatgccaggaagggtccctgagcctgggttccagtcagcttggctaacagaatggggcttgggaattccaggggcaactgagcatccaccccattagccagtgatctggacagggacagctggctacagggaatcaaaggctgttctgtacagttttaccagaaactgtgaccttgggtaaggctcctcacttttctgggcctcaacttcctcatctgcaaaatcagagcattagctgctctccccatgattccctcccagttttaattaaaagtctctgatctggagcacatgagggttgcgagcctggtgcacctggttcctgtctccgtgggctggtttccttcagcccctgatgcccaggctgggtgcaggctctcatctggtccatgcccagatgctgcctcagacaagaactctgggaatcctaacagactctgctttcctctcttcgtggtttgtcctccctcttttattcttgtgtaatgatgagacataattaagggtcatctacaatggacaattttcaaggtgctgatgtgatgtcacaacctccgctacatcctgagtaagtcagtgtccccaacagcagatgaggctgggtctttcctcatttctgcttctgggatgacatcagtgggagagttgaagatctgagaattctaaaggaaatgttctctgatgggaggagagagggaacttatttcccttcaaagtagtttgcttcttaagaccactcctccctccagaatgtctttaaccagacatcatttcagaaggtggggcagctgcttccttaggaagagtgggcctgatagctcaaccaactcctttagcatgtaaactcacagaaggcaagaacccctttttttagactttccaaatgcatcctgcaaagagagagatagctgatagggactgacaagcacactgtttagataagaagcaattacccttttatatctgtgctctatacattttctatgtgcagcatctttcctaacttgttgtggttcccgggtggcaggtgcacagctgggagggactgccggctgtttcgtacaacattcttgccaattcccttgaggagaaaattcttcacatggcttctgcatgtacagtatttgggcagcaaaacatgattaaagtcagtttgaaaatgg

SEQ ID NO: 1421 - protein, 308 aa, Homo sapien
MFNGEPGPASSGASRNVVRSSSIGGEICGSQQAGGGAGTTTAKKRRSSLGAKMVAIVGLTQWSKSTLQLPQPEGATKKLRSNIRRSTETGIAVEMRSRVTRQGSRESTDGSTNSNSSDGTFIFPTTRLGAESQFSDFLDGLGPAQIVGRQTLATPPMGDVHIAIMDRSGQLEVEVIEARGLTPKPGSKSLPATYIKVYLLENGACLAKKKTKMTKKTCDPLYQQALLFDEGPQGKVLQVIVWGDYGRMDHKCFMGMAQIMLDELDLSAAVTGWYKLFPTSSVADSTLGSLTRRLSQSSLESATSPSCS

SEQ ID NO: 1422 - DNA, 4208 bp, Homo sapien
tctttaagatttgtagctactaagaaagaaaggagctttttttccttgggccttcaaactgaaagaaccgcatgagcctgacggcgcatggtcttaacatcaggctgtgcaggaagaagctatctgcagatggatgccagcacacacaaggaagcagagctctggcaacattgagtcaaagcaaggacacaacatcagagggacggcagagaatccttgtgtgtagtctttggtggcagtttgaaaattgcaaggagggactttaagactacttctgatttgcaaagatggtctgtgctccgagcaggctaaagtgactggacgagacgcactgttggagaaataaaaatgacttcccattatgtgattgccatctttgccctgatgagcttctgtttagccactgcaggtccagagcctggtgcactgtgtgaactgtcacctgtcagtgcctcccatcctgtccaggccttgatggagagcttcactgttttgtcaggctgtgccagcagaggcacaactgggctgccacaggaggtgcatgtcctgaatctcgcactgcgccaggggcctggccagctacagagagaggtcacacttcacctgaatcccatctcctcagtccacatccaccacaagtctgttgtgttcctgctcaactccccacaccccctggtgtggcatctgaagacagagagacttgccactggggtctccagactgtttttggtgtctgagggttctgtggtccagttttcatcagcaaacttctccttgacagcagaaacagaagaaaggaacttcccccatggaaatgaacatctgttaaattgggcccgaaaagagtatggagcagttacttcattcaccgaactcaagatagcaagaaacatttatattaaagtgggggaagatcaagtgttccctccaaagtgcaacatagggaagaattttctctcactcaattaccttgctgagtaccttcaacccaaagcagcagaagggtgtgtgatgtccagccagccccagaatgaggaagtacacatcatcgagctaatcacccccaactctaacccctacagtgctttccaggtggatataacaattgatataagaccttctcaagaggatcttgaagtggtcaaaaatctcatcctgatcttgaagtgcaaaaagtctgtcaactgggtgatcaaatcttttgatgttaagggaagcctgaaaattattgctcctaacagtattggctttggaaaagagagtgaaagatctatgacaatgaccaaatcaataagagatgacattccttcaacccaagggaatctggtgaagtgggctttggacaatggctatagtccaataacttcatacacaatggctcctgtggcaatagtatttcatcttcggcttgaaaataatgaggagatgggagatgaggaagtccacactattcctcctgagctacggatcctgctggaccctggtgccctgcctgccctgcagaacccgcccatccggggaggggaaggccaaaatggaggccttccgtttcctttcccagatatttccaggagagtctggaatgaagagggagaagatgggctccctcggccaaaggaccctgtcattcccagcatacaactgtttcctggtctcagagagccagaagaggtgcaagggagcgtggatattgccctgtctgtcaaatgtgacaatgagaagatgatcgtggctgtagaaaaagattcttttcaggccagtggctactcggggatggacgtcaccctgttggatcctacctgcaaggccaagatgaatggcacacactttgttttggagtctcctctgaatggctgcggtactcggccccggtggtcagcccttgatggtgtggtctactataactccattgtgatacaggttccagcccttggggacagtagtggttggccagatggttatgaagatctggagtcaggtgataatggatttccgggagatatggatgaaggagatgcttccctgttcacccgacctgaaatcgtggtgtttaattgcagccttcagcaggtgaggaaccccagcagcttccaggaacagccccacggaaacatcaccttcaacatggagctatacaacactgacctctttttggtgccctcccagggcgtcttctctgtgccagagaatggacacgtttatgttgaggtatctgttactaaggctgaacaagaactgggatttgccatccaaacgtgctttatctctccatattcgaaccctgataggatgtctcattacaccattattgagaatatttgtcctaaagatgaatctgtgaaattctacagtcccaagagagtgcacttccctatcccgcaagctgacatggataagaagcgattcagctttgtcttcaagcctgtcttcaacacctcactgctctttctacagtgtgagctgacgctgtgtacgaagatggagaagcacccccagaagttgcctaagtgtgtgcctcctgacgaagcctgcacctcgctggacgcctcgataatctgggccatgatgcagaataagaagacgttcaccaagccccttgctgtgatccaccatgaagcagaatctaaagaaaaaggtccaagcatgaaggaaccaaatccaatttctccaccaattttccatggtctggacaccctaaccgtgatgggcattgcgtttgcagcctttgtgatcggagcactcctgacgggggccttgtggtacatctattctcacacaggggagacagcaggaaggcagcaagtccccacctccccgccagcctcggaaaacagcagtgctgcccacagcatcggcagcacgcagagcacgccttgctccagcagcagcacggcctagcccaacccaggcccaacccggcccaacccagcccagcccagctcagctcagctactccaagggcaggaccaatggctgagcctcgtgtccagactcagagggctggattttggttcccttgtaaagacagagtgaatttcagtataaagatcacccgttgtattcaccccacacccagggctagtataaacatgaccctgggcttctgtaccacactagaattcatgtgagaaagctaaaatggtggtcttctccaccagcccctcacaggcttgggggttttctatgtgaaacacatgccagtttttaaaatgctgctttgtccaggtgagaacatccataatttggggccctgagttttacccagactcaaggagttggtaaagggttaatagccagatagtagaaccagtgaggagatgcggccaaagattctttatatctgaaccaagatgtaaaacaagaaatgctttgaggctttctaagcgatcctcctgtctaatttgcacctttgtctggatgcactcttctgaccttgctgccacaacctgtggggtctgatgtgtcccaagatgggtgctgccctcagggactgcaccctgacaagtgttaaggcaacattccttgcttgtgccctgggccaaaaccaatgctgatgaccttatcagcttcctgtttcttcccatactgcatacaccactgcaaaatgtcttaatgcaaattttgtatttcttacaggcctacagaaattgaaaatgaccaaaatcaggaaccacagatttgtgcccattcctaatattttgttctgcaaattaatgtataatttgaggtgaaattcagttataaagtcaaggacgaatttgcacagtgatatatttctatgtgtatgcaagtacaagtatataatatgtcacctggcacattcattttctcagttgaagaagagaaaatttgaaaatgtccttatgcttttagagttgcaacttaagtatatttggtagggtgagtgtttccactcaaaatatgtcaacttaaaaaaaaataggccctttcataaaaaccaaactgtagcaagatgcaaatgcatggcaaatctgtcggtctccagttggttatctgaatagtgtcaccaattccaccaagacagtgctgagattggaaagggcactcatttggattgccttacttctcttgccttaaatatatcccatatatttaatatgtcaaaaagggcttgaggtgaatttcattaaatggaataatatgatgccactttgcagctaaaataagctcagtgatacctccttgtt

SEQ ID NO: 1423 - protein, 849 aa, Homo sapien
MTSHYVIAIFALMSFCLATAGPEPGALCELSPVSASHPVQALMESFTVLSGCASRGTTGLPQEVHVLNLALRQGPGQLQREVTLHLNPISSVHIHHKSVVFLLNSPHPLVWHLKTERLATGVSRLFLVSEGSVVQFSSANFSLTAETEERNFPHGNEHLLNWARKEYGAVTSFTELKIARNIYIKVGEDQVFPPKCNIGKNFLSLNYLAEYLQPKAAEGCVMSSQPQNEEVHIIELITPNSNPYSAFQVDITIDIRPSQEDLEVVKNLILILKCKKSVNWVIKSFDVKGSLKIIAPNSIGFGKESERSMTMTKSIRDDIPSTQGNLVKWALDNGYSPITSYTMAPVAIVFHLRLENNEEMGDEEVHTIPPELRILLDPGALPALQNPPIRGGEGQNGGLPFPFPDISRRVWNEEGEDGLPRPKDPVIPSIQLFPGLREPEEVQGSVDIALSVKCDNEKMIVAVEKDSFQASGYSGMDVTLLDPTCKAKMNGTHFVLESPLNGCGTRPRWSALDGVVYYNSIVIQVPALGDSSGWPDGYEDLESGDNGFPGDMDEGDASLFTRPEIVVFNCSLQQVRNPSSFQEQPHGNITFNMELYNTDLFLVPSQGVFSVPENGHVYVEVSVTKAEQELGFAIQTCFISPYSNPDRMSHYTIIENICPKDESVKFYSPKRVHFPIPQADMDKKRFSFVFKPVFNTSLLFLQCELTLCTKMEKHPQKLPKCVPPDEACTSLDASIIWAMMQNKKTFTKPLAVIHHEAESKEKGPSMKEPNPISPPIFHGLDTLTVMGIAFAAFVIGALLTGALWYIYSHTGETAGRQQVPTSPPASENSSAAHSIGSTQSTPCSSSSTA

SEQ ID NO: 1424 - DNA, 4508 bp, Homo sapien
cgggcagcgtggaccccggatgagttgcttttaggcttgctggcccgcggggctgtccaggcacgcgaggcccctcaggtacgccctctcttccctgcaggatccggccctcaaagacgagggtcacgcacgcgttacaaccccgaaacagtagcacaagatttaatttttaaaagagcgtgtttcttcggggcttgccgttcgttcgtttccagcctcaggaatttatggtcgcctttttgaatgagcaacaaaatgcttcaacaagttccagaaaacataaattttcctgctgaagaagagaaaatcttggagttttggactgaatttaattgttttcaggaatgcttaaagcaatcaaaacataaaccaaaatttaccttctatgatggtcctccttttgcaactggactgcctcactatggacatatacttgcgggtacaattaaagatatagttacaagatatgctcaccagagtgggtttcatgttgacagaagatttggatgggattgccatggcttacctgtggaatatgaaattgataagacactgggaatcagaggaccagaggatgtggccaaaatggggattacagagtataacaatcagtgccgagcaattgtgatgagatattctgctgagtggaagtctactgttagcagacttggccgatggattgactttgacaatgactataaaactctgtatccacaattcatggaatcagtctggtgggtcttcaaacaactctatgataaaggccttgtttatagaggtgtgaaagtcatgcccttctctacggcatgtaacactccactttccaacttcgagtcacaccagaattataaggatgttcaagatccttcagtatttgtaactttccctttggaagaagatgaaactgtatctttagttgcttggacaaccactccctggactctacctagtaaccttgctgtgtgtgttaatccagaaatgcaatatgtgaaaattaaagatgttgccagaggacgattactcattttaatggaagccagattgtcagccctctataaattggagagtgactatgagatccttgaaagatttcctggtgcctatcttaaaggcaagaagtacaggcccctgtttgactatttcctgaagtgtaaagagaatggcgctttcactgtgcttgttgacaactatgtgaaggaagaagaaggcacaggggttgtccaccaagctccttacttcggtgctgaggactatcgggtctgtatggactttaacattattcggaaagactcactccctgtttgccctgtggatgcttcaggctgcttcacaacggaggtgacagatttcgcaggacagtatgtgaaggatgctgacaaaagtatcatcaggactttgaaggaacaaggccgacttctggttgccaccaccttcactcacagctaccctttttgctggagatcagacactcctctaatttacaaagcagtgcccagctggtttgtgcgagtggagaacatggtggaccagctcctaaggaacaatgacctgtgctactgggtcccagagttggtacgagaaaaacgatttggaaattggctgaaagatgcacgtgactggacaatttccagaaacagatactggggcacccccatcccactgtgggtcagcgatgactttgaggaggtggtatgcattgggtcagtggcggaacttgaagaactgtcaggagcaaagatctcagatctccacagagagagtgttgaccacctgaccattccttcacgctgtgggaagggatccttgcaccgcatctctgaagtgtttgactgttggtttgagagtggcagcatgccctatgctcaggttcattacccgtttgaaaacaagagggagtttgaggatgcttttcctgcagatttcattgccgagggcatcgaccaaaccagaggatggttttataccctgctggtgctggccacggccctctttggacaaccgcctttcaagaacgtaattgtgaatgggcttgtcctggcaagtgatggccaaaaaatgagcaaacggaaaaagaattatccagatccagtttccatcatccagaagtatggtgctgatgccctcagattatatctgattaactcccctgtggtgagagcagaaaacctccgctttaaagaagagggtgtgcgggacgtccttaaggatgtactgctcccatggtacaatgcctatcgcttcttaatccagaacgttctgaggctccagaaggaggaagaaatagaatttctctacaatgagaacacggttagagaaagccccaacattacagaccggtggatcctgtccttcatgcagtctctcattggcttctttgagactgaaatggcagcttataggctttatactgtggtgcctcgcctggtcaagtttgtagatattctgaccaattggtatgttagaatgaaccgcagaagattaaagggtgaaaatgggatggaggattgtgtcatggccctagaaaccttgtttagtgttctgctttctctttgcagacttatagctccctacacaccttttctcactgaattgatgtaccagaatctaaaggtgctgattgaccctgtttctgttcaggacaaggacacactcagcattcactacctcatgctgccccgtgttcgagaagaattgattgacaagaaaacagagagtgcagtatctcagatgcagtctgtgattgaacttggaagagtgatcagagaccgaaaaactattcccataaagtatcctttgaaagaaattgtggttatccatcaagatccagaagctcttaaagatatcaagtctttggagaagtatatcattgaggaactcaatgttcgaaaagttacactgtctacagataaaaacaagtatggcattcggctaagggcagaaccagatcacatggtcctggggaagcgtctgaagggagcctttaaggcagtgatgacgtccatcaagcagttgagcagtgaggagctggagcagttccagaagactgggaccattgttgtggaaggccatgaattgcacgatgaagacatccgcctcatgtacacctttgatcaggccacaggtgggactgcgcaatttgaagcacactcagatgctcaggctttggtcctcttagatgtcactcctgaccagtcaatggtagatgaaggaatggctcgggaagtcatcaatcgcatacagaaacttcgcaaaaagtgcaatctggttccaactgatgaaatcacagtgtactataaagcaaagtctgaaggaacatatctgaatagtgttattgaaagccacacagagttcatatttaccaccataaaggctcccttgaaaccatatccagtttctccatcggataaagtccttattcaagaaaaaacacagttgaagggatctgaactggaaattacactcaccagaggatcttcccttcctggtcctgcttgtgcatatgtcaatcttaacatttgtgcaaatggcagtgaacaaggtggagtattgctcctggaaaatccaaaaggtgacaataggttggaccttttaaagctgaagagtgttgtcactagcatttttggtgtgaaaaatacagagctggctgtcttccatgatgaaacagaaatacaaaaccaaactgacttactgagtcttagtggaaaaacactttgtgtgactgcaggatcggctccctctctgatcaacagttctagtactcttctttgtcagtatatcaacctacagctcctgaatgcaaagccacaagagtgtttaatggggacagtgggcactctcctgcttgaaaacccacttgggcagaatggactcacccaccaaggtcttctgtatgaagcagccaaggtgtttggccttcggagcaggaagctaaagctgtttctgaatgagacccaaacgcaggaaattacagaagacatccccgtgaagactttgaatatgaagactgtgtatgtttctgtgttaccaacaacagcagacttctagcatgtacttatcaatgttgttcggtcagcccttccctaattacacctatcccctacacatacatgcacatagacacacacatgaacacactgaagatatttccttcaggtgtgtgtaaaatatgctgcttggattgaaattcaaatgggattgattagtcaagtaacttgagacctcacagtaatcttcacacttaaccttagacacctatgcagtcatgttgggagcaggttacaatgttacttcagcccacagtttatttctattcttgagttcttaagtacagaagatagaagtgatttaaatggcatagtatatatatcattttctggccttttaaaatttatttgagacctcttgatgaaatggacatattatatatttctgccacctggattttcctggataatttgatggaatattttaagtttcagtaaatcagaacaataaacaaactcagatat

SEQ ID NO: 1425 - protein, 1262 aa, Homo sapien
MLQQVPENINFPAEEEKILEFWTEFNCFQECLKQSKHKPKFTFYDGPPFATGLPHYGHILAGTIKDIVTRYAHQSGFHVDRRFGWDCHGLPVEYEIDKTLGIRGPEDVAKMGITEYNNQCRAIVMRYSAEWKSTVSRLGRWIDFDNDYKTLYPQFMESVWWVFKQLYDKGLVYRGVKVMPFSTACNTPLSNFESHQNYKDVQDPSVFVTFPLEEDETVSLVAWTTTPWTLPSNLAVCVNPEMQYVKIKDVARGRLLILMEARLSALYKLESDYEILERFPGAYLKGKKYRPLFDYFLKCKENGAFTVLVDNYVKEEEGTGVVHQAPYFGAEDYRVCMDFNIIRKDSLPVCPVDASGCFTTEVTDFAGQYVKDADKSIIRTLKEQGRLLVATTFTHSYPFCWRSDTPLIYKAVPSWFVRVENMVDQLLRNNDLCYWVPELVREKRFGNWLKDARDWTISRNRYWGTPIPLWVSDDFEEVVCIGSVAELEELSGAKISDLHRESVDHLTIPSRCGKGSLHRISEVFDCWFESGSMPYAQVHYPFENKREFEDAFPADFIAEGIDQTRGWFYTLLVLATALFGQPPFKNVIVNGLVLASDGQKMSKRKKNYPDPVSIIQKYGADALRLYLINSPVVRAENLRFKEEGVRDVLKDVLLPWYNAYRFLIQNVLRLQKEEEIEFLYNENTVRESPNITDRWILSFMQSLIGFFETEMAAYRLYTVVPRLVKFVDILTNWYVRMNRRRLKGENGMEDCVMALETLFSVLLSLCRLIAPYTPFLTELMYQNLKVLIDPVSVQDKDTLSIHYLMLPRVREELIDKKTESAVSQMQSVIELGRVIRDRKTIPIKYPLKEIVVIHQDPEALKDIKSLEKYIIEELNVRKVTLSTDKNKYGIRLRAEPDHMVLGKRLKGAFKAVMTSIKQLSSEELEQFQKTGTIVVEGHELHDEDIRLMYTFDQATGGTAQFEAHSDAQALVLLDVTPDQSMVDEGMAREVINRIQKLRKKCNLVPTDEITVYYKAKSEGTYLNSVIESHTEFIFTTIKAPLKPYPVSPSDKVLIQEKTQLKGSELEITLTRGSSLPGPACAYVNLNICANGSEQGGVLLLENPKGDNRLDLLKLKSVVTSIFGVKNTELAVFHDETEIQNQTDLLSLSGKTLCVTAGSAPSLINSSSTLLCQYINLQLLNAKPQECLMGTVGTLLLENPLGQNGLTHQGLLYEAAKVFGLRSRKLKLFLNETQTQEITEDIPVKTLNMKTVYVSVLPTTADF

SEQ ID NO: 1426 - DNA, 396 bp, Homo sapien
actccgccttccacgtgcacccactgcctcttcccttctcgcttgggaactctagtctcgcctcgggttgcaatggaccccaactgctcctgtgccgctggtgtctcctgcacctgcgccagctcctgcaagtgcaaagagtgcaaatgcacctcctgcaagaagagctgctgctcctgctgccctgtgggctgtgccaagtgtgcccaaggctgcatctgcaaaggggcatcggagaagtgcagctgctgcgcctgatgtcgggacagccctgctcccaagtacaaatagagtgacccgtaaaatctaggattttttgttttttgctacaatcttgacccctttgctacattcccttttttctgtgaaatatgtgaataataattaaacacttag

SEQ ID NO: 1427 - protein, 61 aa, Homo sapien
MDPNCSCAAGVSCTCASSCKCKECKCTSCKKSCCSCCPVGCAKCAQGCICKGASEKCSCCA

SEQ ID NO: 1428 - DNA, 1919 bp, Homo sapien
ctgaagaacaaatcagcctggtcaccagcttttcggaacagcagagacacagagggcagtcatgagtgaggtcaccaagaattccctggagaaaatccttccacagctgaaatgccatttcacctggaacttattcaaggaagacagtgtctcaagggatctagaagatagagtgtgtaaccagattgaatttttaaacactgagttcaaagctacaatgtacaacttgttggcctacataaaacacctagatggtaacaacgaggcagccctggaatgcttacggcaagctgaagagttaatccagcaagaacatgctgaccaagcagaaatcagaagtctagtcacttggggaaactacgcctgggtctactatcacttgggcagactctcagatgctcagatttatgtagataaggtgaaacaaacctgcaagaaattttcaaatccatacagtattgagtattctgaacttgactgtgaggaagggtggacacaactgaagtgtggaagaaatgaaagggcgaaggtgtgttttgagaaggctctggaagaaaagcccaacaacccagaattctcctctggactggcaattgcgatgtaccatctggataatcacccagagaaacagttctctactgatgttttgaagcaggccattgagctgagtcctgataaccaatacgtcaaggttctcttgggcctgaaactgcagaagatgaataaagaagctgaaggagagcagtttgttgaagaagccttggaaaagtctccttgccaaacagatgtcctccgcagtgcagccaaattttacagaagaaaaggtgacctagacaaagctattgaactgtttcaacgggtgttggaatccacaccaaacaatggctacctctatcaccagattgggtgctgctacaaggcaaaagtaagacaaatgcagaatacaggagaatctgaagctagtggaaataaagagatgattgaagcactaaagcaatatgctatggactattcgaataaagctcttgagaagggactgaatcctctgaatgcatactccgatctcgctgagttcctggagacggaatgttatcagacaccattcaataaggaagtccctgatgctgaaaagcaacaacaatcccatcagcgctactgcaaccttcagaaatataatgggaagtctgaagacactgctgtgcaacatggtttagagggtttgtccataagcaaaaaatcaactgacaaggaagagatcaaagaccaaccacagaatgtatctgaaaatctgcttccacaaaatgcaccaaattattggtatcttcaaggattaattcataagcagaatggagatctgctgcaagccaaatgttatgagaaggaactgggccgcctgctaagggatgccccttcaggcataggcagtattttcctgtcagcatctgagcttgaggatggtagtgaggaaatgggccagggcgcagtcagctccagtcccagagagctcctctctaactcagagcaactgaactgagacagaggaggaaaacagagcatcagaagcctgcagtggtggttgtgacgggtaggaggataggaagacagggggcccaacctgggattgctgagcagggaagctttgcatgttgctctaaggtacatttttaaagagttgttttttggccgggcgcagtgctcatgcctgtaatcccagaactttgggaggccgaggtgggcggatcacgaggtctggagtttgagaccatcctggctaacacagtgaaatcccgtctctactaaaaatacaaaaaattagccaggcgtggtggctggcacctgtagtcccagctacttgggaggctgaggcaggagaatggcgtgaacctggaaggaagaggttgcagagagccaagattgcg

SEQ ID NO: 1429 - protein, 490 aa, Homo sapien
MSEVTKNSLEKILPQLKCHFTWNLFKEDSVSRDLEDRVCNQIEFLNTEFKATMYNLLAYIKHLDGNNEAALECLRQAEELIQQEHADQAEIRSLVTWGNYAWVYYHLGRLSDAQIYVDKVKQTCKKFSNPYSIEYSELDCEEGWTQLKCGRNERAKVCFEKALEEKPNNPEFSSGLAIAMYHLDNHPEKQFSTDVLKQAIELSPDNQYVKVLLGLKLQKMNKEAEGEQFVEEALEKSPCQTDVLRSAAKFYRRKGDLDKAIELFQRVLESTPNNGYLYHQIGCCYKAKVRQMQNTGESEASGNKEMIEALKQYAMDYSNKALEKGLNPLNAYSDLAEFLETECYQTPFNKEVPDAEKQQQSHQRYCNLQKYNGKSEDTAVQHGLEGLSISKKSTDKEEIKDQPQNVSENLLPQNAPNYWYLQGLIHKQNGDLLQAKCYEKELGRLLRDAPSGIGSIFLSASELEDGSEEMGQGAVSSSPRELLSNSEQLN

SEQ ID NO: 1430 - DNA, 2634 bp, Homo sapien
attcggctgcggtacatctcggcactctagctgcagccgggagaggccttgccgccaccgctgtcgcccaagcctccactgccgctgccacctcagcgccggcctctgcatccccagctccagctccgctctgcgccgctgctgccatcgccgctgccacctccgcagcccgggcctccgccgccgccactcaagcatccgtgagtcattttctgcccatctctggtcgcgcggtctccctggtagagtttgtaggcttgcaagatggcagaagcagattttaaaatggtctcggaacctgtcgcccatggggttgccgaagaggagatggctagctcgactagtgattctggggaagaatctgacagcagtagctctagcagcagcactagtgacagcagcagcagcagcagcactagtggcagcagcagcggcagcggcagcagcagcagcagcagcggcagcactagcagccgcagccgcttgtatagaaagaagagggtacctgagccttccagaagggcgcggcgggccccgttgggaacaaatttcgtggataggctgcctcaggcagttagaaatcgtgtgcaagcgcttagaaacattcaagatgaatgtgacaaggtagataccctgttcttaaaagcaattcatgatcttgaaagaaaatatgctgaactcaacaagcctctgtatgataggcggtttcaaatcatcaatgcagaatacgagcctacagaagaagaatgtgaatggaattcagaggatgaggagttcagcagtgatgaggaggtgcaggataacacccctagtgaaatgcctcccttagagggtgaggaagaagaaaaccctaaagaaaacccagaggtgaaagctgaagagaaggaagttcctaaagaaattcctgaggtgaaggatgaagaaaaggaagttcctaaagaaattcctgaggtaaaggctgaagaaaaagcagattctaaagactgtatggaggcaacccctgaagtaaaagaagatcctaaagaagtcccccaggtaaaggcagatgataaagaacagcctaaagcaacagaggctaaggcaagggctgcagtaagagagactcataaaagagttcctgaggaaaggcttcaggacagtgtagatcttaaaagagctaggaagggaaagcctaaaagagaagaccctaaaggcattcctgactattggctgattgttttaaagaatgttgacaagctcgggcctatgattcagaagtatgatgagcccattctgaagttcttgtcggatgttagcctgaagttctcaaaacctggccagcctgtaagttacacctttgaatttcattttctacccaacccatacttcagaaatgaggtgctggtgaagacatatataataaaggcaaaaccagatcacaatgatcccttcttttcttggggatgggaaattgaagattgcaaaggctgcaagatagactggagaagaggaaaagatgttactgtgacaactacccagagtcgcacaactgctactggagaaattgaaatccagccaagagtggttcctaatgcatcattcttcaacttctttagtcctcctgagattcctatgattgggaagctggaaccacgagaagatgctatcctggatgaggactttgaaattgggcagattttacatgataatgtcatcctgaaatcaatctattactatactggagaagtcaatggtacctactatcaatttggcaaacattatggaaacaagaaatacagaaaataagtcaatctgaaagatttttcaagaatcttaaaatctcaagaagtgaagcagattcatacagccttgaaaaaagtaaaaccctgacctgtaacctgaacactattattccttatagtcaagtttttgtggtttcttggtagtctatattttaaaaatagtcctaaaaagtgtctaagtgccagtttattctatctaggctgttgtagtataatattcttcaaaatatgtaagctgttgtcaattatctaaagcatgttagtttggtgctacacagtgttgatttttgtgatgtcctttggtcatgtttctgttagactgtagctgtgaaactgtcagaattgttaactgaaacaaatatttgcttgaaaaaaaaagttcatgaagtaccaatgcaagtgttttatttttttcttttttccagcccataagactaagggtttaaatctgcttgcactagctgtgccttcattagtttgctatagaaatccagtacttatagtaaataaaacagtgtattttgaagtttgactgcttgaaaaagattagcatacatctaatgtgaaaagaccacatttgattcaactgagaccttgtgtatgtgacatatagtggcctataaatttaatcataatgatgttattgtttaccactgaggtgttaatataacatagtatttttgaaaaagtttcttcatcttatattgtgtaattgtaaactaaagataccgtgttttctttgtattgtgttctaccttccctttcactgaaaatgatcacttcatttgatactgtttttcatgttcttgtattgcaacctaaaataaataaatattaaagtgtgttatactat

SEQ ID NO: 1431 - protein, 506 aa, Homo sapien
MAEADFKMVSEPVAHGVAEEEMASSTSDSGEESDSSSSSSSTSDSSSSSSTSGSSSGSGSSSSSSGSTSSRSRLYRKKRVPEPSRRARRAPLGTNFVDRLPQAVRNRVQALRNIQDECDKVDTLFLKAIHDLERKYAELNKPLYDRRFQIINAEYEPTEEECEWNSEDEEFSSDEEVQDNTPSEMPPLEGEEEENPKENPEVKAEEKEVPKEIPEVKDEEKEVPKEIPEVKAEEKADSKDCMEATPEVKEDPKEVPQVKADDKEQPKATEAKARAAVRETHKRVPEERLQDSVDLKRARKGKPKREDPKGIPDYWLIVLKNVDKLGPMIQKYDEPILKFLSDVSLKFSKPGQPVSYTFEFHFLPNPYFRNEVLVKTYIIKAKPDHNDPFFSWGWEIEDCKGCKIDWRRGKDVTVTTTQSRTTATGEIEIQPRVVPNASFFNFFSPPEIPMIGKLEPREDAILDEDFEIGQILHDNVILKSIYYYTGEVNGTYYQFGKHYGNKKYRK

SEQ ID NO: 1432 - DNA, 3030 bp, Homo sapien
ctgcgaggagtcacattaactttgctctagaagacaactttacaaggatctaaaaggaacaggattaaagatgactgaatactgggttccagaaatttaaaacaatcagcttagcaaatcatatattcttctgtggagctgagaattgatgtccgctcttccccgtgatttggaactttccaatcccagagaaaagttgacaaagggactgcccaggactgagtccatatggaagaagaacttcctcttttctctggagacagtggcaagccagtacaggctactctgtcatctttgaagatgttagatgtgggaaagtggccaattttttccctttgttctgaagaagaactacagttaattcgtcaggcttgtgtctttggcagtgctggcaatgaagttttatacactacagtaaatgatgagatttttgtgcttggcacaaactgctgtggctgtttggggttaggtgacgtccagagcaccattgaacctcggagactggattctttaaatggcaaaaaaatagcctgcctcagctatgggagtggtccacatattgtccttgcaacaacagaaggagaagtctttacctggggtcataatgcttatagccagctgggcaatgggacaactaatcatggtttagtgccctgtcatatctctactaatctgtcaaacaaacaagtcattgaagttgcctgtgggtcttaccattctttggtgctaacatctgatggagaggtatttgcctggggttataataactctgggcaggtaggatctggatcaacagttaatcagccaatccctcgaagagtcactggctgcctacaaaataaagtagttgtgaccatagcatgtgggcagatgtgctgcatggcagtagtagacacgggggaggtctatgtctggggttacaacggaaacgggcagcttggactcggcaacagtggcaaccagccaaccccttgcagagtggcagctttgcaaggcatccgtgtccagagggtcgcctgtggctacgcacacacattagtattaacagatgaaggccaagtgtatgcttggggcgccaattcttatgggcagttgggcactggcaataaaagcaaccagtcctatcctactcctgtcactgtggaaaaggacaggattatcgagattgcagcctgtcactccacacacacgtctgcggccaagacgcagggtgggcacgtgtacatgtggggccagtgccggggtcagtccgtgatcctcccgcacctcacccacttctcctgcactgacgacgtgtttgcctgctttgccacgcccgccgtcacgtggcgcctcctctccgtggaacctgatgaccacctcacagtggctgagtcactgaagagggaatttgacaacccggacactgcagacctgaagtttctagttgatggaaagtacatttatgcacataaagtccttctcaagattcgatgtgagcattttcgttcgtcattggaagataacgaggatgatattgtagaaatgagtgaattttcatatcctgtttaccgggccttcctggaatacctatacacagacagcatcagcctttctcctgaggaggcagtaggactgctagacttggctacattttatagagaaaatcgtttgaaaaagctctgccaacaaactatcaagcaaggcatctgcgaggagaatgccatcgctctgctctcggctgcggtgaagtatgatgcacaggatttagaagaattctgcttcaggttttgcataaaccatctgactgtagtaacacaaacatcaggttttgcagaaatggaccatgatctcctgaagaactttatcagcaaagcaagcagagttggagcctttaaaaattgatcccatctgcaggaaagtttttgagcctttccatttcccctgcaaaagccagagatgaatcacttctctttaattaatagtatgtatgatgagctatgtttggctgagtacttgtaactgtcagaagaaggatggtggtgagtggtctttgtctgcctaaacccagagtttatgtagaaagcattgaatgttctgatcagatgtgactaaggtcaaggaaaaaaaattgaaatatcttatttaccatttcctctttttgagtcacttaaattggacacctttggtaccctggtctcagtatatgctattctggcccaaatgttccattattcagctggctgataccacatagatagcttgacaaggagtgctgtctgtccttaccacattttcagcactcagcacagtgccttgtgtataataggcactcaatttattataaatcttcagtatgtcctgagaacagctttagtcatggaatactgggagaaggaataactttcacaaaataaacttaaaacagcctgtaattattgaggttcacattcttctggtatatcattctgagaaattgtggctaatttagaacattgtttagaattgacaaaaggccctggcaattaaattgtcaaggcccaagggctaattttaattttctttttacttggagtcattcattaatttctcacatgggattatggagtatgaagtattatctttgaatgaaattcctgggctgatctgccttacataatcacataaggtcctttgcttttctttgtgttaagagggacttgcctctgtaaatgaaaatgacaatgtgcttttcttgtagttgactttcatgtcactcactataaaataggtctcttaacctggcaccagtataactataaagcactagctgagaaggaactgatacttacatttcatggacagcattaacaagaatgagataaatttgtactttttagatcaaaacaaattacctaattgcaaaagagaaactgaaatggaacatagtctcagattcttctaatgtgtatctcacaatgtcatgtaatgtaaaggaaacccttttggaattagaattcttgttctgatgctgaactatttggtaataaagtgcttatttgcagataacag

SEQ ID NO: 1433 - protein, 551 aa, Homo sapien
MEEELPLFSGDSGKPVQATLSSLKMLDVGKWPIFSLCSEEELQLIRQACVFGSAGNEVLYTTVNDEIFVLGTNCCGCLGLGDVQSTIEPRRLDSLNGKKIACLSYGSGPHIVLATTEGEVFTWGHNAYSQLGNGTTNHGLVPCHISTNLSNKQVIEVACGSYHSLVLTSDGEVFAWGYNNSGQVGSGSTVNQPIPRRVTGCLQNKVVVTIACGQMCCMAVVDTGEVYVWGYNGNGQLGLGNSGNQPTPCRVAALQGIRVQRVACGYAHTLVLTDEGQVYAWGANSYGQLGTGNKSNQSYPTPVTVEKDRIIEIAACHSTHTSAAKTQGGHVYMWGQCRGQSVILPHLTHFSCTDDVFACFATPAVTWRLLSVEPDDHLTVAESLKREFDNPDTADLKFLVDGKYIYAHKVLLKIRCEHFRSSLEDNEDDIVEMSEFSYPVYRAFLEYLYTDSISLSPEEAVGLLDLATFYRENRLKKLCQQTIKQGICEENAIALLSAAVKYDAQDLEEFCFRFCINHLTVVTQTSGFAEMDHDLLKNFISKASRVGAFKN

SEQ ID NO: 1434 - DNA, 2768 bp, Homo sapien
ccgaggcgctccctgggatcacatggtacctgctccagtgccgcgtgcggcccgggaaccctgggctgctggcgcctgcgcagagccctctgtcccagggaaaggctcgggcaaaaggcggctgagattggcagagtgaaatattactgccgagggaacgtagcagggcacacgtctcgcctctttgcgactcggtgccccgtttctccccatcacctacttacttcctggttgcaacctctcttcctctgggacttttgcaccgggagctccagattcgctaccccgcagcgctgcggagccggcaggcagaggcaccccgtacactgcagagacccgaccctccttgctaccttctagccagaactactgcaggctgattccccctacacactctctctgctcttcccatgcaaagcagaactccgttgcctcaacgtccaacccttctgcagggctgcagtccggccaccccaagaccttgctgcagggtgcttcggatcctgatcgtgagtcgcggggtccactccccgcccttagccagtgcccagggggcaacagcggcgatcgcaacctctagtttgagtcaaggtccagtttgaatgaccgctctcagctggtgaagacatgacgaccctggactccaacaacaacacaggtggcgtcatcacctacattggctccagtggctcctccccaagccgcaccagccctgaatccctctatagtgacaactccaatggcagcttccagtccctgacccaaggctgtcccacctacttcccaccatcccccactggctccctcacccaagacccggctcgctcctttgggagcattccacccagcctgagtgatgacggctccccttcttcctcatcttcctcgtcgtcatcctcctcctccttctataatgggagcccccctgggagtctacaagtggccatggaggacagcagccgagtgtcccccagcaagagcaccagcaacatcaccaagctgaatggcatggtgttactgtgtaaagtgtgtggggacgttgcctcgggcttccactacggtgtgcacgcctgcgagggctgcaagggctttttccgtcggagcatccagcagaacatccagtacaaaaggtgtctgaagaatgagaattgctccatcgtccgcatcaatcgcaaccgctgccagcaatgtcgcttcaagaagtgtctctctgtgggcatgtctcgagacgctgtgcgttttgggcgcatccccaaacgagagaagcagcggatgcttgctgagatgcagagtgccatgaacctggccaacaaccagttgagcagccagtgcccgctggagacttcacccacccagcaccccaccccaggccccatgggcccctcgccaccccctgctccggtcccctcacccctggtgggcttctcccagtttccacaacagctgacgcctcccagatccccaagccctgagcccacagtggaggatgtgatatcccaggtggcccgggcccatcgagagatcttcacctacgcccatgacaagctgggcagctcacctggcaacttcaatgccaaccatgcatcaggtagccctccagccaccaccccacatcgctgggaaaatcagggctgcccacctgcccccaatgacaacaacaccttggctgcccagcgtcataacgaggccctaaatggtctgcgccaggctccctcctcctaccctcccacctggcctcctggccctgcacaccacagctgccaccagtccaacagcaacgggcaccgtctatgccccacccacgtgtatgcagccccagaaggcaaggcacctgccaacagtccccggcagggcaactcaaagaatgttctgctggcatgtcctatgaacatgtacccgcatggacgcagtgggcgaacggtgcaggagatctgggaggatttctccatgagcttcacgcccgctgtgcgggaggtggtagagtttgccaaacacatcccgggcttccgtgacctttctcagcatgaccaagtcaccctgcttaaggctggcacctttgaggtgctgatggtgcgctttgcttcgttgttcaacgtgaaggaccagacagtgatgttcctaagccgcaccacctacagcctgcaggagcttggtgccatgggcatgggagacctgctcagtgccatgttcgacttcagcgagaagctcaactccctggcgcttaccgaggaggagctgggcctcttcaccgcggtggtgcttgtctctgcagaccgctcgggcatggagaattccgcttcggtggagcagctccaggagacgctgctgcgggctcttcgggctctggtgctgaagaaccggcccttggagacttcccgcttcaccaagctgctgctcaagctgccggacctgcggaccctgaacaacatgcattccgagaagctgctgtccttccgggtggacgcccagtgacccgcccggccggccttctgccgctgcccccttgtacagaatcgaactctgcacttctctctcctttacgagacgaaaaggaaaagcaaaccagaatcttatttatattgttataaaatattccaagatgagcctctggccccctgagccttcttgtaaatacctgcctccctcccccatcaccgaacttcccctcctcccctatttaaaccactctgtctcccccacaaccctcccctggccctctgatttgttctgttcctgtctcaaatccaatagttcacagctgagctggg

SEQ ID NO: 1435 - protein, 614 aa, Homo sapien
MTTLDSNNNTGGVITYIGSSGSSPSRTSPESLYSDNSNGSFQSLTQGCPTYFPPSPTGSLTQDPARSFGSIPPSLSDDGSPSSSSSSSSSSSSFYNGSPPGSLQVAMEDSSRVSPSKSTSNITKLNGMVLLCKVCGDVASGFHYGVHACEGCKGFFRRSIQQNIQYKRCLKNENCSIVRINRNRCQQCRFKKCLSVGMSRDAVRFGRIPKREKQRMLAEMQSAMNLANNQLSSQCPLETSPTQHPTPGPMGPSPPPAPVPSPLVGFSQFPQQLTPPRSPSPEPTVEDVISQVARAHREIFTYAHDKLGSSPGNFNANHASGSPPATTPHRWENQGCPPAPNDNNTLAAQRHNEALNGLRQAPSSYPPTWPPGPAHHSCHQSNSNGHRLCPTHVYAAPEGKAPANSPRQGNSKNVLLACPMNMYPHGRSGRTVQEIWEDFSMSFTPAVREVVEFAKHIPGFRDLSQHDQVTLLKAGTFEVLMVRFASLFNVKDQTVMFLSRTTYSLQELGAMGMGDLLSAMFDFSEKLNSLALTEEELGLFTAVVLVSADRSGMENSASVEQLQETLLRALRALVLKNRPLETSRFTKLLLKLPDLRTLNNMHSEKLLSFRVDAQ

SEQ ID NO: 1436 - DNA, 788 bp, Homo sapien
gaaaagcgcgcgcggggattccaggagtcgtggtttcttgccttgatgtactggagcaatcagatcacacggcggcttggagagtgagtgcaaggttttatgagtggaattagccctcagcagatgggggagccagaaggcagttggagtgggaagaacccagggaccatgggcgcctccaggctctataccctggtgctggtcctgcagcctcagcgagttctcctgggcatgaaaaagcgaggcttcggggccggccggtggaatggctttgggggcaaagtgcaagaaggagagaccatcgaggatggggctaggagggagctgcaggaggagagcggtctgacagtggacgccctgcacaaggtgggccagatcgtgtttgagttcgtgggcgagcctgagctcatggacgtgcatgtcttctgcacagacagcatccaggggacccccgtggagagcgacgaaatgcgcccatgctggttccagctggatcagatccccttcaaggacatgtggcccgacgacagctactggtttccactcctgcttcagaagaagaaattccacgggtacttcaagttccagggtcaggacaccatcctggactacacactccgcgaggtggacacggtctagcgggagcccagggcagcccctgggcaggagacgtggctgctgaacagctgcaaaccatcttcacctgggggcattgagtggcgcagagccgggtttcatctggaattaactggatggaagggaaaataaagctatctagcggtgaaaaa

SEQ ID NO: 1437 - protein, 179 aa, Homo sapien
MSGISPQQMGEPEGSWSGKNPGTMGASRLYTLVLVLQPQRVLLGMKKRGFGAGRWNGFGGKVQEGETIEDGARRELQEESGLTVDALHKVGQIVFEFVGEPELMDVHVFCTDSIQGTPVESDEMRPCWFQLDQIPFKDMWPDDSYWFPLLLQKKKFHGYFKFQGQDTILDYTLREVDTV

SEQ ID NO: 1438 - DNA, 2031 bp, Homo sapien
ggcacgaggcaggccacccgccgctaagctgagaagggagagcgagcttaggaccgcctgcccggggcaaccccgaaccaagctttagccgccgaggccgcgtgtcccaaaggccagtcatccctcctctgtgttgccatgggaattcaaggcctggccaaactaattgctgatgtggcccccagtgccatccgggagaatgacatcaagagctactttggccgtaaggtggccattgatgcctctatgagcatttatcagttcctgattgctgttcgccagggtggggatgtgctgcagaatgaggagggtgagaccaccagccacctgatgggcatgttctaccgcaccattcgcatgatggagaacggcatcaagcccgtgtatgtctttgatggcaagccgccacagctcaagtcaggcgagctggccaaacgcagtgagcggcgggctgaggcagagaagcagctgcagcaggctcaggctgctggggccgagcaggaggtggaaaaattcactaagcggctggtgaaggtcactaagcagcacaatgatgagtgcaaacatctgctgagcctcatgggcatcccttatcttgatgcacccagtgaggcagaggccagctgtgctgccctggtgaaggctggcaaagtctatgctgcggctaccgaggacatggactgcctcaccttcggcagccctgtgctaatgcgacacctgactgccagtgaagccaaaaagctgccaatccaggaattccacctgagccggattctgcaggagctgggcctgaaccaggaacagtttgtggatctgtgcatcctgctaggcagtgactactgtgagagtatccggggtattgggcccaagcgggctgtggacctcatccagaagcacaagagcatcgaggagatcgtgcggcgacttgaccccaacaagtaccctgtgccagaaaattggctccacaaggaggctcaccagctcttcttggaacctgaggtgctggacccagagtctgtggagctgaagtggagcgagccaaatgaagaagagctgatcaagttcatgtgtggtgaaaagcagttctctgaggagcgaatccgcagtggggtcaagaggctgagtaagagccgccaaggcagcacccagggccgcctggatgatttcttcaaggtgaccggctcactctcttcagctaagcgcaaggagccagaacccaagggatccactaagaagaaggcaaagactggggcagcagggaagtttaaaaggggaaaataaatgtgtttccccattatacctccttcaccccagaatatttgccgtcttgtacccttaagagctacagctagagaaaccttcacggggtggagagaggattctaaggcttttctagcgtgacccttttcagtagtgctagtcccttttttacttgatcttaatggcaagaaggccacagaggtacttttccttttttagctcaggaaaatatgtcaggctcaaaccacttctcaggcagtttaatggacactaagtccattgttacatgaaagtgatagatagcaacaagttttggagaagagagagggagataaaagggggagacaaaagatgtacagaaatgatttcctggctggccaactggtggccagtgggaggtgatggtggacctagactgtgcttttctgtcttgttcagccttgacccaccttgagagagagccaccaggaaggcgcatcttagcagatgggaggaactgctgagagaagatgggcagaaagctggagcccctggagttggctgtgtctgtgtttgtgactgattactggctgtgtcttgggtgggcagaaactcgaacttgctatgtaatttgtgtctagttattcagaggagtaagatggtgatgttcacctggcaatcagctgagttgagactttggaataagacactggttttcatgcgctgtttttgttttaaagttatgaagaaaaaagtcaataaaattctaaaagtaaaaaaaaaaaaaaaaaa

SEQ ID NO: 1439 - protein, 380 aa, Homo sapien
MGIQGLAKLIADVAPSAIRENDIKSYFGRKVAIDASMSIYQFLIAVRQGGDVLQNEEGETTSHLMGMFYRTIRMMENGIKPVYVFDGKPPQLKSGELAKRSERRAEAEKQLQQAQAAGAEQEVEKFTKRLVKVTKQHNDECKHLLSLMGIPYLDAPSEAEASCAALVKAGKVYAAATEDMDCLTFGSPVLMRHLTASEAKKLPIQEFHLSRILQELGLNQEQFVDLCILLGSDYCESIRGIGPKRAVDLIQKHKSIEEIVRRLDPNKYPVPENWLHKEAHQLFLEPEVLDPESVELKWSEPNEEELIKFMCGEKQFSEERIRSGVKRLSKSRQGSTQGRLDDFFKVTGSLSSAKRKEPEPKGSTKKKAKTGAAGKFKRGK

SEQ ID NO: 1440 - DNA, 2265 bp, Homo sapien
agtcctgcgatttcgggtgtagagggagcaggggcctgcggggacctggtgtgggtggagtggggacaagcggtggagaagggtacgccagggtcgctgagagactctgttctccctggagggactggttgccatgagagcagccgtctgaggggacgcagcctgcactacgcgccccaagaggctgtgcgtggcgagcaggtcacgtgacgggagcgcgggctttggaaggcggctgaacgtcaggccacccgccgctaagctgagaagggagagcgagcttaggaccgcctgcccggggcaaccccgaaccaagctttagccgccgaggccgcgtgtcccaaaggccagtcatccctcctctgtgttgccatgggaattcaaggcctggccaaactaattgctgatgtggcccccagtgccatccgggagaatgacatcaagagctactttggccgtaaggtggccattgatgcctctatgagcatttatcagttcctgattgctgttcgccagggtggggatgtgctgcagaatgaggagggtgagaccaccagccacctgatgggcatgttctaccgcaccattcgcatgatggagaacggcatcaagcccgtgtatgtctttgatggcaagccgccacagctcaagtcaggcgagctggccaaacgcagtgagcggcgggctgaggcagagaagcagctgcagcaggctcaggctgctggggccgagcaggaggtggaaaaattcactaagcggctggtgaaggtcactaagcagcacaatgatgagtgcaaacatctgctgagcctcatgggcatcccttatcttgatgcacccagtgaggcagaggccagctgtgctgccctggtgaaggctggcaaagtctatgctgcggctaccgaggacatggactgcctcaccttcggcagccctgtgctaatgcgacacctgactgccagtgaagccaaaaagctgccaatccaggaattccacctgagccggattctgcaggagctgggcctgaaccaggaacagtttgtggatctgtgcatcctgctaggcagtgactactgtgagagtatccggggtattgggcccaagcgggctgtggacctcatccagaagcacaagagcatcgaggagatcgtgcggcgacttgaccccaacaagtaccctgtgccagaaaattggctccacaaggaggctcaccagctcttcttggaacctgaggtgctggacccagagtctgtggagctgaagtggagcgagccaaatgaagaagagctgatcaagttcatgtgtggtgaaaagcagttctctgaggagcgaatccgcagtggggtcaagaggctgagtaagagccgccaaggcagcacccagggccgcctggatgatttcttcaaggtgaccggctcactctcttcagctaagcgcaaggagccagaacccaagggatccactaagaagaaggcaaagactggggcagcagggaagtttaaaaggggaaaataaatgtgtttccccattatacctccttcaccccagaatatttgccgtcttgtacccttaagagctacagctagagaaaccttcacggggtggagagaggattctaaggcttttctagcgtgacccttttcagtagtgctagtcccttttttacttgatcttaatggcaagaaggccacagaggtacttttccttttttagctcaggaaaatatgtcaggctcaaaccacttctcaggcagtttaatggacactaagtccattgttacatgaaagtgatagatagcaacaagttttggagaagagagagggagataaaagggggagacaaaagatgtacagaaatgatttcctggctggccaactggtggccagtgggaggtgatggtggacctagactgtgcttttctgtcttgttcagccttgacccaccttgagagagagccaccaggaaggcgcatcttagcagatgggaggaactgctgagagaagatgggcagaaagctggagcccctggagttggctgtgtctgtgtttgtgactgattactggctgtgtcttgggtgggcagaaactcgaacttgctatgtaatttgtgtctagttattcagaggagtaagatggtgatgttcacctggcaatcagctgagttgagactttggaataagacactggttttcatgcgctgtttttgttttaaagttatgaagaaaaaagtcaataaaattctaaaagtaaaaaaaaaaaaaaaaaa

SEQ ID NO: 1441 - protein, 380 aa, Homo sapien; identical to SEQ ID NO: 1439

SEQ ID NO: 1442 - DNA, 1776 bp, Homo sapien
gggggctgtagctggtgagaggaagtcctagaggctatggacactctgctgctgggatcaccgagatgagcagcagctgctcagggctgagcagggtcctggtggccgtggctacagccctggtgtctgcctcctccccctgcccccaggcctggggccccccaggggtccagtatgggcagccaggcaggtccgtgaagctgtgttgtcctggagtgactgccggggacccagtgtcctggtttcgggatggggagccaaagctgctccagggacctgactctgggctagggcatgaactggtcctggcccaggcagacagcactgatgagggcacctacatctgccagaccctggatggtgcacttgggggcacagtgaccctgcagctgggctaccctccagcccgccctgttgtctcctgccaagcagccgactatgagaacttctcttgcacttggagtcccagccagatcagcggtttacccacccgctacctcacctcctacaggaagaagacagtcctaggagctgatagccagaggaggagtccatccacagggccctggccatgcccacaggatcccctaggggctgcccgctgtgttgtccacggggctgagttctggagccagtaccggattaatgtgactgaggtgaacccactgggtgccagcacacgcctgctggatgtgagcttgcagagcatcttgcgccctgacccaccccagggcctgcgggtagagtcagtaccaggttacccccgacgcctgcgagccagctggacataccctgcctcctggccgtgccagccccacttcctgctcaagttccgtttgcagtaccgtccggcgcagcatccagcctggtccacggtggagccagctggactggaggaggtgatcacagatgctgtggctgggctgccccatgctgtacgagtcagtgcccgggactttctagatgctggcacctggagcacctggagcccggaggcctggggaactccgagcactgggaccataccaaaggagataccagcatggggccagctacacacgcagccagaggtggagcctcaggtggacagccctgctcctccaaggccctccctccaaccacaccctcggctacttgatcacagggactctgtggagcaggtagctgtgctggcgtctttgggaatcctttctttcctgggactggtggctggggccctggcactggggctctggctgaggctgagacggggtgggaaggatggatccccaaagcctgggttcttggcctcagtgattccagtggacaggcgtccaggagctccaaacctgtagaggacccaggagggcttcggcagattccacctataattctgtcttgctggtgtggatagaaaccaggcaggacagtagatccctatggttggatctcagctggaagttctgtttggagcccatttctgtgagaccctgtatttcaaatttgcagctgaaaggtgcttgtacctctgatttcaccccagagttggagttctgctcaaggaacgtgtgtaatgtgtacatctgtgtccatgtgtgaccatgtgtctgtgaggcagggaacatgtattctctgcatgcatgtatgtaggtgcctggggagtgtgtgtgggtccttggctcttggcctttccccttgcaggggttgtgcaggtgtgaataaagagaataaggaagttcttggaaaaaaaaaaaaaaaaaaaaaaaaaaaaaaaaaaaaaaaaaaaaaaaaaaaaaa

SEQ ID NO: 1443 - protein, 422 aa, Homo sapien
MSSSCSGLSRVLVAVATALVSASSPCPQAWGPPGVQYGQPGRSVKLCCPGVTAGDPVSWFRDGEPKLLQGPDSGLGHELVLAQADSTDEGTYICQTLDGALGGTVTLQLGYPPARPVVSCQAADYENFSCTWSPSQISGLPTRYLTSYRKKTVLGADSQRRSPSTGPWPCPQDPLGAARCVVHGAEFWSQYRINVTEVNPLGASTRLLDVSLQSILRPDPPQGLRVESVPGYPRRLRASWTYPASWPCQPHFLLKFRLQYRPAQHPAWSTVEPAGLEEVITDAVAGLPHAVRVSARDFLDAGTWSTWSPEAWGTPSTGTIPKEIPAWGQLHTQPEVEPQVDSPAPPRPSLQPHPRLLDHRDSVEQVAVLASLGILSFLGLVAGALALGLWLRLRRGGKDGSPKPGFLASVIPVDRRPGAPNL

SEQ ID NO: 1444 - DNA, 2719 bp, Homo sapien
agccctccccaacccgggcgttccccagcgaggcttccttcccatcctcctgaccaccggggcttttcgtgagctcgtctctgatctcgcgcaagagtgacacacaggtgttcaaagacgcttctggggagtgagggaagcggtttacgagtgacttggctggagcctcaggggcgggcactggcacggaacacaccctgaggccagccctggctgcccaggcggagctgcctcttctcccgcgggttggtggacccgctcagtacggagttggggaagctctttcacttcggaggattgctcaacaaccatgctgggcatctggaccctcctacctctggttcttacgtctgttgctagattatcgtccaaaagtgttaatgcccaagtgactgacatcaactccaagggattggaattgaggaagactgttactacagttgagactcagaacttggaaggcctgcatcatgatggccaattctgccataagccctgtcctccaggtgaaaggaaagctagggactgcacagtcaatggggatgaaccagactgcgtgccctgccaagaagggaaggagtacacagacaaagcccatttttcttccaaatgcagaagatgtagattgtgtgatgaaggacatggcttagaagtggaaataaactgcacccggacccagaataccaagtgcagatgtaaaccaaactttttttgtaactctactgtatgtgaacactgtgacccttgcaccaaatgtgaacatggaatcatcaaggaatgcacactcaccagcaacaccaagtgcaaagaggaaggatccagatctaacttggggtggctttgtcttcttcttttgccaattccactaattgtttgggtgaagagaaaggaagtacagaaaacatgcagaaagcacagaaaggaaaaccaaggttctcatgaatctccaaccttaaatcctgaaacagtggcaataaatttatctgatgttgacttgagtaaatatatcaccactattgctggagtcatgacactaagtcaagttaaaggctttgttcgaaagaatggtgtcaatgaagccaaaatagatgagatcaagaatgacaatgtccaagacacagcagaacagaaagttcaactgcttcgtaattggcatcaacttcatggaaagaaagaagcgtatgacacattgattaaagatctcaaaaaagccaatctttgtactcttgcagagaaaattcagactatcatcctcaaggacattactagtgactcagaaaattcaaacttcagaaatgaaatccaaagcttggtctagagtgaaaaacaacaaattcagttctgagtatatgcaattagtgtttgaaaagattcttaatagctggctgtaaatactgcttggttttttactgggtacattttatcatttattagcgctgaagagccaacatatttgtagatttttaatatctcatgattctgcctccaaggatgtttaaaatctagttgggaaaacaaacttcatcaagagtaaatgcagtggcatgctaagtacccaaataggagtgtatgcagaggatgaaagattaagattatgctctggcatctaacatatgattctgtagtatgaatgtaatcagtgtatgttagtacaaatgtctatccacaggctaaccccactctatgaatcaatagaagaagctatgaccttttgctgaaatatcagttactgaacaggcaggccactttgcctctaaattacctctgataattctagagattttaccatatttctaaactttgtttataactctgagaagatcatatttatgtaaagtatatgtatttgagtgcagaatttaaataaggctctacctcaaagacctttgcacagtttattggtgtcatattatacaatatttcaattgtgaattcacatagaaaacattaaattataatgtttgactattatatatgtgtatgcattttactggctcaaaactacctacttctttctcaggcatcaaaagcattttgagcaggagagtattactagagctttgccacctctccatttttgccttggtgctcatcttaatggcctaatgcacccccaaacatggaaatatcaccaaaaaatacttaatagtccaccaaaaggcaagactgcccttagaaattctagcctggtttggagatactaactgctctcagagaaagtagctttgtgacatgtcatgaacccatgtttgcaatcaaagatgataaaatagattcttatttttcccccacccccgaaaatgttcaataatgtcccatgtaaaacctgctacaaatggcagcttatacatagcaatggtaaaatcatcatctggatttaggaattgctcttgtcatacccccaagtttctaagatttaagattctccttactactatcctacgtttaaatatctttgaaagtttgtattaaatgtgaattttaagaaataatatttatatttctgtaaatgtaaactgtgaagatagttataaactgaagcagatacctggaaccacctaaagaacttccatttatggaggatttttttgccccttgtgtttggaattataaaatataggtaaaagtacgtaattaaataatgtttttggtaaaaaaaaaaaaaaaaaaaaaaaaaaaaaaaaaaaaaaaaaaaaaaaaaaaaaaaaaaaaaaaaaaa

SEQ ID NO: 1445 - protein, 335 aa, Homo sapien
MLGIWTLLPLVLTSVARLSSKSVNAQVTDINSKGLELRKTVTTVETQNLEGLHHDGQFCHKPCPPGERKARDCTVNGDEPDCVPCQEGKEYTDKAHFSSKCRRCRLCDEGHGLEVEINCTRTQNTKCRCKPNFFCNSTVCEHCDPCTKCEHGIIKECTLTSNTKCKEEGSRSNLGWLCLLLLPIPLIVWVKRKEVQKTCRKHRKENQGSHESPTLNPETVAINLSDVDLSKYITTIAGVMTLSQVKGFVRKNGVNEAKIDEIKNDNVQDTAEQKVQLLRNWHQLHGKKEAYDTLIKDLKKANLCTLAEKIQTIILKDITSDSENSNFRNEIQSLV

SEQ ID NO: 1446 - DNA, 2719 bp, Homo sapien; identical to SEQ ID NO: 1444

SEQ ID NO: 1447 - protein, 335 aa, Homo sapien; identical to SEQ ID NO: 1445

SEQ ID NO: 1448 - DNA, 3111 bp, Homo sapien
ggcacgagcggagagccgcgcagggcgcgggccgcgcggggtggggcagccggagcgcaggcccccgatccccggcgggcgcccccgggcccccgcgcgcgccccggcctccgggagactggcgcatgccacggagcgcccctcgggccgccgccgctcctgcccgggcccctgctgctgctgctgtcgcctgcgcctgctgccccaactcggcgcccgacttcttcatggtgtgcggaggtcatgttcgctccttagcaggcaaacgacttttctcctcgcctcctcgccccgcatgttcaggaccaaacgatctgcgctcgtccggcgtctctggaggagccgtgcgcccggcggcgaggacgaggaggagggcgcagggggaggtggaggaggaggcgagctgcggggagaaggggcgacggacagccgagcgcatggggccggtggcggcggcccgggcagggctggatgctgcctgggcaaggcggtgcgaggtgccaaaggtcaccaccatccccacccgccagccgcgggcgccggcgcggccgggggcgccgaggcggatctgaaggcgctcacgcactcggtgctcaagaaactgaaggagcggcagctggagctgctgctccaggccgtggagtcccgcggcgggacgcgcaccgcgtgcctcctgctgcccggccgcctggactgcaggctgggcccgggggcgcccgccggcgcgcagcctgcgcagccgccctcgtcctactcgctccccctcctgctgtgcaaagtgttcaggtggccggatctcaggcattcctcggaagtcaagaggctgtgttgctgtgaatcttacgggaagatcaaccccgagctggtgtgctgcaacccccatcaccttagccgactctgcgaactagagtctcccccccctccttactccagatacccgatggattttctcaaaccaactgcagactgtccagatgctgtgccttcctccgctgaaacagggggaacgaattatctggcccctggggggctttcagattcccaacttcttctggagcctggggatcggtcacactggtgcgtggtggcatactgggaggagaagacgagagtggggaggctctactgtgtccaggagccctctctggatatcttctatgatctacctcaggggaatggcttttgcctcggacagctcaattcggacaacaagagtcagctggtgcagaaggtgcggagcaaaatcggctgcggcatccagctgacgcgggaggtggatggtgtgtgggtgtacaaccgcagcagttaccccatcttcatcaagtccgccacactggacaacccggactccaggacgctgttggtacacaaggtgttccccggtttctccatcaaggctttcgactacgagaaggcgtacagcctgcagcggcccaatgaccacgagtttatgcagcagccgtggacgggctttaccgtgcagatcagctttgtgaagggctggggtcagtgctacacccgccagttcatcagcagctgcccgtgctggctagaggtcatcttcaacagccggtagccgcgtgcggaggggacagagcgtgagctgagcaggccacacttcaaactactttgctgctaatattttcctcctgagtgcttgcttttcatgcaaactctttggtcgttttttttttgtttgttggttggttttcttcttctcgtcctcgtttgtgttctgttttgtttcgctctttgagaaatagcttatgaaaagaattgttgggggtttttttggaagaaggggcaggtatgatcggcaggacaccctgataggaagaggggaagcagaaatccaagcaccaccaaacacagtgtatgaaggggggcggtcatcatttcacttgtcaggagtgtgtgtgagtgtgagtgtgcggctgtgtgtgcacgcgtgtgcaggagcggcagatggggagacaacgtgctctttgttttgtgtctcttatggatgtccccagcagagaggtttgcagtcccaagcggtgtctctcctgccccttggacacgctcagtggggcagaggcagtacctgggcaagctggcggctggggtcccagcagctgccaggagcacggctctgtccccagcctgggaaagcccctgcccctcctctccctcatcaaggacacgggcctgtccacaggcttctgagcagcgagcctgctagtggccgaaccagaaccaattattttcatccttgtcttattcccttcctgccagcccctgccattgtagcgtctttcttttttggccatctgctcctggatctccctgagatgggcttcccaagggctgccggggcagccccctcacagtattgctcacccagtgccctctcccctcagcctctcccctgcctgccctggtgacatcaggtttttcccggacttagaaaaccagctcagcactgcctgctcccatcctgtgtgttaagctctgctattaggccagcaagcggggatgtccctgggagggacatgcttagcagtccccttccctccaagaaggatttggtccgtcataacccaaggtaccatcctaggctgacacctaactcttctttcatttcttctacaactcatacactcgtatgatacttcgacactgttcttagctcaatgagcatgtttagactttaacataagctatttttctaactacaaaggtttaaatgaacaagagaagcattctcattggaaatttagcattgtagtgctttgagagagaaaggactcctgaaaaaaaacctgagatttattaaagaaaaaaatgtattttatgttatatataaatatattattacttgtaaatataaagacgttttataagcatcattatttatgtattgtgcaatgtgtataaacaagaaaaataaagaaaagatgcactttgctttaatataaatgcaaataacaaatgccaaattaaaaaagataaacacaagattggtgttttttcctatgggtgttatcacctagctgaatgtttttctaaaggagtttatgttccattaaacgatttttaaaatgtacacttgaaaaaaaaaaaaaaaaa

SEQ ID NO: 1449 - protein, 426 aa, Homo sapien
MFRTKRSALVRRLWRSRAPGGEDEEEGAGGGGGGGELRGEGATDSRAHGAGGGGPGRAGCCLGKAVRGAKGHHHPHPPAAGAGAAGGAEADLKALTHSVLKKLKERQLELLLQAVESRGGTRTACLLLPGRLDCRLGPGAPAGAQPAQPPSSYSLPLLLCKVFRWPDLRHSSEVKRLCCCESYGKINPELVCCNPHHLSRLCELESPPPPYSRYPMDFLKPTADCPDAVPSSAETGGTNYLAPGGLSDSQLLLEPGDRSHWCVVAYWEEKTRVGRLYCVQEPSLDIFYDLPQGNGFCLGQLNSDNKSQLVQKVRSKIGCGIQLTREVDGVWVYNRSSYPIFIKSATLDNPDSRTLLVHKVFPGFSIKAFDYEKAYSLQRPNDHEFMQQPWTGFTVQISFVKGWGQCYTRQFISSCPCWLEVIFNSR

SEQ ID NO: 1450 - DNA, 5190 bp, Homo sapien
tgggaatccaactgaagagcagccagaggagagctgaagagaggagggggaggccgatgacctgggctctgggcctctgaaggtctggcgtattctgacaggacacagtgagcatctgtagaggagaggcttgaaataaaggaggagcacgaatattccctggatttctggaggcctgctttaaggctggccagttctgcaagaaaggcaaggaggaggagactggctcacacctctggaggacccccttctgtcagctgtggggcttgacactacttgaacaagaaaaggagggggaaactgcaccacataagtgaagatccacctccagtggctgctctgctggtggtggggttgctgctgacaaccaccctcaacgggtctgcacccatccaggaaatctctgtcttcctcaagcttggttgtgcctgttctacactctatctgtattattgaattactgactgagactgtgtttgggaaggaggctgagtgactactggactggatattgactctaactcttgtttccaagcttatatcctcaatcacctaaagatcagagtgtgaagaaacaaacctgtgacagatctgtggttgaggtttagactgggggaggagtatagtactggactttctttgtaacttgtaccatgactggggcagagattgagtctggtgcccaggtcaagcctgaaaagaagcctggggaagaggttgtaggtggggctgagatagagaatgatgtccctctggtggtcagacccaaggttaggacccaggcccagataatgcctggggcaaggcccaagaataagtccaaggttatgcctggagcaagcaccaaagttgagacaagtgcagtgggtggggcacgccctaagagtaaggccaaggcaatacctgtttcacgatttaaggaagaagcccagatgtgggctcagcccaggtttggtgctgaaagattgtctaagacagagagaaactcccagaccaatatcatagcctctccacttgtcagtactgattctgtcttggttgctaaaacaaagtacctgtctgaggatagagaactggttaatacagacactgagagctttcctagaaggaaggcccattaccaagcaggattccagccttcttttaggtcaaaggaggagaccaatatggggtcctggtgctgtcctaggcctacatccaaacaagaagcctctcctaattctgatttcaaatgggtagacaaatctgtgagttccttgttctggagtggagatgaggtcactgcaaaatttcatcctgggaatagggtaaaagacagtaacagatccatgcacatggccaatcaagaggctaataccatgtctaggtcccaaactaaccaggagctctatattgcatctagttctggttctgaggatgagtctgttaagacaccctggttctgggccagagataaaaccaatacctggtctgggcccagggaagatcccaatagcaggtccaggtttaggtctaagaaagaagtctatgttgaatcaagttctggatctgagcatgaagaccatttggagtcctggtttggggctggaaaggagggcaaattcaggtccaaaatgagagctgggaaggaggccaataacagggccaggcacagggccaagcgagaagcttgcattgatttcatgcctgggtctatagatgtaattaaaaaagagtcctgtttctggcctgaagaaaatgctaataccttttcaaggcccatgatcaagaaagaggccagggccagagcaatgacaaaggaagaggccaaaaccaaggcccgagccagggccaagcaagaagccaggtcagaggaggaagccctcattgggacctggttctgggctacagacgagtccagcatggcagatgaagccagcatagagtccagtctacaagtggaggatgagtccataattgggagttggttctggactgaagaagaggccagtatggggactggggctagcagtaaatccagaccaaggactgatggggagcgtattggtgattccttatttggggctagggaaaagaccagtatgaaaactggggctgaggccacctctgaatctatactagcagctgatgatgaacaggtcattattggttcctggttctgggctggtgaagaggtcaaccaagaggctgaggaagagaccatttttgggtcgtggttctgggtcattgatgcggccagtgtggaatctggtgttggggtcagctgtgagtccaggacaaggtctgaggaagaagaggtcattggtccctggttttggtctggagaacaagttgatatagaggctggaatcggagaagaggccaggccaggagctgaagaagagacaatattcgggtcctggttttgggctgaaaaccagacctatatggattgtagggctgaaactagctgtgacaccatgcaaggggctgaggaggaggagcccattattgggtcctggttttggaccagagtagaagcttgtgtggagggtgatgtcaacagcaagtctagcctggaggacaaggaagaggccatgataccatgttttggagccaaagaagaggtcagtatgaagcatgggactggtgtcagatgcagatttatggcaggggctgaggagaccaataataagtcttgcttctgggcagaaaaagaaccctgtatgtatcctgccggtggaggaagttggaagtctaggccagaggaggaagaggacattgtcaattcgtggttctggtccagaaaatacacaaagccagaggccattatagggtcctggttatgggctacagaagagagtaatatagatgggactggagaaaaggccaagttactgactgaagaggagaccataatcaattcctggttctggaaagaagatgaagccatttcagaggctactgacagagaagagtccaggccagaagctgaggagggggacattgttggttcttggttctgggctggagaagaggacagactagagccagctgctgagactagagaagaagacaggctagcagctgagaaagaaggtattgttgggtcctggtttggggccagagaagagaccattagaagagaggctgggtcttgcagcaaatccagtcctaaagctgaagaggaagaagtcattattgggtcctggttctgggaagaagaggccagtccggaggcagtggcaggagtcggctttgagtcaaagcctgggactgaggaggaagaaatcactgttgggtcctggttctggcctgaagaagaagccagtatacaggctggatctcaggcagtagaggaaatggagtcagagactgaagaggaaaccatttttgggtcctggttctgggatggaaaagaagtcagtgaagaagcaggaccatgctgtgtatccaagccagaggatgatgaagagatgattgttgagtcctggttctggtctagagacaaagccattaaggaaactggaactgtggccacctgtgagtccaagccagaaaatgaggaaggggccattgttgggtcttggtttgaggctgaagatgaggtagataacaggactgacaatggaagcaactgtgggtccaggacattagctgatgaagatgaggccatagtggggtcctggttctgggcaggagatgaggcccattttgaatcaaatcctagccccgtgttcagggccatttgcaggtccacgtgttcagttgaacaggagcctgatccttcacgcaggcctcagagttgggaggaggtcactgttcagttcaagcctggtccatggggtagggtcggcttcccatctataagcccctttagatttccgaaagaggcagcatctttattctgtgaaatgtttgggggcaaacccaggaacatggtacttagcccagaaggggaagatcaggaatctttgcttcagcctgatcagcctagtcctgagttcccatttcagtatgatccttcctacaggtcagtccaggaaattcgagagcatcttagggccaaggagagtacagagcctgagagttcatcctgtaactgcatacaatgtgagctgaaaattggttctgaagagtttgaagaactccttttattaatggaaaaaattcgggatccttttattcatgaaatatctaaaatcgcaatgggtatgagaagtgcttctcaatttacccgagatttcattcgagattcaggtgttgtctcacttattgaaaccttgcttaattatccgtcctcccgagttagaacaagttttttggaaaatatgattcgcatggccccaccttatccgaatctaaacataattcagacatacatatgtaaagtgtgtgaggaaacccttgcttatagcgtggattccccggaacagctgtctggaataaggatgattagacatctcactactactactgactatcacacactggttgccaattatatgtctgggtttctctccttattagctacaggcaatgccaaaacaaggtttcatgttttgaaaatgctactgaatttgtctgaaaatcttttcatgacaaaagaactactcagtgctgaagcagtgtcagaatttataggcctctttaacagggaagagacaaatgacaatattcaaattgttcttgcaatatttgagaatattggcaacaatatcaaaaaagaaacagtgttctctgatgatgatttcaatattgagccgcttatttctgcattccacaaagttgagaaatttgctaaggaactgcaaggcaaaacagacaatcaaaatgaccctgaaggggaccaagaaaattagtaatggttaattgctggcctcagattgtccttatgttcctgagttatgatccttgagtaatgctttgattttaatagttggttctgtgttgcaacatatatctttagtgctgacactaactttgtccaactctgtctgtaagctggagcatttttctgatgccagctgaatattagagctgaaaacacatttgttgatatttgtcttgtccacattgtgatgttcagtatttgagcttatagtgaactgagcaatcataaataagccacccttctgattgtcgttctactgtatatatatatatatttgagtgttgtttgtgtttcaataaagtcctatgttaaagttg

SEQ ID NO: 1451 - protein, 1395 aa, Homo sapien
MTGAEIESGAQVKPEKKPGEEVVGGAEIENDVPLVVRPKVRTQAQIMPGARPKNKSKVMPGASTKVETSAVGGARPKSKAKAIPVSRFKEEAQMWAQPRFGAERLSKTERNSQTNIIASPLVSTDSVLVAKTKYLSEDRELVNTDTESFPRRKAHYQAGFQPSFRSKEETNMGSWCCPRPTSKQEASPNSDFKWVDKSVSSLFWSGDEVTAKFHPGNRVKDSNRSMHMANQEANTMSRSQTNQELYIASSSGSEDESVKTPWFWARDKTNTWSGPREDPNSRSRFRSKKEVYVESSSGSEHEDHLESWFGAGKEGKFRSKMRAGKEANNRARHRAKREACIDFMPGSIDVIKKESCFWPEENANTFSRPMIKKEARARAMTKEEAKTKARARAKQEARSEEEALIGTWFWATDESSMADEASIESSLQVEDESIIGSWFWTEEEASMGTGASSKSRPRTDGERIGDSLFGAREKTSMKTGAEATSESILAADDEQVIIGSWFWAGEEVNQEAEEETIFGSWFWVIDAASVESGVGVSCESRTRSEEEEVIGPWFWSGEQVDIEAGIGEEARPGAEEETIFGSWFWAENQTYMDCRAETSCDTMQGAEEEEPIIGSWFWTRVEACVEGDVNSKSSLEDKEEAMIPCFGAKEEVSMKHGTGVRCRFMAGAEETNNKSCFWAEKEPCMYPAGGGSWKSRPEEEEDIVNSWFWSRKYTKPEAIIGSWLWATEESNIDGTGEKAKLLTEEETIINSWFWKEDEAISEATDREESRPEAEEGDIVGSWFWAGEEDRLEPAAETREEDRLAAEKEGIVGSWFGAREETIRREAGSCSKSSPKAEEEEVIIGSWFWEEEASPEAVAGVGFESKPGTEEEEITVGSWFWPEEEASIQAGSQAVEEMESETEEETIFGSWFWDGKEVSEEAGPCCVSKPEDDEEMIVESWFWSRDKAIKETGTVATCESKPENEEGAIVGSWFEAEDEVDNRTDNGSNCGSRTLADEDEAIVGSWFWAGDEAHFESNPSPVFRAICRSTCSVEQEPDPSRRPQSWEEVTVQFKPGPWGRVGFPSISPFRFPKEAASLFCEMFGGKPRNMVLSPEGEDQESLLQPDQPSPEFPFQYDPSYRSVQEIREHLRAKESTEPESSSCNCIQCELKIGSEEFEELLLLMEKIRDPFIHEISKIAMGMRSASQFTRDFIRDSGVVSLIETLLNYPSSRVRTSFLENMIRMAPPYPNLNIIQTYICKVCEETLAYSVDSPEQLSGIRMIRHLTTTTDYHTLVANYMSGFLSLLATGNAKTRFHVLKMLLNLSENLFMTKELLSAEAVSEFIGLFNREETNDNIQIVLAIFENIGNNIKKETVFSDDDFNIEPLISAFHKVEKFAKELQGKTDNQNDPEGDQEN

SEQ ID NO: 1452 - DNA, 3225 bp, Homo sapien
ggcggcagcgccctgccgacgccggggagggacgcaggcaggcggcgggcagcgggaggcggcaccccggtgctccccgcggctctcggcggagccccgccgcccgccgcgccatggcccgaagaccccggcacagcatatatagcagtgacgaggatgatgaggactttgagatgtgtgaccatgactatgatgggctgcttcccaagtctggaaagcgtcacttggggaaaacaaggtggacccgggaagaggatgaaaaactgaagaagctggtggaacagaatggaacagatgactggaaagttattgccaattatctcccgaatcgaacagatgtgcagtgccagcaccgatggcagaaagtactaaaccctgagctcatcaagggtccttggaccaaagaagaagatcagagagtgatagagcttgtacagaaatacggtccgaaacgttggtctgttattgccaagcacttaaaggggagaattggaaaacaatgtagggagaggtggcataaccacttgaatccagaagttaagaaaacctcctggacagaagaggaagacagaattatttaccaggcacacaagagactggggaacagatgggcagaaatcgcaaagctactgcctggacgaactgataatgctatcaagaaccactggaattctacaatgcgtcggaaggtcgaacaggaaggttatctgcaggagtcttcaaaagccagccagccagcagtggccacaagcttccagaagaacagtcatttgatgggttttgctcaggctccgcctacagctcaactccctgccactggccagcccactgttaacaacgactattcctattaccacatttctgaagcacaaaatgtctccagtcatgttccataccctgtagcgttacatgtaaatatagtcaatgtccctcagccagctgccgcagccattcagagacactataatgatgaagaccctgagaaggaaaagcgaataaaggaattagaattgctcctaatgtcaaccgagaatgagctaaaaggacagcaggtgctaccaacacagaaccacacatgcagctaccccgggtggcacagcaccaccattgccgaccacaccagacctcatggagacagtgcacctgtttcctgtttgggagaacaccactccactccatctctgccagcggatcctggctccctacctgaagaaagcgcctcgccagcaaggtgcatgatcgtccaccagggcaccattctggataatgttaagaacctcttagaatttgcagaaacactccaatttatagattctttcttaaacacttccagtaaccatgaaaactcagacttggaaatgccttctttaacttccacccccctcattggtcacaaattgactgttacaacaccatttcatagagaccagactgtgaaaactcaaaaggaaaatactgtttttagaaccccagctatcaaaaggtcaatcttagaaagctctccaagaactcctacaccattcaaacatgcacttgcagctcaagaaattaaatacggtcccctgaagatgctacctcagacaccctctcatctagtagaagatctgcaggatgtgatcaaacaggaatctgatgaatctggatttgttgctgagtttcaagaaaatggaccacccttactgaagaaaatcaaacaagaggtggaatctccaactgataaatcaggaaacttcttctgctcacaccactgggaaggggacagtctgaatacccaactgttcacgcagacctcgcctgtgcgagatgcaccgaatattcttacaagctccgttttaatggcaccagcatcagaagatgaagacaatgttctcaaagcatttacagtacctaaaaacaggtccctggcgagccccttgcagccttgtagcagtacctgggaacctgcatcctgtggaaagatggaggagcagatgacatcttccagtcaagctcgtaaatacgtgaatgcattctcagcccggacgctggtcatgtgagacatttccagaaaagcattatggttttcagaacagttcaagttgacttgggatatatcattcctcaacatgaaacttttcatgaatgggagaagaacctatttttgttgtggtacaacagttgagagcacgaccaagtgcatttagttgaatgaagtcttcttggatttcacccaactaaaaggatttttaaaaataaataacagtcttacctaaattattaggtaatgaattgtagccagttgttaatatcttaatgcagatttttttaaaaaaaaacataaaatgatttatctggtattttaaaggatccaacagatcagtattttttcctgtgatgggttttttgaaatttgacacattaaaaggtactccagtatttcacttttctcgatcactaaacatatgcatatatttttaaaaatcagtaaaagcattactctaagtgtagacttaataccatgtgacatttaatccagattgtaaatgctcatttatggttaatgacattgaaggtacatttattgtaccaaaccattttatgagttttctgttagcttgctttaaaaattattactgtaagaaatagttttataaaaaattatatttttattcagtaatttaattttgtaaatgccaaatgaaaaacgttttttgctgctatggtcttagcctgtagacatgctgctagtatcagaggggcagtagagcttggacagaaagaaaagaaacttggtgttaggtaattgactatgcactagtatttcagactttttaattttatatatatatacattttttttccttctgcaatacatttgaaaacttgtttgggagactctgcattttttattgtggtttttttgttattgttggtttatacaagcatgcgttgcacttcttttttgggagatgtgtgttgttcatgttctatgttttgttttgtgtgtagcctgactgttttataatttgggagttctcgatttgatccgcatcccctgtggtttctaagtgtatggtctcagaactgttgcatggatcctgtgtttgcaactggggagacagaaactgtggttgatagccagtcactgccttaagaacatttgatgcaagatggccagcactgaacttttgagatatgacggtgtacttactgccttgtagcaaaataaagatgtgcccttatttt

SEQ ID NO: 1453 - protein, 640 aa, Homo sapien
MARRPRHSIYSSDEDDEDFEMCDHDYDGLLPKSGKRHLGKTRWTREEDEKLKKLVEQNGTDDWKVIANYLPNRTDVQCQHRWQKVLNPELIKGPWTKEEDQRVIELVQKYGPKRWSVIAKHLKGRIGKQCRERWHNHLNPEVKKTSWTEEEDRIIYQAHKRLGNRWAEIAKLLPGRTDNAIKNHWNSTMRRKVEQEGYLQESSKASQPAVATSFQKNSHLMGFAQAPPTAQLPATGQPTVNNDYSYYHISEAQNVSSHVPYPVALHVNIVNVPQPAAAAIQRHYNDEDPEKEKRIKELELLLMSTENELKGQQVLPTQNHTCSYPGWHSTTIADHTRPHGDSAPVSCLGEHHSTPSLPADPGSLPEESASPARCMIVHQGTILDNVKNLLEFAETLQFIDSFLNTSSNHENSDLEMPSLTSTPLIGHKLTVTTPFHRDQTVKTQKENTVFRTPAIKRSILESSPRTPTPFKHALAAQEIKYGPLKMLPQTPSHLVEDLQDVIKQESDESGFVAEFQENGPPLLKKIKQEVESPTDKSGNFFCSHHWEGDSLNTQLFTQTSPVRDAPNILTSSVLMAPASEDEDNVLKAFTVPKNRSLASPLQPCSSTWEPASCGKMEEQMTSSSQARKYVNAFSARTLVM

SEQ ID NO: 1454 - DNA, 1937 bp, Homo sapien
ggaaactgaaagtgaaatagggagctggctaccagcgttgagttgccctgtaaagccaaaccccctaaaggtctccacactgctgtttaacggcacacttgacaatggcttcagcagcacgcttgacaatgatgtgggaggaggtcacatgccctatctgcctggaccccttcgtggagcctgtgagcatcgagtgtggccacagcttctgccaggaatgcatctctcaggttgggaaaggtgggggcagcgtctgtcctgtgtgccggcagcgctttctgctcaagaatctccggcccaatcgacagctagccaacatggtgaacaaccttaaagaaatcagccaggaggccagagagggcacacagggggaacggtgtgcagtgcatggagagagacttcacctgttctgtgagaaagatgggaaggccctttgctgggtatgtgcccagtctcggaaacaccgtgaccacgccatggtccctcttgaggaggctgcacaggagtaccaggagaagctccaggtggcattaggggaactgagaagaaagcaggagttggctgagaagttggaagtggaaattgcaataaagagagcagactggaagaaaacagtggaaacacagaaatctaggattcacgcagagtttgtgcagcaaaaaaacttcctggttgaagaagaacagaggcagctgcaggagctggagaaggatgagagggagcagctgagaatcctgggggagaaagaggccaagctggcccagcagagccaggccctacaggagctcatctcagagctagatcgaaggtgccacagctcagcactggaactgctgcaggaggtgataattgtcctggaaaggagtgagtcctggaacctgaaggacctggatattacctctccagaactcaggagtgtgtgccatgtgccagggctgaagaagatgctgaggacatgtgcagtccacatcactctggatccagacacagccaatccgtggctgatactttcagaagatcggagacaagtgaggcttggagacacccagcagagcatacctggaaatgaagagagatttgatagttatcctatggtcctgggtgcccagcactttcactctggaaaacattactgggaggtagatgtgacaggaaaggaggcctgggacctgggtgtctgcagagactctgtgcgcaggaaggggcactttttgcttagttccaagagtggcttctggacaatttggttgtggaacaaacaaaaatatgaggctggcacctacccccagactcccctccaccttcaggtgcctccatgccaagttgggattttcctggactatgaggctggcatggtctccttctacaacatcactgaccatggctccctcatctactccttctctgaatgtgcctttacaggacctctgcggcccttcttcagtcctggtttcaatgatggaggaaaaaacacagcccctctaaccctctgtccactgaatattggatcacaaggatccactgactattgatggctttctctggacactgccactctccccattggcaccgcttctcagccacaaaccctgcctcttttccccatgaactctgaaccacctttgtctctgcagaggcatccggatcccagcaagcgagctttagcagggaagtcacttcaccatcaacattcctgccccagatggctttgtgattccctccagtgaagcagcctccttatatttggcccaaactcatcttgatcaaccaaaaacatgtttctgccttctttatgggacttaagttttttttttctcctctccatctctaggatgtcgtctttggtgagatctctattatatcttgtatggtttgcaaaagggcttcctaaaaataaaaaataaaatttaaaaaactgtgaaaaaaaaaaaaaaaaa

SEQ ID NO: 1455 - protein, 475 aa, Homo sapien [sequence omitted]

SEQ ID NO: 1456 - DNA, 1503 bp, Homo sapien
gcacgcccagcgagttccagaggcgccagtggaagctgcggcggcggtgtctcgcgttcggcgggatttctcttcgctccggctcggcctaggtctacgtccccagctccagccgccggctcggactcggtctctgacccccaactcggtcccctagtccggccccggctccgggccccccaaccctcgctccggcccggcccggcccccaccccagccctgccgcccggccccaggcccggccgcggccgctcccgcctggagccgccgcgcgcccccagcccccctgcaccccctcggcccctcgccttcctcttcccggcgcggccccccggcttccgcgcgccgcccgccaccaatcctcttgctaccatgtccgtggagctcgaggaggccctgccagtgacgaccgccgagggaatggccaagaaggtgaccaaggctggcggctcggcggcgttgtccccatctaagaagaggaagaatagcaagaagaagaaccagccgggcaagtacagccagctggtggtggagaccatccgtaggctgggcgagcgcaacggctcgtcgctggccaagatctacaccgaggccaagaaggttccgtggttcgaccagcagaatgggcgcacctacctcaagtactcgatcaaggcgctggtgcagaacgacacgcttctgcaggtgaagggcaccggcgccaacggttccttcaagctcaaccgcaagaagctggagggcggcggggagcggcgcggagccccggcggccgccaccgccccggcccccaccgcgcacaaagcgaagaaggcagccccgggcgcggccggctcccggcgcgcggacaagaagcccgccaggggccagaagccggagcagcgctcgcacaagaagggcgctggcgccaagaaggacaaaggcggcaaggccaagaagacggcggccgccgggggcaagaaggtgaagaaggcggccaagcccagcgtccccaaagtgcccaagggccgcaagtgagcgtgtcggccggtcagagcggccggcgtgggcttttcggtgtttttgtttttctaccccaagtgacgtagattttgtacggctcacgccggccggggccgcgaggcctggtctgagcctcagggaggggccccgggtcctctcagtctttcccctcccccaacgatgtagcgtttttcgttgtttgctttaggtttttgaaacagccccggcgacgcctctattggctctcggccttggcaacggccgtcgtcatggttactggcccctaggcgccgatggccgaggccgcgcctgcccaccgggcggggtcgctggttggccgggcccaggcgcgcggggacgcggaggccgcgcatcctttcccagctccccaccctccttgcctttgggtgcgcgacaaacaatcgctccgggctcagggctgcgcggctcttcccttcattccatgggcctttttttgggcacaataaagcgtttaaacctttc

SEQ ID NO: 1457 - protein, 213 aa, Homo sapien
MSVELEEALPVTTAEGMAKKVTKAGGSAALSPSKKRKNSKKKNQPGKYSQLVVETIRRLGERNGSSLAKIYTEAKKVPWFDQQNGRTYLKYSIKALVQNDTLLQVKGTGANGSFKLNRKKLEGGGERRGAPAAATAPAPTAHKAKKAAPGAAGSRRADKKPARGQKPEQRSHKKGAGAKKDKGGKAKKTAAAGGKKVKKAAKPSVPKVPKGRK

SEQ ID NO: 1458 - DNA, 6662 bp, Homo sapien; identical to SEQ ID NO: 63

SEQ ID NO: 1459 - protein, 1795 aa, Homo sapien; identical to SEQ ID NO: 64

SEQ ID NO: 1460 - DNA, 2993 bp, Homo sapien
ggcacgaggggaaattcaaacgtgtttgcggaaaggagtttgggttccatcttttcatttccccagcgcagctttctgtagaaatggaatccgaggatttaagtggcagagaattgacaattgattccataatgaacaaagtgagagacattaaaaataagtttaaaaatgaagaccttactgatgaactaagcttgaataaaatttctgctgatactacagataactcgggaactgttaaccaaattatgatgatggcaaacaacccagaggactggttgagtttgttgctcaaactagagaaaaacagtgttccgctaagtgatgctcttttaaataaattgattggtcgttacagtcaagcaattgaagcgcttcccccagataaatatggccaaaatgagagttttgctagaattcaagtgagatttgctgaattaaaagctattcaagagccagatgatgcacgtgactactttcaaatggccagagcaaactgcaagaaatttgcttttgttcatatatcttttgcacaatttgaactgtcacaaggtaatgtcaaaaaaagtaaacaacttcttcaaaaagctgtagaacgtggagcagtaccactagaaatgctggaaattgccctgcggaatttaaacctccaaaaaaagcagctgctttcagaggaggaaaagaagaatttatcagcatctacggtattaactgcccaagaatcattttccggttcacttgggcatttacagaataggaacaacagttgtgattccagaggacagactactaaagccaggtttttatatggagagaacatgccaccacaagatgcagaaataggttaccggaattcattgagacaaactaacaaaactaaacagtcatgcccatttggaagagtcccagttaaccttctaaatagcccagattgtgatgtgaagacagatgattcagttgtaccttgttttatgaaaagacaaacctctagatcagaatgccgagatttggttgtgcctggatctaaaccaagtggaaatgattcctgtgaattaagaaatttaaagtctgttcaaaatagtcatttcaaggaacctctggtgtcagatgaaaagagttctgaacttattattactgattcaataaccctgaagaataaaacggaatcaagtcttctagctaaattagaagaaactaaagagtatcaagaaccagaggttccagagagtaaccagaaacagtggcaatctaagagaaagtcagagtgtattaaccagaatcctgctgcatcttcaaatcactggcagattccggagttagcccgaaaagttaatacagagcagaaacataccacttttgagcaacctgtcttttcagtttcaaaacagtcaccaccaatatcaacatctaaatggtttgacccaaaatctatttgtaagacaccaagcagcaataccttggatgattacatgagctgttttagaactccagttgtaaagaatgactttccacctgcttgtcagttgtcaacaccttatggccaacctgcctgtttccagcagcaacagcatcaaatacttgccactccacttcaaaatttacaggttttagcatcttcttcagcaaatgaatgcatttcggttaaaggaagaatttattccattttaaagcagataggaagtggaggttcaagcaaggtatttcaggtgttaaatgaaaagaaacagatatatgctataaaatatgtgaacttagaagaagcagataaccaaactcttgatagttaccggaacgaaatagcttatttgaataaactacaacaacacagtgataagatcatccgactttatgattatgaaatcacggaccagtacatctacatggtaatggagtgtggaaatattgatcttaatagttggcttaaaaagaaaaaatccattgatccatgggaacgcaagagttactggaaaaatatgttagaggcagttcacacaatccatcaacatggcattgttcacagtgatcttaaaccagctaactttctgatagttgatggaatgctaaagctaattgattttgggattgcaaaccaaatgcaaccagatacaacaagtgttgttaaagattctcaggttggcacagttaattatatgccaccagaagcaatcaaagatatgtcttcctccagagagaatgggaaatctaagtcaaagataagccccaaaagtgatgtttggtccttaggatgtattttgtactatatgacttacgggaaaacaccatttcagcagataattaatcagatttctaaattacatgccataattgatcctaatcatgaaattgaatttcccgatattccagagaaagatcttcaagatgtgttaaagtgttgtttaaaaagggacccaaaacagaggatatccattcctgagctcctggctcatccctatgttcaaattcaaactcatccagttaaccaaatggccaagggaaccactgaagaaatgaaatatgttctgggccaacttgttggtctgaattctcctaactccattttgaaagctgctaaaactttatatgaacactatagtggtggtgaaagtcataattcttcatcctccaagacttttgaaaaaaaaaggggaaaaaaatgatttgcagttattcgtaatgtcaaataccacctataaaatatattggactgttatactcttgaatccctgtggaaatctacatttgaagacaacatcactctgaagtgttatcagcaaaaaaaattcagtagattatctttaaaagaaaactgtaaaaatagcaaccacttatggtactgtatatattgtagacttgttttctctgttttatgctcttgtgtaatctacttgacatcattttactcttggaatagtgggtggatagcaagtatattctaaaaaactttgtaaataaagttttgtggctaaaatgacactaaaaaaaaaaaaaaaaaa

SEQ ID NO: 1461 - protein, 841 aa, Homo sapien
MNKVRDIKNKFKNEDLTDELSLNKISADTTDNSGTVNQIMMMANNPEDWLSLLLKLEKNSVPLSDALLNKLIGRYSQAIEALPPDKYGQNESFARIQVRFAELKAIQEPDDARDYFQMARANCKKFAFVHISFAQFELSQGNVKKSKQLLQKAVERGAVPLEMLEIALRNLNLQKKQLLSEEEKKNLSASTVLTAQESFSGSLGHLQNRNNSCDSRGQTTKARFLYGENMPPQDAEIGYRNSLRQTNKTKQSCPFGRVPVNLLNSPDCDVKTDDSVVPCFMKRQTSRSECRDLVVPGSKPSGNDSCELRNLKSVQNSHFKEPLVSDEKSSELIITDSITLKNKTESSLLAKLEETKEYQEPEVPESNQKQWQAKRKSECINQNPAASSNHWQIPELARKVNTEQKHTTFEQPVFSVSKQSPPISTSKWFDPKSICKTPSSNTLDDYMSCFRTPVVKNDFPPACQLSTPYGQPACFQQQQHQILATPLQNLQVLASSSANECISVKGRIYSILKQIGSGGSSKVFQVLNEKKQIYAIKYVNLEEADNQTLDSYRNEIAYLNKLQQHSDKIIRLYDYEITDQYIYMVMECGNIDLNSWLKKKKSIDPWERKSYWKNMLEAVHTIHQHGIVHSDLKPANFLIVDGMLKLIDFGIANQMQPDTTSVVKDSQVGTVNYMPPEAIKDMSSSRENGKSKSKISPKSDVWSLGCILYYMTYGKTPFQQIINQISKLHAIIDPNHEIEFPDIPEKDLQDVLKCCLKRDPKQRISIPELLAHPYVQIQTHPVNQMAKGTTEEMKYVLGQLVGLNSPNSILKAAKTLYEHYSGGESHNSSSSKTFEKKRGKK

SEQ ID NO: 1462 - DNA, 2470 bp, Homo sapien
ttggcgggcggaagcggccacaacccggcgatcgaaaagattcttaggaacgccgtaccagccgcgtctctcaggacagcaggcccctgtccttctgtcgggcgccgctcagccgtgccctccgcccctcaggttctttttctaattccaaataaacttgcaagaggactatgaaagattatgatgaacttctcaaatattatgaattacatgaaactattgggacaggtggctttgcaaaggtcaaacttgcctgccatatccttactggagagatggtagctataaaaatcatggataaaaacacactagggagtgatttgccccggatcaaaacggagattgaggccttgaagaacctgagacatcagcatatatgtcaactctaccatgtgctagagacagccaacaaaatattcatggttcttgagtactgccctggaggagagctgtttgactatataatttcccaggatcgcctgtcagaagaggagacccgggttgtcttccgtcagatagtatctgctgttgcttatgtgcacagccagggctatgctcacagggacctcaagccagaaaatttgctgtttgatgaatatcataaattaaagctgattgactttggtctctgtgcaaaacccaagggtaacaaggattaccatctacagacatgctgtgggagtctggcttatgcagcacctgagttaatacaaggcaaatcatatcttggatcagaggcagatgtttggagcatgggcatactgttatatgttcttatgtgtggatttctaccatttgatgatgataatgtaatggctttatacaagaagattatgagaggaaaatatgatgttcccaagtggctctctcccagtagcattctgcttcttcaacaaatgctgcaggtggacccaaagaaacggatttctatgaaaaatctattgaaccatccctggatcatgcaagattacaactatcctgttgagtggcaaagcaagaatccttttattcacctcgatgatgattgcgtaacagaactttctgtacatcacagaaacaacaggcaaacaatggaggatttaatttcactgtggcagtatgatcacctcacggctacctatcttctgcttctagccaagaaggctcggggaaaaccagttcgtttaaggctttcttctttctcctgtggacaagccagtgctaccccattcacagacatcaagtcaaataattggagtctggaagatgtgaccgcaagtgataaaaattatgtggcgggattaatagactatgattggtgtgaagatgatttatcaacaggtgctgctactccccgaacatcacagtttaccaagtactggacagaatcaaatggggtggaatctaaatcattaactccagccttatgcagaacacctgcaaataaattaaagaacaaagaaaatgtatatactcctaagtctgctgtaaagaatgaagagtactttatgtttcctgagccaaagactccagttaataagaaccagcataagagagaaatactcactacgccaaatcgttacactacaccctcaaaagctagaaaccagtgcctgaaagaaactccaattaaaataccagtaaattcaacaggaacagacaagttaatgacaggtgtcattagccctgagaggcggtgccgctcagtggaattggatctcaaccaagcacatatggaggagactccaaaaagaaagggagccaaagtgtttgggagccttgaaagggggttggataaggttatcactgtgctcaccaggagcaaaaggaagggttctgccagagacgggcccagaagactaaagcttcactataatgtgactacaactagattagtgaatccagatcaactgttgaatgaaataatgtctattcttccaaagaagcatgttgactttgtacaaaagggttatacactgaagtgtcaaacacagtcagattttgggaaagtgacaatgcaatttgaattagaagtgtgccagcttcaaaaacccgatgtggtgggtatcaggaggcagcggcttaagggcgatgcctgggtttacaaaagattagtggaagacatcctatctagctgcaaggtataattgatggattcttccatcctgccggatgagtgtgggtgtgatacagcctacataaagactgttatgatcgctttgattttaaagttcattggaactaccaacttgtttctaaagagctatcttaagaccaatatctctttgtttttaaacaaaagatattattttgtgtatgaatctaaatcaagcccatctgtcattatgttactgtcttttttaatcatgtggttttgtatattaataattgttgactttcttagattcacttccatatgtgaatgtaagctcttaactatgtctctttgtaatgtgtaatttctttctgaaataaaaccatttgtgaatat

SEQ ID NO: 1463 - protein, 651 aa, Homo sapien
MKDYDELLKYYELHETIGTGGFAKVKLACHILTGEMVAIKIMDKNTLGSDLPRIKTEIEALKNLRHQHICQLYHVLETANKIFMVLEYCPGGELFDYIISQDRLSEEETRVVFRQIVSAVAYVHSQGYAHRDLKPENLLFDEYHKLKLIDFGLCAKPKGNKDYHLQTCCGSLAYAAPELIQGKSYLGSEADVWSMGILLYVLMCGFLPFDDDNVMALYKKIMRGKYDVPKWLSPSSILLLQQMLQVDPKKRISMKNLLNHPWIMQDYNYPVEWQSKNPFIHLDDDCVTELSVHHRNNRQTMEDLISLWQYDHLTATYLLLLAKKARGKPVRLRLSSFSCGQASATPFTDIKSNNWSLEDVTASDKNYVAGLIDYDWCEDDLSTGAATPRTSQFTKYWTESNGVESKSLTPALCRTPANKLKNKENVYTPKSAVKNEEYFMFPEPKTPVNKNQHKREILTTPNRYTTPSKARNQCLKETPIKIPVNSTGTDKLMTGVISPERRCRSVELDLNQAHMEETPKRKGAKVFGSLERGLDKVITVLTRSKRKGSARDGPRRLKLHYNVTTTRLVNPDQLLNEIMSILPKKHVDFVQKGYTLKCQTQSDFGKVTMQFELEVCQLQKPDVVGIRRQRLKGDAWVYKRLVEDILSSCKV

SEQ ID NO: 1464 - DNA, 4238 bp, Homo sapien
gcgctctcaggcgggctccggcggcagcgacgcgagcgcggcgatggggagcggcggcgtggtccactgtaggtgtgccaagtgtttctgttatcctacaaagcgaagaataaggaggaggccccgaaacctgaccatcttgagtctccccgaagatgtgctctttcacatcctgaaatggctttctgtagaggacatcctggccgtccgagctgtacactcccagctgaaggacctggtggacaaccacgccagtgtgtgggcatgtgccagcttccaggagctgtggccgtctccagggaacctgaagctctttgaaagggctgctgaaaaggggaatttcgaagctgctgtgaagctgggcatagcctacctctacaatgaaggcctgtctgtgtctgatgaggcccgcgcagaagtgaatggcctgaaggcctctcgcttcttcagtctcgctgagcggctgaatgtgggtgccgcacctttcatctggctcttcatccgccctccgtggtcggtgagcggaagctgctgcaaggccgtggttcacgagagcctcagggcagagtgccagctgcagaggactcacaaagcatccatattgcactgcttgggcagagtgctgagtctgttcgaggatgaggagaagcagcagcaggcccatgacctgtttgaggaggctgctcatcagggatgtctgaccagctcctacctcctctgggaaagcgacaggaggacagatgtgtcagatcctgggcgatgcctccacagcttccgaaaactcagggactacgctcgcaaaggctgctgggaagcgcagctgtctttagccaaagcctgtgcaaatgcaaaccagcttggactggaggtgagagcttccagtgagatcgtctgccagctatttcaggcttcccaggctgtcagtaaacaacaagtcttctccgtgcagaagggactcaatgacacaatgaggtacattctgatcgactggctggtggaagttgccaccatgaatgacttcacaagcctgtgcctgcacctgaccgtggagtgtgtggaccggtacctgcggaggaggctggtgccgcggtacaggctccagctgctgggcatcgcctgcatggtcatctgcacccggtttatcagtaaagagatcctgaccatccgggaggccgtatggctcacggacaacacttacaagtacgaggacctggtgagaatgatgggcgagatcgtctccgccttggaagggaagattcgagtccccactgtggtggattacaaggaggtcctgctgacgctagtccctgtggagctgagaacccagcacctgtgcagcttcctctgcgagctctccctgctgcacaccagcctgtccgcctacgccccagcccgcctggctgccgcagccctgctcctggccagactgacgcacgggcagacacagccctggaccactcagctgtgggacctcaccggattctcctatgaagacctcattccctgcgtcttgagcctccataagaagtgcttccatgatgacgcccccaaggactacaggcaagtctctctgaccgccgtgaagcagcggtttgaggacaagcgctatggagaaatcagccaggaagaggtgctgagctacagccagttgtgtgctgcattaggagtgacacaagacagccccgaccccccgactttcctcagcacaggggagatccacgccttcctcagctctccctcggggcggagaaccaaacggaagcgggagaacagcctccaggaagacagaggcagcttcgttaccacccccactgcggagctgtccagccaggaggagaccgtgctgggcagcttcctcgactggagcctggactgctgctctggctatgaaggcgaccaggagagtgagggcgagaaggagggcgacgtgacagctcccagcggcatcctcgatgtcaccgtggtctacctgaacccagaacagcattgctgccaggaatccagtgatgaggaggcttgtccagaggcaaagggaccccaggacccacaggcactggcgctggacacccagatccctgcaacccctggacccaaacccctggtccgcaccagccgggagccagggaaggacgtcacgacctcagggtactcctccgtcagcaccgcaagtcccacaagctccgtggacggtggcttgggggccctgccccaacctacctcagtgctgtccctgcacagtgactcgcacacacagccctgccaccatcaggccaggaagtcatgtttacagtgtcgtcccccaagtcccccggagagcagtgttccccagcaacaggtgaagcggataaacctatgcatacacagtgaggaggaggacatgaacctgggccttgtgaggctgtaagtgtgtcagcacatttgccgcagtggatgtgtactgagggggctggaggcgaagggtgggagcatagcataggaacgctgcatagaccatggaggcctttgcgcagagagcagagaggatgacttgcggccaccaagtttctgtctccgcgggagtcccgtgcaagccatcagaatgttgaaatgagggtgaagagctcagatccctctctttggaaagtttagcctggaagcagttggccacactgtgtggagggcacctctctgtcccttccgtgtctcactgtctctggaagcttcagcccatgtgtgtcctggtgttcccagccccaccagagccccgtgccgggagctgacagctttcacgcttaaggcacgtgtgacctgggtagtcagacaccacttgagcccctgcccacatctgctggtttggggcttcagtggggagctgacagctgtgagcacaccactgtcccctcatccacctcggcctgcatggggcacccacttccttctgggtggggcttccatggtaagggggcctgcgtccctgcacactgcgaggactgccttgccacaggcccactccctacgacacgtgactcgttttagagctctgtcccagaggcgttcgtatgtgacccacagatggcgtcaatgtgaacacctctctttgtgctgaatttctgggccattcttttcctgtcttatttctaaatttccttcttccaagatgaaaacaaaagaaaaacttaaaacagaaggtattaaaaaaacaagagattcccaccattatttaggttcacctgcaaaacaaaaatcttactccagcccctcaatgccatcctgacacactttatgcaaaaagaattttcccagataggctagccagaaaaaacttcaagtcctctgtaacatctgaggtgaccaagaggcagaagagcagagcagtcgggggccgtgtcctggctgatcccaactgcagctctgctgtgggggcccgtgggagggaggcagacccctgggctttcctgctggccacggagactctgctcctgcatggaaagggagcctgggagccagcagcccacgcctggggagcctgcctggggccatgtgaccatggcctctccctgggaacgggctgaccacaacacaccctgctgccatccacttctgtttactctgcaaatgtaagaaagaaccacttggccagaagtgtcccccagatgcttttttttttttttttttggagacagttttgctcttgtctccccggctggagtgcagtggcatgatctcaactctcaactcactgtaacctccgcctcccggatactcctgcctcagcctcctgggtagctgggattacaagcacccaaccacgcccagctaatttttgtattttcggtagagacgggatttcaccatgttggccaggctagtctcgaactcatgacctcaagtgatccgcccacttcggtctcccaaagtgctgggattacaggcatgagccacggcgcctggcccccaaatgctcttgaaccggaaacccagggatgggagatgctcactgagctgctgcttttatgtgtgctggtgctatgtgtgttcatgtccgcggcagctgtctttttgctactataagggaattctggccaccctgggtggggtgtggtcggggtgagaacccaagcgttggaactgtagacccgtcctgtcgactgtgtgcccctgggcatgtgtgagcctcagtttcctcatctgtaaggggggcaatgatacctacctcacagggggttgtgaggattaaatgtgaggaggatagtggcaac

SEQ ID NO: 1465 - protein, 786 aa, Homo sapien
MGSGGVVHCRCAKCFCYPTKRRIRRRPRNLTILSLPEDVLFHILKWLSVEDILAVRAVHSQLKDLVDNHASVWACASFQELWPSPGNLKLFERAAEKGNFEAAVKLGIAYLYNEGLSVSDEARAEVNGLKASRFFSLAERLNVGAAPFIWLFIRPPWSVSGSCCKAVVHESLRAECQLQRTHKASILHCLGRVLSLFEDEEKQQQAHDLFEEAAHQGCLTSSYLLWESDRRTDVSDPGRCLHSFRKLRDYARKGCWEAQLSLAKACANANQLGLEVRASSEIVCQLFQASQAVSKQQVFSVQKGLNDTMRYILIDWLVEVATMNDFTSLCLHLTVECVDRYLRRRLVPRYRLQLLGIACMVICTRFISKEILTIREAVWLTDNTYKYEDLVRMMGEIVSALEGKIRVPTVVDYKEVLLTLVPVELRTQHLCSFLCELSLLHTSLSAYAPARLAAAALLLARLTHGQTQPWTTQLWDLTGFSYEDLIPCVLSLHKKCFHDDAPKDYRQVSLTAVKQRFEDKRYGEISQEEVLSYSQLCAALGVTQDSPDPPTFLSTGEIHAFLSSPSGRRTKRKRENSLQEDRGSFVTTPTAELSSQEETVLGSFLDWSLDCCSGYEGDQESEGEKEGDVTAPSGILDVTVVYLNPEQHCCQESSDEEACPEAKGPQDPQALALDTQIPATPGPKPLVRTSREPGKDVTTSGYSSVSTASPTSSVDGGLGALPQPTSVLSLHSDSHTQPCHHQARKSCLQCRPPSPPESSVPQQQVKRINLCIHSEEEDMNLGLVRL

SEQ ID NO: 1466 - DNA, 1496 bp, Homo sapien
cgcactccctgctgggtgagcagcactgtaaagatgaagctggctaactggtactggctgagctcagctgttcttgccacttacggttttttggttgtggcaaacaatgaaacagaggaaattaaagatgaaagagcaaaggatgtctgcccagtgagactagaaagcagagggaaatgcgaagaggcaggggagtgcccctaccaggtaagcctgccccccttgactattcagctcccgaagcaattcagcaggatcgaggaggtgttcaaagaagtccaaaacctcaaggaaatcgtaaatagtctaaagaaatcttgccaagactgcaagctgcaggctgatgacaacggagacccaggcagaaacggactgttgttacccagtacaggagccccgggagaggttggtgataacagagttagagaattagagagtgaggttaacaagctgtcctctgagctaaagaatgccaaagaggagatcaatgtacttcatggtcgcctggagaagctgaatcttgtaaatatgaacaacatagaaaattatgttgacagcaaagtggcaaatctaacatttgttgtcaatagtttggatggcaaatgttcaaagtgtcccagccaagaacaaatacagtcacgtccagttcaacatctaatatataaagattgctctgactactacgcaataggcaaaagaagcagtgagacctacagagttacacctgatcccaaaaatagtagctttgaagtttactgtgacatggagaccatggggggaggctggacagtgctgcaggcacgtctcgatgggagcaccaacttcaccagaacatggcaagactacaaagcaggctttggaaacctcagaagggaattttggctggggaacgataaaattcatcttctgaccaagagtaaggaaatgattctgagaatagatcttgaagactttaatggtgtcgaactatatgccttgtatgatcagttttatgtggctaatgagtttctcaaatatcgtttacacgttggtaactataatggcacagctggagatgcattacgtttcaacaaacattacaaccacgatctgaagtttttcaccactccagataaagacaatgatcgatatccttctgggaactgtgggctgtactacagttcaggctggtggtttgatgcatgtctttctgcaaacttaaatggcaaatattatcaccaaaaatacagaggtgtccgtaatgggattttctggggtacctggcctggtgtaagtgaggcacaccctggtggctacaagtcctccttcaaagaggctaagatgatgatcagacccaagcactttaagccataaatcactctgttcattcctccaggtattcgttatctaatagggcaattaattccttcagcactttagaatatgccttgtttcatatttttcatagctaaaaaatgtttgacatcctttgagatattttattactaaaatctgcc

SEQ ID NO: 1467 - protein, 439 aa, Homo sapien
MKLANWYWLSSAVLATYGFLVVANNETEEIKDERAKDVCPVRLESRGKCEEAGECPYQVSLPPLTIQLPKQFSRIEEVFKEVQNLKEIVNSLKKSCQDCKLQADDNGDPGRNGLLLPSTGAPGEVGDNRVRELESEVNKLSSELKNAKEEINVLHGRLEKLNLVNMNNIENYVDSKVANLTFVVNSLDGKCSKCPSQEQIQSRPVQHLIYKDCSDYYAIGKRSSETYRVTPDPKNSSFEVYCDMETMGGGWTVLQARLDGSTNFTRTWQDYKAGFGNLRREFWLGNDKIHLLTKSKEMILRIDLEDFNGVELYALYDQFYVANEFLKYRLHVGNYNGTAGDALRFNKHYNHDLKFFTTPDKDNDRYPSGNCGLYYSSGWWFDACLSANLNGKYYHQKYRGVRNGIFWGTWPGVSEAHPGGYKSSFKEAKMMIRPKHFKP

SEQ ID NO: 1468 - DNA, 5433 bp, Homo sapien
ggggagattcgggaccatggcacctgtgcacggcgacgactctctgtcagattcagggagttttgtatcttctcgagcccggcgagaaaaaaaatcaaagaaggggcgccaagaagccctagaaagactgaaaaaggctaaagctggtgagaagtataaatatgaagtcgaggacttcacaggtgtttatgaagaagttgatgaagaacagtattcgaagctggttcaggcacgccaggatgatgactggattgtggatgatgatggtattggctatgtggaagatggccgagagatttttgatgatgaccttgaagatgatgcccttgatgctgatgagaaaggaaaagatggtaaagcacgcaataaagacaagaggaatgtaaagaagctcgcagtgacaaaaccgaacaacattaagtcaatgttcattgcttgtgctggaaagaaaactgcagataaagctgtagacttgtccaaggatggtctgctaggtgacattctacaggatcttaacactgagacacctcaaataactccaccacctgtaatgatactgaagaagaaaagatccattggagcttcaccgaatcctttctctgtgcacaccgccacggcagttccttcaggaaaaattgcttcccctgtctccagaaaggagcctccattaactcctgttcctcttaaacgtgctgaatttgctggcgatgatgtacaggtcgagagtacagaagaagagcaggagtcaggggcaatggagtttgaagatggtgactttgatgagcccatggaagttgaagaggtggacctggagcctatggctgccaaggcttgggacaaagagagtgagccagcagaggaagtgaaacaagaggcggattctgggaaagggaccgtgtcctacttaggaagttttctcccggatgtctcttgttgggacattgatcaagaaggtgatagcagtttctcagtgcaagaagttcaagtggattccagtcacctcccattggtaaaaggggcagatgaggaacaagtattccacttttattggttggatgcttatgaggatcagtacaaccaaccaggtgtggtatttctgtttgggaaagtttggattgaatcagccgagacccatgtgagctgttgtgtcatggtgaaaaatatcgagcgaacgctttacttccttccccgtgaaatgaaaattgatctaaatacggggaaagaaacaggaactccaatttcaatgaaggatgtttatgaggaatttgatgagaaaatagcaacaaaatataaaattatgaagttcaagtctaagccagtggaaaagaactatgcttttgagatacctgatgttccagaaaaatctgagtacttggaagttaaatactcggctgaaatgccacagcttcctcaagatttgaaaggagaaactttttctcatgtatttgggaccaacacatctagcctggaactgttcttgatgaacagaaagatcaaaggaccttgttggcttgaagtaaaaaagtccacagctcttaatcagccagtcagttggtgtaaagttgaggcaatggctttgaaaccagacctggtgaatgtaattaaggatgtcagtccaccaccgcttgtcgtgatggctttcagcatgaagacaatgcagaatgcaaagaaccatcaaaatgagattattgctatggcagctttggtccatcacagttttgcattggataaagcagccccaaagcctccctttcagtcacacttctgtgttgtgtctaaaccaaaggactgtatttttccatatgctttcaaagaagtcattgagaaaaagaatgtgaaggttgaggttgctgcaacagaaagaacactgctaggttttttccttgcaaaagttcacaaaattgatcctgatatcattgtgggtcataatatttatgggtttgaactggaagtactactgcagagaattaatgtgtgcaaagctcctcactggtccaagataggtcgactgaagcgatccaacatgccaaagcttgggggccggagtggatttggtgaaagaaatgctacctgtggtcgaatgatctgtgatgtggaaatttcagcaaaggaattgattcgttgtaaaagctaccatctgtctgaacttgttcagcagattctaaaaactgaaagggttgtaatcccaatggaaaatatacaaaatatgtacagtgaatcttctcaactgttatacctgttggaacacacctggaaagatgccaagttcattttgcagatcatgtgtgagctaaatgttcttccattagcattgcagatcactaacatcgctgggaacattatgtccaggacgctgatgggtggacgatccgagcgtaacgagttcttgttgcttcatgcattttacgaaaacaactatattgtgcctgacaagcagattttcagaaagcctcagcaaaaactgggagatgaagatgaagaaattgatggagataccaataaatacaagaaaggacgtaagaaaggagcttatgctggaggcttggttttggaccccaaagttggtttttatgataagttcattttgcttctggacttcaacagtctatatccttccatcattcaggaatttaacatttgttttacaacagtacaaagagttgcttcagaggcacagaaagttacagaggatggagaacaagaacagatccctgagttgccagatccaagcttagaaatgggcattttgcccagagagatccggaaactggtagaacggagaaaacaagtcaaacagctaatgaaacagcaagacttaaatccagaccttattcttcagtatgacattcgacagaaggctttgaagctcacagcgaacagtatgtatggttgcctgggattttcctatagcagattttacgccaaaccactggctgccttggtgacatacaaaggaagggagattttgatgcatacgaaagagatggtacaaaagatgaatcttgaagttatttatggagatacagattcaattatgataaacaccaatagcaccaatctggaagaagtatttaagttgggaaacaaggtaaaaagtgaagtgaataagttgtacaaactgcttgaaatagacattgatggggttttcaagtctctgctactgctgaaaaaaaagaagtacgctgctctggttgttgagccaacgtcggatgggaattatgtcaccaaacaggagctcaaaggattagatatagttagaagagattggtgtgatcttgctaaagacactggaaactttgtgattggccagattctttctgatcaaagccgggacactatagtggaaaacattcagaagaggctgatagaaattggagaaaatgtgctaaatggcagtgtcccagtgagccagtttgaaattaacaaggcattgacaaaggatccccaggattaccctgataaaaaaagcctacctcatgtacatgttgccctctggataaattctcaaggaggcagaaaggtgaaagctggagatactgtgtcatatgtcatctgtcaggatggatcaaacctcactgcaagtcagagggcctatgcgcctgagcagctgcagaaacaggataatctaaccattgacacccagtactacctggcccagcagatccacccagtcgtggctcggatctgtgaaccaatagacggaattgatgctgtcctcattgcaacgtggttgggacttgaccccacccaatttagagttcatcattatcataaagatgaagagaatgatgctctacttggtggcccagcacagctcactgatgaagagaaatacagggactgtgaaagattcaaatgtccatgccctacatgtggaactgagaatatttatgataatgtctttgatggttcgggaacagatatggagcccagcttgtatcgttgcagtaacatcgattgtaaggcttcacctctgacctttacagtacaactgagcaacaaattgatcatggacattagacgtttcattaaaaagtactatgatggctggttgatatgtgaagagccaacctgtcgcaatcgaactcgtcaccttccccttcaattctcccgaactgggcctctttgcccagcctgcatgaaagctacacttcaaccagagtattctgacaagtccctgtacacccagctgtgcttttaccggtacatttttgatgcggagtgtgcactggagaaacttactaccgatcatgagaaagataaattgaagaagcaattttttacccccaaagttctgcaggactacagaaaactcaagaacacagcagagcaattcttgtcccgaagtggctactccgaagtgaatctgagcaaactcttcgctggttgtgccgtgaaatcctaagggaatcccaggagtaaccaaggagggggtagttgaaaaatcccagcttcctctgtgcctccactctggccctaaatgctcctccagcatctgtttctcccttgggactgtgtctcatgtttgtgtgaatgtagaccaggaaagggggctgcaaaaatgttgagtctaatgttcgtaagcatcatagaaattcctgtcttcatattaagatgtactgctttaaaacacaactccagagcccctccccaagctcccctccccaagctcctgaagacccggtttctgagggagggaaattgctacttggattgagagtagctggaatgtaagtgaccccaggctttgctcagggcctttagcctatgtcccccccacataaagagagcttctcagagcctgactgaagagctgacgttttgctttttcatatgccaattaaacccggtctaaatccaaatgcttctccagccatccaggagtggctgtccttttcagtcttgtcttttatataggtagctgagggggaagatttagaagccttgcactcactaaatagattaaacagagcaggcttgtttgttgaattgctccaaagtccaacagacacacactgagcaggtgttttacactcacattccctttttgccccttaaatagaaagtgcaggtaaaggtttatacaacaagaaagcacattgaaaataatttgatactctaacaatccattaacatgtgtaggggttacggtgaggatcatgtgttgtattcgaaaaacggggagagggatgcttaattggccctcgcttgctatttttttctcatttcttcacaataggaccgtctttggcagcagcaaaatgtatttcagtatggcagtctttcctctcttacattattggtaagattatactaacaaaatgtttccccttgtacaattatgctgtgtttttaaaaaacattgacctgtgtgtttttataaaagaaaaagtatgttgtgccttcttcttaagaataaagttttctaaaggg

SEQ ID NO: 1469 - protein, 1462 aa, Homo sapien
MAPVHGDDSLSDSGSFVSSRARREKKSKKGRQEALERLKKAKAGEKYKYEVEDFTGVYEEVDEEQYSKLVQARQDDDWIVDDDGIGYVEDGREIFDDDLEDDALDADEKGKDGKARNKDKRNVKKLAVTKPNNIKSMFIACAGKKTADKAVDLSKDGLLGDILQDLNTETPQITPPPVMILKKKRSIGASPNPFSVHTATAVPSGKIASPVSRKEPPLTPVPLKRAEFAGDDVQVESTEEEQESGAMEFEDGDFDEPMEVEEVDLEPMAAKAWDKESEPAEEVKQEADSGKGTVSYLGSFLPDVSCWDIDQEGDSSFSVQEVQVDSSHLPLVKGADEEQVFHFYWLDAYEDQYNQPGVVFLFGKVWIESAETHVSCCVMVKNIERTLYFLPREMKIDLNTGKETGTPISMKDVYEEFDEKIATKYKIMKFKSKPVEKNYAFEIPDVPEKSEYLEVKYSAEMPQLPQDLKGETFSHVFGTNTSSLELFLMNRKIKGPCWLEVKKSTALNQPVSWCKVEAMALKPDLVNVIKDVSPPPLVVMAFSMKTMQNAKNHQNEIIAMAALVHHSFALDKAAPKPPFQSHFCVVSKPKDCIFPYAFKEVIEKKNVKVEVAATERTLLGFFLAKVHKIDPDIIVGHNIYGFELEVLLQRINVCKAPHWSKIGRLKRSNMPKLGGRSGFGERNATCGRMICDVEISAKELIRCKSYHLSELVQQILKTERVVIPMENIQNMYSESSQLLYLLEHTWKDAKFILQIMCELNVLPLALQITNIAGNIMSRTLMGGRSERNEFLLLHAFYENNYIVPDKQIFRKPQQKLGDEDEEIDGDTNKYKKGRKKGAYAGGLVLDPKVGFYDKFILLLDFNSLYPSIIQEFNICFTTVQRVASEAQKVTEDGEQEQIPELPDPSLEMGILPREIRKLVERRKQVKQLMKQQDLNPDLILQYDIRQKALKLTANSMYGCLGFSYSRFYAKPLAALVTYKGREILMHTKEMVQKMNLEVIYGDTDSIMINTNSTNLEEVFKLGNKVKSEVNKLYKLLEIDIDGVFKSLLLLKKKKYAALVVEPTSDGNYVTKQELKGLDIVRRDWCDLAKDTGNFVIGQILSDQSRDTIVENIQKRLIEIGENVLNGSVPVSQFEINKALTKDPQDYPDKKSLPHVHVALWINSQGGRKVKAGDTVSYVICQDGSNLTASQRAYAPEQLQKQDNLTIDTQYYLAQQIHPVVARICEPIDGIDAVLIATWLGLDPTQFRVHHYHKDEENDALLGGPAQLTDEEKYRDCERFKCPCPTCGTENIYDNVFDGSGTDMEPSLYRCSNIDCKASPLTFTVQLSNKLIMDIRRFIKKYYDGWLICEEPTCRNRTRHLPLQFSRTGPLCPACMKATLQPEYSDKSLYTQLCFYRYIFDAECALEKLTTDHEKDKLKKQFFTPKVLQDYRKLKNTAEQFLSRSGYSEVNLSKLFAGCAVKS

SEQ ID NO: 1470 - DNA, 2759 bp, Homo sapien
ggcacgaggcaagaggcagcctgggggccacagctgcttcagcagacctcatggctgagtgagcctcccctgggcccagcaccccacctcagcatggtccaagccatggggggcgctccagagcacagccgttgaccttgtctttgggggcagccatgacccagcctccgcctgaaaaaacgccagccaagaagcatgtgcgactgcaggagaggcggggctccaatgtggctctgatgctggacgttcggtccctgggggccgtagaacccatctgctctgtgaacacaccccgggaggtcaccctacactttctgcgcactgctggacacccccttacccgctgggcccttcagcgccagccacccagccccaagcaactggaagaagaattcttgaagatcccttcaaactttgtcagccccgaagacctggacatccctggccacgcctccaaggaccgatacaagaccatcttgccaaatccccagagccgtgtctgtctaggccgggcacagagccaggaggacggagattacatcaatgccaactacatccgaggctatgacgggaaggagaaggtctacattgccacccagggccccatgcccaacactgtgtcggacttctgggagatggtgtggcaagaggaagtgtccctcattgtcatgctcactcagctccgagagggcaaggagaaatgtgtccactactggcccacagaagaggaaacctatggacccttccagatccgcatccaggacatgaaagagtgcccagaatacactgtgcggcacgtcaccatccagtaccaggaagagcgccggtcagtaaagcacatcctcttttcggcctggccagaccatcagacaccagaatcagctgggcccctgctgcgcctagtggcagaggtggaggagagcccggagacagccgcccaccccgggcctatcgtagtccactgcagtgcagggattggccggacgggctgcttcatcgccacgcgaattggctgtcaacagctgaaagcccgaggagaagtggacattctgggtattgtgtgccaactgcggctagacagaggggggatgatccagacggcagagcagtaccagttcctgcaccacactttggccctgtatgcaggccagctgcctgaggaacccagcccctgacccctgccaccctccggtggcccaggtgcctacctccctcaagcctgggaaggtgggtctggggaaagtgggccgagtgatctgggggtacccttgggttggtgtggggaaggagtgcctccttagtggtgcttgacagtcacaggaagcagcagcagtaaggacaaggggccggattcaggtcttcaaccactggccactcctcttgccttcctctgttggccccagatggacagtaaggggaacctccaatgtctctctgaacttaaagacaggagctggcatttatgacagacaaagaaagaagcccaggtgtcctggtgttctctgagacactctttgtgatcttcagtttcctgttctataacatgaacataagtgcttagctgccatgagggaaaagtaatgagagaagttctagaagccactccagccactccttcctggggctgacaaaagggtgattccaagatcatccttcacccgaggtcctgcccaagcacaggccagatgcaagaatggggaaaagtctggtcctgatctccaagtctcaacatcctatcagtgactctgcctccctgaccacacatcggaagggcctggatgacccaatcaaaagaaagaacaaggactctggttacccttgcctccacccatgtgtcataagagtaggctacagaggtgaccaggcctggcagttgaaatctctggaagagggaacatgtggggactactcagaggcaaagaggagctgctcctgcctccatggttgctggccactcccaccaactactcttagggaggctaagcagtctctgttttgaccttccatggctcaataatacctggatgcaggaccactataccttgcatttgctgagtacacctagagagcttggctgtttccaaaaacaatcagggtcataaccatccatgcagacatggaggctcggctgaaccaggactcctcactgtctacctgagagaatgagcacccctcatccatctcagcatcaacacaatttccaggggacctcaggtctacctcaggactgaaccgccacacctcaggattcctcctccttgaatctgagactggctgcccattctgagatggggatgaaggtaagatgccgcatcaccagcacgccgcccctgacagctgccttgataccagctctctgtggaaacccccgaggagttggatctggagaacagctgggcctcctcactcaggacttctctcctgaagaacacgcagtgctaaaactgaggatgatttccctaatgcttctgcttggagtctcttatggaggagctgctccttccttacagcttggggatggacttcccacacctccacctcccctgagccctgagccctgtgagaggacgactgtctatgcaatgaggctcggtggggggctctcaagtgcctgatcctgcctggctcagaggcagccagagggaagcaactgacagccccacaggccctccctggcactgtccccatctcagagctcaggagggtacaagctccagaacagtaaccaagtgggaaaataaagacttcttggatgactg

SEQ ID NO: 1471 - protein, 339 aa, Homo sapien
MTQPPPEKTPAKKHVRLQERRGSNVALMLDVRSLGAVEPICSVNTPREVTLHFLRTAGHPLTRWALQRQPPSPKQLEEEFLKIPSNFVSPEDLDIPGHASKDRYKTILPNPQSRVCLGRAQSQEDGDYINANYIRGYDGKEKVYIATQGPMPNTVSDFWEMVWQEEVSLIVMLTQLREGKEKCVHYWPTEEETYGPFQIRIQDMKECPEYTVRHVTIQYQEERRSVKHILFSAWPDHQTPESAGPLLRLVAEVEESPETAAHPGPIVVHCSAGIGRTGCFIATRIGCQQLKARGEVDILGIVCQLRLDRGGMIQTAEQYQFLHHTLALYAGQLPEEPSP

SEQ ID NO: 1472 - DNA, 2608 bp, Homo sapien
agctcgccggcctttggtctccaggacttgtcccagcagcccctcgaactgagaattacaccatcggacccctggctctgaggccttcagacttggactgtgtcacactgccaggcttccagggctccaacttgcagacggcctgttgtgggacagtctctgtaatcgcgaaagcaaccatggaagacctgggggaaaacaccatggttttatccaccctgagatctttgaacaacttcatctctcagcgtgtggagggaggctctggactggatatttctacctcggccccaggttctctgcagatgcagtaccagcagagcatgcagctggaggaaagagcagagcagatccgttcgaagtcccacctcatccaggtggagcgggagaaaatgcagatggagctgagtcacaagagggctcgagtggagctggagagagcagccagcaccagtgccaggaactacgagcgtgaggtcgaccgcaaccaggagctcctgacgcgcatccggcagcttcaggagcgggaggccggggcggaggagaagatgcaggagcagctggagcgcaacaggcagtgtcagcagaacttggatgctgccagcaagaggctgcgtgagaaagaggacagtctggcccaggctggcgagaccatcaacgcactgaaggggaggatctcggaactgcagtggagcgtgatggaccaggagatgcgggtgaagcgcctggagtcggagaagcaggacgtgcaggagcagctggacctgcaacacaaaaaatgccaggaagccaatcagaaaatccaggaactccaggccagccaagaagcaagagcagaccacgagcagcagattaaggatctggagcagaagctgtccctgcaagagcaggatgcagcgattgtgaagaacatgaagtctgagctggtacggctccctaggctggaacgggagctggagcagctgcgggaggagagcgcactgcgggagatgagagagaccaacgggctgctccaggaagagctggaagggctgcagaggaagctggggcgccaggagaagatgcaggagacgctggttggcttggagctggagaacgagaggctgctggccaagctgcaaagctgggagagactggaccagaccatgggcctgagcatcaggactccagaagacctttccagattcgtggttgagctgcagcagagggagcttgccttgaaggacaagaacagcgccgtcaccagcagcgcccgggggctggagaaggccaggcagcagctgcaggaggagctccggcaggtcagcggccagctgttggaggagaggaagaagcgcgagacccacgaggcgctggcccggaggctccagaaacgggtcctgctgctcaccaaggagcgggacggtatgcgggccatcctggggtcctacgacagcgagctgaccccggccgagtactcaccccagctgacgcggcgcatgcgggaggctgaggatatggtgcagaaggtgcacagccacagcgccgagatggaggctcagctgtcgcaggccctggaggagctgggaggccagaaacaaagagcagacatgctggagatggagctgaagatgctgaagtctcagtccagctctgccgaacagagcttcctgttctccagggaggaggcggacacgctcaggttgaaggtcgaggagctggaaggcgagcggagtcggctggaggaggaaaagaggatgctggaggcacagctggagcggcgagctctgcagggtgactatgaccagagcaggaccaaagtgctgcacatgagcctgaaccccaccagtgtggccaggcagcgcctgcgcgaggaccacagccagctgcaggcggagtgcgagcgactgcgcgggctcctgcgcgccatggagagaggaggcaccgtcccagccgaccttgaggctgccgccgcgagtctgccatcgtccaaggaggtggcagagctgaagaagcaggtggagagtgccgagctgaagaaccagcggctcaaggaggttttccagaccaagatccaggagttccgcaaggcctgctacacgctcaccggctaccagatcgacatcaccacggagaaccagtaccggctgacctcgctgtacgccgagcacccaggcgactgctcatcttcaaggccaccagcccctcgggttccaagatgcagctactggagacagagttctcacacaccgtgggcgagctcatcgaggtgcacctgcggcgccaggacagcatccctgccttcctcagctcgctcaccctcgagctcttcagccgccagaccgtggcgtagcctgcaggctcgggggcatagccggagccactctgcttggcctgacctgcaggtcccctgccccgccagccacaggctgggtgcacgtcctgcctctccagccccacagggcagcagcatgactgacagacacgctgggacctacgtcgggcttcctgctggggcggccagcaccctctccacgtgcagaccccatgcgtcccggagcctggtgtgtgggcgtcggccaccagcctgggttcctcaccttgtgaaataaaatcttctcccctaaaa

SEQ ID NO: 1473 - protein, 803 aa, Homo sapien
MEDLGENTMVLSTLRSLNNFISQRVEGGSGLDISTSAPGSLQMQYQQSMQLEERAEQIRSKSHLIQVEREKMQMELSHKRARVELERAASTSARNYEREVDRNQELLTRIRQLQEREAGAEEKMQEQLERNRQCQQNLDAASKRLREKEDSLAQAGETINALKGRISELQWSVMDQEMRVKRLESEKQDVQEQLDLQHKKCQEANQKIQELQASQEARADHEQQIKDLEQKLSLQEQDAAIVKNMKSELVRLPRLERELEQLREESALREMRETNGLLQEELEGLQRKLGRQEKMQETLVGLELENERLLAKLQSWERLDQTMGLSIRTPEDLSRFVVELQQRELALKDKNSAVTSSARGLEKARQQLQEELRQVSGQLLEERKKRETHEALARRLQKRVLLLTKERDGMRAILGSYDSELTPAEYSPQLTRRMREAEDMVQKVHSHSAEMEAQLSQALEELGGQKQRADMLEMELKMLKSQSSSAEQSFLFSREEADTLRLKVEELEGERSRLEEEKRMLEAQLERRALQGDYDQSRTKVLHMSLNPTSVARQRLREDHSQLQAECERLRGLLRAMERGGTVPADLEAAAASLPSSKEVAELKKQVESAELKNQRLKEVFQTKIQEFRKACYTLTGYQIDITTENQYRLTSLYAEHPGDCSSSRPPAPRVPRCSYWRQSSHTPWASSSRCTCGARTASLPSSARSPSSSSAARPWRSLQARGHSRSHSAWPDLQVPCPASHRLGARPASPAPQGSSMTDRHAGTYVGLPAGAASTLSTCRPHASRSLVCGRRPPAWVPHLVK

SEQ ID NO: 1474 - DNA, 1600 bp, Homo sapien
gccccgccgccggcagtggaccgctgtgcgcgaaccctgaaccctacggtcccgacccgcgggcgaggccgggtacctgggctgggatccggagcaagcgggcgagggcagcgccctaagcaggcccggagcgatggcagccttgatgaccccgggaaccggggccccacccgcgcctggtgacttctccggggaagggagccagggacttcccgacccttcgccagagcccaagcagctcccggagctgatccgcatgaagcgagacggaggccgcctgagcgaagcggacatcaggggcttcgtggccgctgtggtgaatgggagcgcgcagggcgcacagatcggggccatgctgatggccatccgacttcggggcatggatctggaggagacctcggtgctgacccaggccctggctcagtcgggacagcagctggagtggccagaggcctggcgccagcagcttgtggacaagcattccacagggggtgtgggtgacaaggtcagcctggtcctcgcacctgccctggcggcatgtggctgcaaggtgccaatgatcagcggacgtggtctggggcacacaggaggcaccttggataagctggagtctattcctggattcaatgtcatccagagcccagagcagatgcaagtgctgctggaccaggcgggctgctgtatcgtgggtcagagtgagcagctggttcctgcggacggaatcctatatgcagccagagatgtgacagccaccgtggacagcctgccactcatcacagcctccattctcagtaagaaactcgtggaggggctgtccgctctggtggtggacgttaagttcggaggggccgccgtcttccccaaccaggagcaggcccgggagctggcaaagacgctggttggcgtgggagccagcctagggcttcgggtcgcggcagcgctgaccgccatggacaagcccctgggtcgctgcgtgggccacgccctggaggtggaggaggcgctgctctgcatggacggcgcaggcccgccagacttaagggacctggtcaccacgctcgggggcgccctgctctggctcagcggacacgcggggactcaggctcagggcgctgcccgggtggccgcggcgctggacgacggctcggcccttggccgcttcgagcggatgctggcggcgcagggcgtggatcccggtctggcccgagccctgtgctcgggaagtcccgcagaacgccggcagctgctgcctcgcgcccgggagcaggaggagctgctggcgcccgcagatggcaccgtggagctggtccgggcgctgccgctggcgctggtgctgcacgagctcggggccgggcgcagccgcgctggggagccgctccgcctgggggtgggcgcagagctgctggtcgacgtgggtcagaggctgcgccgtgggaccccctggctccgcgtgcaccgggacggccccgcgctcagcggcccgcagagccgcgccctgcaggaggcgctcgtactctccgaccgcgcgccattcgccgccccctcgcccttcgcagagctcgttctgccgccgcagcaataaagctcctttgccgcgaaa

SEQ ID NO: 1475 - protein, 482 aa, Homo sapien
MAALMTPGTGAPPAPGDFSGEGSQGLPDPSPEPKQLPELIRMKRDGGRLSEADIRGFVAAVVNGSAQGAQIGAMLMAIRLRGMDLEETSVLTQALAQSGQQLEWPEAWRQQLVDKHSTGGVGDKVSLVLAPALAACGCKVPMISGRGLGHTGGTLDKLESIPGFNVIQSPEQMQVLLDQAGCCIVGQSEQLVPADGILYAARDVTATVDSLPLITASILSKKLVEGLSALVVDVKFGGAAVFPNQEQARELAKTLVGVGASLGLRVAAALTAMDKPLGRCVGHALEVEEALLCMDGAGPPDLRDLVTTLGGALLWLSGHAGTQAQGAARVAAALDDGSALGRFERMLAAQGVDPGLARALCSGSPAERRQLLPRAREQEELLAPADGTVELVRALPLALVLHELGAGRSRAGEPLRLGVGAELLVDVGQRLRRGTPWLRVHRDGPALSGPQSRALQEALVLSDRAPFAAPSPFAELVLPPQQ

SEQ ID NO: 1476 - DNA, 3883 bp, Homo sapien
gtgcgcgcacaaccccatagggtcaagctggctcagggtgggcccttgactgtggatcccggctcaggattggcacgagggttttcaaaatgggagcccagaggcaccgcccaggcctcggaaggtgtcagggagaactttccgtggtttcagcgtcgtcgcctggagcggcggtttagagagccgagcctgatgggcgccaaggccggctggctgcttggagcgctgcctcgaagggactgcgtgaaggaagctaatccggagaacccaggccagagcctggaaatatggcgacctgcatcggggagaagatcgaggattttaaagttggaaatctgcttggtaaaggatcatttgctggtgtctacagagctgagtccattcacactggtttggaagttgcaatcaaaatgatagataagaaagccatgtacaaagcaggaatggtacagagagtccaaaatgaggtgaaaatacattgccaattgaaacatccttctatcttggagctttataactattttgaagatagcaattatgtgtatctggtattagaaatgtgccataatggagaaatgaacaggtatctaaagaatagagtgaaacccttctcagaaaatgaagctcgacacttcatgcaccagatcatcacagggatgttgtatcttcattctcatggtatactacaccgggacctcacactttctaacctcctactgactcgtaatatgaacatcaagattgctgattttggcctggcaactcaactgaaaatgccacatgaaaagcactatacattatgtggaactcctaactacatttcaccagaaattgccactcgaagtgcacatggccttgaatctgatgtttggtccctgggctgtatgttttatacattacttatcgggagaccacccttcgacactgacacagtcaagaacacattaaataaagtagtattggcagattatgaaatgccaacttttttgtcaatagaggccaaggaccttattcaccagttacttcgtagaaatccagcagatcgtttaagtctgtcttcagtattggaccatccttttatgtcccgaaattcttcaacaaaaagtaaagatttaggaactgtggaagactcaattgatagtgggcatgccacaatttctactgcaattacagcttcttccagtaccagtataagtggtagtttatttgacaaaagaagacttttgattggtcagccactcccaaataaaatgactgtatttccaaagaataaaagttcaactgatttttcttcttcaggagatggaaacagtttttatactcagtggggaaatcaagaaaccagtaatagtggaaggggaagagtaattcaagatgcagaagaaaggccacattctcgataccttcgtagagcttattcctctgatagatctggcacttctaatagtcagtctcaagcaaaaacatatacaatggaacgatgtcactcagcagaaatgctttcagtgtccaaaagatcaggaggaggtgaaaatgaagagaggtactcacccacagacaacaatgccaacatttttaacttctttaaagaaaagacatccagtagttctggatcttttgaaagacctgataacaatcaagcactctccaatcatctttgtccaggaaaaactccttttccatttgcagacccgacacctcagactgaaaccgtacaacagtggtttgggaatctgcaaataaatgctcatttaagaaaaactactgaatatgacagcatcagcccaaaccgggacttccagggccatccagatttgcagaaggacacatcaaaaaatgcctggactgatacaaaagtcaaaaagaactctgatgcttctgataatgcacattctgtaaaacagcaaaataccatgaaatatatgactgcacttcacagtaaacctgagataatccaacaagaatgtgtttttggctcagatcctctttctgaacagagcaagactaggggtatggagccaccatggggttatcagaatcgtacattaagaagcattacatctccgttggttgctcacaggttaaaaccaatcagacagaaaaccaaaaaggctgtggtgagcatacttgattcagaggaggtgtgtgtggagcttgtaaaggagtatgcatctcaagaatatgtgaaagaagttcttcagatatctagtgatggaaatacgatcactatttattatccaaatggtggtagaggttttcctcttgctgatagaccaccctcacctactgacaacatcagtaggtacagctttgacaatttaccagaaaaatactggcgaaaatatcaatatgcttccaggtttgtacagcttgtaagatctaaatctcccaaaatcacttattttacaagatatgctaaatgcattttgatggagaattctcctggtgctgattttgaggtttggttttatgatggggtaaaaatacacaaaacagaagatttcattcaggtgattgaaaagacagggaagtcttacactttaaaaagtgaaagtgaagttaatagcttgaaagaggagataaaaatgtatatggaccatgctaatgagggtcatcgtatttgtttagcactggaatccataatttcagaagaggaaaggaaaactaggagtgctccctttttcccaataatcataggaagaaaacctggtagtactagttcacctaaggccttatcacctcctccttctgtggattcaaattacccaacgagagatagagcatctttcaacagaatggtcatgcatagtgctgcttctccaacacaggcaccaatccttaatccctctatggttacaaatgaaggacttggtcttacaactacagcttctggaacagacatctcttctaatagtctaaaagattgtcttcctaaatcagcacaacttttgaaatctgtttttgtgaaaaatgttggttgggctacacagttaactagtggagctgtgtgggttcagtttaatgatgggtcccagttggttgtgcaggcaggagtgtcttctatcagttatacctcaccaaatggtcaaacaactaggtatggagaaaatgaaaaattaccagactacatcaaacagaaattacagtgtctgtcttccatccttttgatgttttctaatccgactcctaattttcattgattaaaactcctttcagacatataagtttaataaataacttttttgttgactttcaagtaaagtgattttttttaatttaacataaagtcttcagaaagcctttctatgaaagaattttaacctataatgtaaaggatgtattctgagagaacaaagcagaatgaaacttgagtcacttactaaatatagtggatataaaatagaacacctgactttgctcttagaccataacccccgaacttactatgttcatatatttgtattgaacaatcttttaaaagcaaaaatgtaaatgatgtgtagtttatttgtgcttttattgttttccctgcgtctcagacatgttgagaatcatggacaaaacctgctggaattttggaatttttgaagatgtaaataatgtgtatttatgttataagtaacatatgtaaacatgtatatttgttttatatttatttttgtaacaccagtgtctgatgaaacatttttgcaaatgcattttataaaaaaataaatatagtgataagttacattatcttttgattcatttaattaaatacttatttttaaataacttaccagtaaactcactttttaaattttgttgcctgttgaggagccaattaaattttaaatattaattttgcaaatgttaaatacattgtttctctattatctgaaaa

SEQ ID NO: 1477 - protein, 970 aa, Homo sapien [sequence omitted]

SEQ ID NO: 1478 - DNA, 3331 bp, Homo sapien
cagagggcaccgcccaggcctcggaaggtgtcagggagaactttccgtggtttcagcgtcgtcgcctggagcggcggtttagagagccgagcctgatgggcgccaaggccggctggctgcttggagcgctgcctcgaagggactgcgtaaggaagctaatccggagaacccaggccagagcctgaaatatggcgacctgcatcggggagaagatcgaggattttaaagttggaaatctgcttggtaaaggatcatttgctggtgtctacagagctgagtccattcacagtggtttggaagttgcaatcaaaatgatagataagaaagccatgtacaaagcaggaatggtacagagagtccaaaatgaggtgaaaatacattgccaattgaaacatccttctatcttggagctttataactattttgaagatagcaattatgtgtatctggtattagaaatgtgccataatggagaaatgaacaggtatctaaagaatagagtgaaacccttctcagaaaatgaagctcgacacttcatgcaccagatcatcacagggatgttgtatcttcattctcatggtatactacaccgggacctcacactttctaacctcctactgactcgtaatatgaacatcaagattgctgattttgggctggcaactcaactgaaaatgccacatgaaaagcactatacattatgtggaactcctaactacatttcaccagaaattgccactcgaagtgcacatggccttgaatctgatgtttggtccctgggctgtatgttttatacattacttatcgggagaccacccttcgacactgacacagtcaagaacacattaaataaagtagtattggcagattatgaaatgccaacttttttgtcaatagaggccaaggaccttattcaccagttacttcgtagaaatccagcagatcgtttaagtctgtcttcagtattggaccatccttttatgtcccgaaattcttcaacaaaaagtaaagatttaggaactgtggaagactcaattgatagtgggcatgccacaatttctactgcaattacagcttcttccagtaccagtataagtggtagtttatttgacaaaagaagacttttgattggtcagccactcccaaataaaatgactgtatttccaaagaataaaagttcaactgatttttcttcttcaggagatggaaacagtttttatactcagtggggaaatcaagaaaccagtaatagtggaaggggaagagtaattcaagatgcagaagaaaggccacattctcgataccttcgtagagcttattcctctgatagatctggcacttctaatagacagtctcaagcaaaaacatatacaatggaacgatgtcactcagcagaaatgctttcagtgtccaaaagatcaggaggaggtgaaaatgaagagaggtactcacccacagacaacaatgccaacatttttaacttctttaaagaaaagacatccagtagttctggatcttttgaaagacctgataacaatcaagcactctccaatcatctttgtccaggaaaaactccttttccatttgcagacccgacacctcagactgaaaccgtacaacagtggtttgggaatctgcaaataaatgctcatttaagaaaaactactgaatatgacagcatcagcccaaaccgggacttccagggccatccagatttgcagaaggacacatcaaaaaatgcctggactgatacaaaagtcaaaaagaactctgatgcttctgataatgcacattctgtaaaacagcaaaataccatgaaatatatgactgcacttcacagtaaacctgagataatccaacaagaatgtgtttttggctcagatcctctttctgaacagagcaagactaggggtatggagccaccatggggttatcagaatcgtacattaagaagcattacatctccgttggttgctcacaggttaaaaccaatcagacagaaaaccaaaaaggctgtggtgagcatacttgattcagaggaggtgtgtgtggagcttgtaaaggagtatgcatctcaagaatatgtgaaagaagttcttcagatatctagtgatggaaatacgatcactatttattatccaaatggtggtagaggttttcctcttgctgatagaccaccctcacctactgacaacatcagtaggtacagctttgacaatttaccagaaaaatactggcgaaaatatcaatatgcttccaggtttgtacagcttctaagatctaaatctcccaaaatcacttattttacaagatatgctaaatgcattttgatggagaattctcctggtgctgattttgaggtttggttttatgatggggtaaaaatacacaaaacagaagatttcattcaggtgattgaaaagacagggaagtcttacactttaaaaagtgaaagtgaagttaatagcttgaaagaggagataaaaatgtatatggaccatgctaatgagggtcatcgtatttgtttagcactggaatccataatttcagaagaggaaaggaaaactaggagtgctccctttttcccaataatcataggaagaaaacctggtagtactagttcacctaaggccttatcacctcctccttctgtggattcaaattacccaacgagagatagagcatctttcaacagaatggtcatgcatagtgatgcttctccaacacaggcaccaatccttaatccctctatggttacaaatgaaggacttggtcttacaactacagcttctggaacagacatctcttctaatagtctaaaagattgtcttcctaaatcagcacaacttttgaaatctgtttttgtgaaaaatgttggttgggctacacagttaactagtggagctgtgtgggttcagtttaatgatgggtcccagttggttgtgcaggcaggagtgtcttctatcagttatacctcaccaaatggtcaaacaactaggtatggagaaaatgaaaaattaccagactacatcaaacagaaattacagtgtctgtcttccatccttttgatgttttctaatccgactcctaattttcattgattaaaactcctttcagacatataagtttaataaataacttttttgttgactttcaagtaaagtgattttttttaatttaacataaagtcttcagaaagcctttctatgaaagaattttaacctataatgtaaaccatgtatctgagataacaaagcagaatgaaacttgagtcacttactaaatatagtggatataaaatagaacacctgactttgctcttagaccataa

SEQ ID NO: 1479 - protein, 970 aa, Homo sapien
MATCIGEKIEDFKVGNLLGKGSFAGVYRAESIHSGLEVAIKMIDKKAMYKAGMVQRVQNEVKIHCQLKHPSILELYNYFEDSNYVYLVLEMCHNGEMNRYLKNRVKPFSENEARHFMHQIITGMLYLHSHGILHRDLTLSNLLLTRNMNIKIADFGLATQLKMPHEKHYTLCGTPNYISPEIATRSAHGLESDVWSLGCMFYTLLIGRPPFDTDTVKNTLNKVVLADYEMPTFLSIEAKDLIHQLLRRNPADRLSLSSVLDHPFMSRNSSTKSKDLGTVEDSIDSGHATISTAITASSSTSISGSLFDKRRLLIGQPLPNKMTVFPKNKSSTDFSSSGDGNSFYTQWGNQETSNSGRGRVIQDAEERPHSRYLRRAYSSDRSGTSNRQSQAKTYTMERCHSAEMLSVSKRSGGGENEERYSPTDNNANIFNFFKEKTSSSSGSFERPDNNQALSNHLCPGKTPFPFADPTPQTETVQQWFGNLQINAHLRKTTEYDSISPNRDFQGHPDLQKDTSKNAWTDTKVKKNSDASDNAHSVKQQNTMKYMTALHSKPEIIQQECVFGSDPLSEQSKTRGMEPPWGYQNRTLRSITSPLVAHRLKPIRQKTKKAVVSILDSEEVCVELVKEYASQEYVKEVLQISSDGNTITIYYPNGGRGFPLADRPPSPTDNISRYSFDNLPEKYWRKYQYASRFVQLLRSKSPKITYFTRYAKCILMENSPGADFEVWFYDGVKIHKTEDFIQVIEKTGKSYTLKSESEVNSLKEEIKMYMDHANEGHRICLALESIISEEERKTRSAPFFPIIIGRKPGSTSSPKALSPPPSVDSNYPTRDRASFNRMVMHSDASPTQAPILNPSMVTNEGLGLTTTASGTDISSNSLKDCLPKSAQLLKSVFVKNVGWATQLTSGAVWVQFNDGSQLVVQAGVSSISYTSPNGQTTRYGENEKLPDYIKQKLQCLSSILLMFSNPTPNFH

SEQ ID NO: 1480 - DNA, 2032 bp, Homo sapien
cgcctggaccatgtgaatggggccagagggctcccgggctgggcagggaccatgggctgtggctgcagctcacacccggaagatgactggatggaaaacatcgatgtgtgtgagaactgccattatcccatagtcccactggatggcaagggcacgctgctcatccgaaatggctctgaggtgcgggacccactggttacctacgaaggctccaatccgccggcttccccactgcaagacaacctggttatcgctctgcacagctatgagccctctcacgacggagatctgggctttgagaagggggaaccactccgcatcctggagcagagcggcgagtggtggaaggcgcagtccctgaccacgggccaggaaggcttcatccccttcaattttgtggccaaagcgaacagcctggagcccgaaccctggttcttcaagaacctgagccgcaaggacgcggagcggcagctcctggcgcccgggaacactcacggctccttcctcatccgggagagcgagagcaccgccgggtccttttcactgtcggtccgggacttcgaccaaaaccagggagaggtggtgaaacattacaagatccgtaatctggacaacggtggcttctacatctcccctcgaatcacttttcccggcctgcatgaactggtccgccattacaccaatgcttcagatgggctgtgcacacggttgagccgcccctgccagacccagaagccccagaagccgtggtgggaggacgagtgggaggttcccagggagacgctgaagctggtggagcggctgggggctggacagttcggggaggtgtggatggggtactacaacgggcacacgaaggtggcggtgaagagcctgaagcagggcagcatgtccccggacgccttcctggccgaggccaacctcatgaagcagctgcaacaccagcggctggttcggctctacgctgtggtcacccaggagcccatctacatcatcactgaatacatggagaatgggagtctagtggattttctcaagaccccttcaggcatcaagttgaccatcaacaaactcctggacatggcagcccaaattgcagaaggcatggcattcattgaagagcggaattatattcatcgtgaccttcgggctgccaacattctggtgtctgacaccctgagctgcaagattgcagactttggcctagcacgcctcattgaggacaacgagtacacagccagggagggggccaagtttcccattaagtggacagcgccagaagccattaactacgggacattcaccatcaagtcagatgtgtggtcttttgggatcctgctgacggaaattgtcacccacggccgcatcccttacccagggatgaccaacccggaggtgattcagaacctggagcgaggctaccgcatggtgcgccctgacaactgtccagaggagctgtaccaactcatgaggctgtgctggaaggagcgcccagaggaccggcccacctttgactacctgcgcagtgtgctggaggacttcttcacggccacagagggccagtaccagcctcagccttgagaggaggccttgagaggccctggggttctccccctttctctccagcctgacttggggagatggagttcttgtgccatagtcacatggcctatgcacatatggactctgcacatgaatcccacccacatgtgacacatatgcaccttgtgtctgtacacgtgtcctgtagttgcgtggactctgcacatgtcttgtgcatgtgtagcctgtgcatgtatgtcttggacactgtacaaggtacccctttctggctctcccatttcctgagaccaccagagagaggggagaagcctgggattgacagaagcttctgcccacctacttttctttcctcagatcatccagaagttcctcaagggccaggactttatctaatacctctgtgtgctcctccttggtgcctggcctggcacacatcaggagttcaataaatgtctgttgatgactgccg

SEQ ID NO: 1481 - protein, 509 aa, Homo sapien
MGCGCSSHPEDDWMENIDVCENCHYPIVPLDGKGTLLIRNGSEVRDPLVTYEGSNPPASPLQDNLVIALHSYEPSHDGDLGFEKGEPLRILEQSGEWWKAQSLTTGQEGFIPFNFVAKANSLEPEPWFFKNLSRKDAERQLLAPGNTHGSFLIRESESTAGSFSLSVRDFDQNQGEVVKHYKIRNLDNGGFYISPRITFPGLHELVRHYTNASDGLCTRLSRPCQTQKPQKPWWEDEWEVPRETLKLVERLGAGQFGEVWMGYYNGHTKVAVKSLKQGSMSPDAFLAEANLMKQLQHQRLVRLYAVVTQEPIYIITEYMENGSLVDFLKTPSGIKLTINKLLDMAAQIAEGMAFIEERNYIHRDLRAANILVSDTLSCKIADFGLARLIEDNEYTAREGAKFPIKWTAPEAINYGTFTIKSDVWSFGILLTEIVTHGRIPYPGMTNPEVIQNLERGYRMVRPDNCPEELYQLMRLCWKERPEDRPTFDYLRSVLEDFFTATEGQYQPQP

SEQ ID NO: 1482 - DNA, 2182 bp, Homo sapien
gagggctcagagggagcaccggtttggagctgggaccccctattttagcttttctgtggctggtgaatggggatcccaggatctcacaatctcagggaccatgggctgtggctgcagctcacacccggaagatgactggatggaaaacatcgatgtgtgtgagaactgccattatcccatagtcccactggatggcaagggcacgctgctcatccgaaatggctctgaggtgcgggacccactggttacctacgaaggctccaatccgccggcttccccactgcaagacaacctggttatcgctctgcacagctatgagccctctcacgacggagatctgggctttgagaagggggaacagctccgcatcctggagcagagcggcgagtggtggaaggcgcagtccctgaccacgggccaggaaggcttcatccccttcaattttgtggccaaagcgaacagcctggagcccgaaccctggttcttcaagaacctgagccgcaaggacgcggagcggcagctcctggcgcccgggaacactcacggctccttcctcatccgggagagcgagagcaccgcgggatcgttttcactgtcggtccgggacttcgaccagaaccagggagaggtggtgaaacattacaagatccgtaatctggacaacggtggcttctacatctcccctcgaatcacttttcccggcctgcatgaactggtccgccattacaccaatgcttcagatgggctgtgcacacggttgagccgcccctgccagacccagaagccccagaagccgtggtgggaggacgagtgggaggttcccagggagacgctgaagctggtggagcggctgggggctggacagttcggggaggtgtggatggggtactacaacgggcacacgaaggtggcggtgaagagcctgaagcagggcagcatgtccccggacgccttcctggccgaggccaacctcatgaagcagctgcaacaccagcggctggttcggctctacgctgtggtcacccaggagcccatctacatcatcactgaatacatggagaatgacacacttctagactcccagttggaggagaaaggtctgggggcctccccctggggcaacttgggccagcaactcttgcttctgcccacagggagtctagtggattttctcaagaccccttcaggcatcaagttgaccatcaacaaactcctggacatggcagcccaaattgcagaaggcatggcattcattgaagagcggaattatattcatcgtgaccttcgggctgccaacattctggtgtctgacaccctgagctgcaagattgcagactttggcctagcacgcctcattgaggacaacgagtacacagccagggagggggccaagtttcccattaagtggacagcgccagaagccattaactacgggacattcaccatcaagtcagatgtgtggtcttttgggatcctgctgacggaaattgtcacccacggccgcatcccttacccagggatgaccaacccggaggtgattcagaacctggagcgaggctaccgcatggtgcgccctgacaactgtccagaggagctgtaccaactcatgaggctgtgctggaaggagcgcccagaggaccggcccacctttgactacctgcgcagtgtgctggaggacttcttcacggccacagagggccagtaccagcctcagccttgagaggccttgagaggccctggggttctccccctttctctccagcctgacttggggagatggagttcttgtgccatagtcacatggcctatgcacatatggactctgcacatgaatcccacccacatgtgacacatatgcaccttgtgtctgtacacgtgtcctgtagttgcgtggactctgcacatgtcttgtacatgtgtagcctgtgcatgtatgtcttggacactgtacaaggtacccctttctggctctcccatttcctgagaccacagagagaggggagaagcctgggattgacagaagcttctgcccacctacttttctttcctcagatcatccagaagttcctcaagggccaggactttatctaatacctctgtgtgctcctccttggtgcctggcctggcacacatcaggagttcaataaatgtctgttgatgactgttaaaaaaaaaaaaaaaa

SEQ ID NO: 1483 - protein, 539 aa, Homo sapien
MGCGCSSHPEDDWMENIDVCENCHYPIVPLDGKGTLLIRNGSEVRDPLVTYEGSNPPASPLQDNLVIALHSYEPSHDGDLGFEKGEQLRILEQSGEWWKAQSLTTGQEGFIPFNFVAKANSLEPEPWFFKNLSRKDAERQLLAPGNTHGSFLIRESESTAGSFSLSVRDFDQNQGEVVKHYKIRNLDNGGFYISPRITFPGLHELVRHYTNASDGLCTRLSRPCQTQKPQKPWWEDEWEVPRETLKLVERLGAGQFGEVWMGYYNGHTKVAVKSLKQGSMSPDAFLAEANLMKQLQHQRLVRLYAVVTQEPIYIITEYMENDTLLDSQLEEKGLGASPWGNLGQQLLLLPTGSLVDFLKTPSGIKLTINKLLDMAAQIAEGMAFIEERNYIHRDLRAANILVSDTLSCKIADFGLARLIEDNEYTAREGAKFPIKWTAPEAINYGTFTIKSDVWSFGILLTEIVTHGRIPYPGMTNPEVIQNLERGYRMVRPDNCPEELYQLMRLCWKERPEDRPTFDYLRSVLEDFFTATEGQYQPQP

SEQ ID NO: 1484 - DNA, 822 bp, Homo sapien
  Unsure 813: Unknown base
  Unsure 817: Unknown base
  Unsure 822: Unknown base
tcgatccacgcgtccgcggacgcgtggrgttgaaaattcatagtaagattgatatctataaaatagatataaatttttaagagaaagaatttagtattatcaaagggataaagaaaaaaatactatttaagatgtgaaaattacagtccaaaatactgttctttccaggctatgtataaaatacatagtgaaaattgtttagtgatattacatttatttatccagaaaactgtgatttcaggagaacctaacatgctggtgaatattttcaactttttccctcactaattggtacttttaaaaacataacataaattttttgaagtctttaataaatamcccataattgaagtgtataatataaaaaattttaaaaatctaagcagcttattgtttctctgaaagtgtgtgtagttttactttcctaaggaattaccaagaatatcctttaaaatttaaaaggatggcaagttgcatcagaaagctttattttgagatgtaaaaagattcccaaacgtggttacattagccattcatgtatgtcagaagtgcagaattggggcacttaatggtcaccttgtaacagttttgtgtaactcccagtgatgctgtacacatatttgaagggtctttctcaaagaaatattaagcatgttttgttgctcagtgtttttgtgaattgcttggttgtaattaaattctgagcctgatattgatatggttttaagaagcagttgtaccaagtgaaattattttggagattataataaatatatacattcaaaaaaaaaaaaaaaaaaaaaaaaaaaaaanaagnaaagn

SEQ ID NO: 1485 - protein, 38 aa, Homo sapien
MYKIHSENCLVILHLFIQKTVISGEPNMLVNIFNFFPH

SEQ ID NO: 1486 - DNA, 1125 bp, Homo sapien
cccccatgtgacagtgacggggtccccgctccaggagacgctcgagtctgcgtcccggccctcagcactgtccactgtttcggtgccagcagagaccagcaggcccgggacagttggtgtttggccgtgccgctgtctaacttggtgtgcagagtgaattgccgctgccggagcggagagaggcggagcggccaggagagaggggatttctgtcagcgccggcctcgggagctcggagacatgaacggcttcacgcctgacgagatgagccgcggcggggatgcggccgccgcagtggccgcagtggtcgctgccgcggccgccgccgcctcggcggggaacgggaccggcgcgggcaccggggctgaggtgccgggcgcgggggcggtctcagcggctgggcccccgggggcggccgggccgggccccgggcaactgtgctgcctgcgggaggatggtgagcggtgcggccgggcggcaggcaacgccagcttcagcaagaggatccagaagagcatctcccagaagaaggtgaagatcgagctggataagagcgcaaggcatctttacatatgtgattatcataaaaacttaattcagagtgttcgaaacagaagaaagagaaaagggagtgatgatgatggaggtgattcacctgttcaagatattgataccccagaggttgatttataccaattacaagtaaatacacttaggagatacaaaagacacttcaagctaccaaccagaccaggacttaataaagcacaacttgttgagatagttggttgccactttaggtctattccagtgaatgaaaaagacaccttaacatatttcatctactcagtgaagaatgacaagaacaaatcagatctcaaggttgatagtggtgttcactaggagacgtggaattgagactaataacttggatgttaacactgtttactgttttttcacatgtagaaatgttctttgtgtattttttctacagaggattttctctgattttattttctttgtttctgactctaataattagttggaaactcatataaaatgagctttcctaaattaaatctattttaaataaaggttattactattaaaaaaaaaaaaaaaaaa

SEQ ID NO: 1487 - protein, 220 aa, Homo sapien
MNGFTPDEMSRGGDAAAAVAAVVAAAAAAASAGNGTGAGTGAEVPGAGAVSAAGPPGAAGPGPGQLCCLREDGERCGRAAGNASFSKRIQKSISQKKVKIELDKSARHLYICDYHKNLIQSVRNRRKRKGSDDDGGDSPVQDIDTPEVDLYQLQVNTLRRYKRHFKLPTRPGLNKAQLVEIVGCHFRSIPVNEKDTLTYFIYSVKNDKNKSDLKVDSGVH

SEQ ID NO: 1488 - DNA, 1067 bp, Homo sapien
gcgtctgccaggagctacggccggaagatggcggcggccgcagagttgtcgctactggagaagtccctgggactgagtaaggggaataaatacagtgctcagggcgagcgacagattccagttcttcagacaaacaatggtccaagtctaacaggattgactactatagcagctcatctagtcaagcaagccaacaaagaatatttgctggggagtactgcagaagaaaaagcaatcgttcagcagtggttagaatacagggtcactcaagtagatgggcactccagtaaaaatgacatccacacactgttgaaggatcttaattcatatcttgaagataaagtctaccttacagggtataactttacattagcagatatactattgtactatggacttcatcgctttatagttgacctgacagttcaagaaaaggagaaatatcttaatgtgtctcgctggttttgtcacattcagcattatccaggcatcaggcaacatctgtctagtgttgtcttcatcaagaacagactatatactaattcccactagaagctgtccatgccatacagaagatctattaaaagtgttttaaatggaaaatgtactctagaccacaggactaatgtaaattaatatacagtcattcattatttgttgaagttgatagaatttttgaagtgtaaacttgtgtctgaatgttttatttgttctttagctgaagttttgcaatttttatgtcaaaattcaattgctattaaacaagttgagatccagttataaattaaccttgtttttagtagatgacatttatttcaataaaagttgcaaatcgggcttaatcttaaaattggtggtcatttcaatggttgacatatttggctatttattaacctctctttcatattctaaaattcattttccccttatggatatttatggtagtttgttaagaactgataaattgtgccaaggaagccaaaagggaagacagatggatttgttttaaaatgtttatgtgagctagtaaatgtgggaaaaaaaaaaaaaaaaaaaaaaaaaaaaaa

SEQ ID NO: 1489 - protein, 174 aa, Homo sapien
MAAAAELSLLEKSLGLSKGNKYSAQGERQIPVLQTNNGPSLTGLTTIAAHLVKQANKEYLLGSTAEEKAIVQQWLEYRVTQVDGHSSKNDIHTLLKDLNSYLEDKVYLTGYNFTLADILLYYGLHRFIVDLTVQEKEKYLNVSRWFCHIQHYPGIRQHLSSVVFIKNRLYTNSH

SEQ ID NO: 1490 - DNA, 1813 bp, Homo sapien
ccgtccccggcggccccatgccccgatgccccgcgggggccatggacgaggggcccgtggacctgcgcacccggcccaaggccgccggactcccgggcgccgcgctgccgctccgcaagcgcccgctgcgcgcgccctccccggagcccgccgctccccgcggcgctgcgggccttgtcgtccccctggaccctctgcgcggcggctgcgacctgccggcggtccccgggcccccccacggcctggcccggccggaggcgctttactaccccggagccttactgcctttgtaccccactcgggccatgggctccccgtttcctctggtgaacctgcctacacccctataccccatgatgtgccccatggaacaccccctttctgctgacatcgccatggccacccgtgcagatgaggacggagacacgcctctccatattgctgtggtgcagggtaacctgccagctgtgcaccggctggtcaacctcttccagcaggggggccgggagctcgacatctacaacaacctacggcagacaccgctccacctggctgtgatcaccacattaccgtctgtggtccggctcctggtgacagctggtgccagccccatggcgctggaccgccatggccagacggccgctcacctggcgtgcgagcaccgcagcccgacctgcctgcgagccctgctggacagcgcagctccgggcacgttggacctggaggcccgcaattatgacgggctcaccgccctgcacgtggcagtgaacaccgagtgccaagaaaccgtgcagctcttgctagagcgcggtgccgacatcgacgcagtggacattaagagcggccgctccccgctcatccacgccgtggaaaacaacagccttagcatggtgcagctgctgctgcagcacggcgccaacgtgaacgcgcaaatgtactccggcagctccgccctgcactcagcgtccggccgcgggctcctcccgctggtgcgcacgctggtccgcagcggcgctgacagcagcctcaagaactgccacaacgacacgccgctcatggtggcgcgcagccgcagggtcatcgacatcctgagggggaaggccacccggcctgcttccacctcccagccagacccctcccctgaccggagcgccaacacctcccccgagagcagcagccgcctcagctccaatggtcttctctccgcatcaccatcctcctcaccctcccagtctccccccagggacccccctggattccccatggctcctcccaatttcttccttccttccccatctccacccgccttcctgccctttgctggggtcctccgaggccctggccggccggtgcccccctccccagctccaggaggcagctgagggggatgggggggcagatcttggactcatgaggaggggcccccctgcccagaggggtcaacccttctggaaactgtgaagatctgacttcgcccccccccccccccatcttcgggaccaggatttgcacagaagcacatgcacctacccatacaccccctcttctgagcacagatgttcccccatctcgctccctcccaggactctgaccccagcattctcaggcaccagtccctgtccggaatgccacccacatcttccatttccatgtcccctcccagagctggtggacccagggaacagccactcccctccactctctaccagataactgaggaggggagaggtgggccgtaacgggcacggatcacgatgtaaattattaagcattttggttggatttcttttgtaataaactatttttgtaccat

SEQ ID NO: 1491 - protein, 446 aa, Homo sapien
MDEGPVDLRTRPKAAGLPGAALPLRKRPLRAPSPEPAAPRGAAGLVVPLDPLRGGCDLPAVPGPPHGLARPEALYYPGALLPLYPTRAMGSPFPLVNLPTPLYPMMCPMEHPLSADIAMATRADEDGDTPLHIAVVQGNLPAVHRLVNLFQQGGRELDIYNNLRQTPLHLAVITTLPSVVRLLVTAGASPMALDRHGQTAAHLACEHRSPTCLRALLDSAAPGTLDLEARNYDGLTALHVAVNTECQETVQLLLERGADIDAVDIKSGRSPLIHAVENNSLSMVQLLLQHGANVNAQMYSGSSALHSASGRGLLPLVRTLVRSGADSSLKNCHNDTPLMVARSRRVIDILRGKATRPASTSQPDPSPDRSANTSPESSSRLSSNGLLSASPSSSPSQSPPRDPPGFPMAPPNFFLPSPSPPAFLPFAGVLRGPGRPVPPSPAPGGS

SEQ ID NO: 1492 - DNA, 3632 bp, Homo sapien
aaagagctggaggcgcgcaggccggctccgctccggccccggacgatgcggcgcgcccaggatgctgccgtgcctcgtagtgctgctggcggcgctcctcagcctccgtcttggctcagacgctcatgggacagagctgcccagccctccgtctgtgtggtttgaagcagaatttttccaccacatcctccactggacacccatcccaaatcagtctgaaagtacctgctatgaagtggcgctcctgaggtatggaatagagtcctggaactccatctccaactgtagccagaccctgtcctatgaccttaccgcagtgaccttggacctgtaccacagcaatggctaccgggccagagtgcgggctgtggacggcagccggcactccaactggaccgtcaccaacacccgcttctctgtggatgaagtgactctgacagttggcagtgtgaacctagagatccacaatggcttcatcctcgggaagattcagctacccaggcccaagatggcccccgcgaatgacacatatgaaagcatcttcagtcacttccgagagtatgagattgccattcgcaaggtgccgggaaacttcacgttcacacacaagaaagtaaaacatgaaaacttcagcctcctaacctctggagaagtgggagagttctgtgtccaggtgaaaccatctgtcgcttcccgaagtaacaaggggatgtggtctaaagaggagtgcatctccctcaccaggcagtatttcaccgtgaccaacgtcatcatcttctttgcctttgtcctgctgctctccggagccctcgcctactgcctggccctccagctgtatgtgcggcgccgaaagaagctacccagtgtcctgctcttcaagaagcccagccccttcatcttcatcagccagcgtccctccccagagacccaagacaccatccacccgcttgatgaggaggcctttttgaaggtgtccccagagctgaagaacttggacctgcacggcagcacagacagtggctttggcagcaccaagccatccctgcagactgaagagccccagttcctcctccctgaccctcacccccaggctgacagaacgctgggaaacggggagccccctgtgctgggggacagctgcagtagtggcagcagcaatagcacagacagcgggatctgcctgcaggagcccagcctgagccccagcacagggcccacctgggagcaacaggtggggagcaacagcaggggccaggatgacagtggcattgacttagttcaaaactctgagggccgggctggggacacacagggtggctcggccttgggccaccacagtcccccggagcctgaggtgcctggggaagaagacccagctgctgtggcattccagggttacctgaggcagaccagatgtgctgaagagaaggcaaccaagacaggctgcctggaggaagaatcgcccttgacagatggccttggccccaaattcgggagatgcctggttgatgaggcaggcttgcatccaccagccctggccaagggctatttgaaacaggatcctctagaaatgactctggcttcctcaggggccccaacgggacagtggaaccagcccactgaggaatggtcactcctggccttgagcagctgcagtgacctgggaatatctgactggagctttgcccatgaccttgcccctctaggctgtgtggcagccccaggtggtctcctgggcagctttaactcagacctggtcaccctgcccctcatctctagcctgcagtcaagtgagtgactcgggctgagaggctgcttttgattttagccatgcctgctcctctgcctggaccaggaggagggccctggggcagaagttaggcacgaggcagtctgggcacttttctgcaagtccactggggctggcccagccaggctgcagggctggtcagggtgtctggggcaggaggaggccaactcactgaactagtgcagggtatgtgggtggcactgacctgttctgttgactggggccctgcagactctggcagagctgagaagggcagggaccttctccctcctaggaactctttcctgtatcataaaggattatttgctcaggggaaccatggggctttctggagttgtggtgaggccaccaggctgaagtcagctcagacccagacctccctgcttaggccactcgagcatcagagcttccagcaggaggaagggctgtaggaatggaagcttcagggccttgctgctggggtcatttttaggggaaaaaggaggatatgatggtcacatggggaacctcccctcatcgggcctctggggcaggaagcttgtcactggaagatcttaaggtatatattttctggacactcaaacacatcataatggattcactgaggggagacaaagggagccgagaccctggatggggcttccagctcagaacccatccctctggtgggtacctctggcacccatctgcaaatatctccctctctccaacaaatggagtagcatccccctggggcacttgctgaggccaagccactcacatcctcactttgctgccccaccatcttgctgacaacttccagagaagccatggttttttgtattggtcataactcagccctttgggcggcctctgggcttgggcaccagctcatgccagccccagagggtcagggttggaggcctgtgcttgtgtttgctgctaatgtccagctacagacccagaggataagccactgggcactgggctggggtccctgccttgttggtgttcagctgtgtgattttggactagccacttgtcagagggcctcaatctcccatctgtgaaataaggactccacctttaggggaccctccatgtttgctgggtattagccaagctggtcctgggagaatgcagatactgtccgtggactaccaagctggcttgtttcttatgccagaggctaacagatccaatgggagtccatggtgtcatgccaagacagtatcagacacagccccagaagggggcattatgggccctgcctccccataggccatttggactctgccttcaaacaaaggcagttcagtccacaggcatggaagctgtgaggggacaggcctgtgcgtgccatccagagtcatctcagccctgcctttctctggagcattctgaaaacagatattctggcccagggaatccagccatgacccccacccctctgccaaagtactcttaggtgccagtctggtaactgaactccctctggaggcaggcttgagggaggattcctcagggttcccttgaaagctttatttatttattttgttcatttatttattggagaggcagcattgcacagtgaaagaattctggatatctcaggagccccgaaattctagctctgactttgctgtttccagtggtatgaccttggagaagtcacttatcctcttggagcctcagtttcctcatctgcagaataatgactgacttgtctaattcatagggatgtgaggttctgctgaggaaatgggtatgaatgtgccttgaacacaaagctctgtcaataagtgatacatgttttttattccaataaattgtcaagaccaca

SEQ ID NO: 1493 - protein, 578 aa, Homo sapien
MLPCLVVLLAALLSLRLGSDAHGTELPSPPSVWFEAEFFHHILHWTPIPNQSESTCYEVALLRYGIESWNSISNCSQTLSYDLTAVTLDLYHSNGYRARVRAVDGSRHSNWTVTNTRFSVDEVTLTVGSVNLEIHNGFILGKIQLPRPKMAPANDTYESIFSHFREYEIAIRKVPGNFTFTHKKVKHENFSLLTSGEVGEFCVQVKPSVASRSNKGMWSKEECISLTRQYFTVTNVIIFFAFVLLLSGALAYCLALQLYVRRRKKLPSVLLFKKPSPFIFISQRPSPETQDTIHPLDEEAFLKVSPELKNLDLHGSTDSGFGSTKPSLQTEEPQFLLPDPHPQADRTLGNGEPPVLGDSCSSGSSNSTDSGICLQEPSLSPSTGPTWEQQVGSNSRGQDDSGIDLVQNSEGRAGDTQGGSALGHHSPPEPEVPGEEDPAAVAFQGYLRQTRCAEEKATKTGCLEEESPLTDGLGPKFGRCLVDEAGLHPPALAKGYLKQDPLEMTLASSGAPTGQWNQPTEEWSLLALSSCSDLGISDWSFAHDLAPLGCVAAPGGLLGSFNSDLVTLPLISSLQSSE

SEQ ID NO: 1494 - DNA, 3376 bp, Homo sapien
tttggggctgagtttaataagcgagcgagcgagcaagcgagcgcggggggaaaaaggcagagaatgtccgccatctaccctccgctcctgggcgcgctctcattcatagcagcctcttcatgaattacagctgagggggggcggaggaggggggggtaccacacaacaccccagcaaacctccgggcccccaggcatggctagctcgtgttccgtgcaggtgaagctggagctggggcaccgcgcccaggtgaggaaaaaacccaccgtggagggcttcacccacgactggatggtgttcgtacgcggtccggagcacagtaacatacagcactttgtggagaaagtcgtcttccacttgcacgaaagctttcctaggccaaaaagagtgtgcaaagatccaccttacaaagtagaagaatctgggtatgctggtttcattttgccaattgaagtttattttaaaaacaaggaagaacctaggaaagtccgctttgattatgacttattcctgcatcttgaaggccatccaccagtgaatcacctccgctgtgaaaagctaactttcaacaaccccacagaggactttaggagaaagttgctgaaggcaggaggggaccctaataggagtattcataccagcagcagcagcagcagcagcagtagcagcagcagcagcagcagcagcagcagcagtagcagcagcagcagcagcagcagcagcagcagtagcagcagcagtagcagcagcagcagcagcagtagtaccagtttttcaaagcctcacaaattaatgaaggagcacaaggaaaaaccttctaaagactccagagaacataaaagtgccttcaaagaaccttccagggatcacaacaaatcttccaaagaatcctctaagaaacccaaagaaaataaaccactgaaagaagagaaaatagttcctaagatggccttcaaggaacctaaacccatgtcaaaagagccaaaaccagatagtaacttactcaccatcaccagtggacaagataagaaggctcctagtaaaaggccgcccatttcagattctgaagaactctcagccaaaaaaaggaaaaagagtagctcagaggctttatttaaaagtttttctagcgcaccaccactgatactcacttgttctgctgacaaaaaacagataaaagataaatctcatgtcaagatgggaaaggtcaaaattgaaagtgagacatcagagaagaagaaatcaacgttaccgccatttgatgatattgtggatcccaatgattcagatgtggaggagaatatatcctctaaatctgattctgaacaacccagtcctgccagctccagctccagctccagctccagcttcacaccatcccagaccaggcaacaaggtcctttgaggtctataatgaaagatctgcattctgatgacaatgaggaggaatcagatgaagtggaggataacgacaatgactctgaaatggagaggcctgtaaatagaggaggcagccgaagtcgcagagttagcttaagtgatggcagcgatagtgaaagcagttctgcttcttcacccctacatcacgaacctccaccacccttactaaaaaccaacaacaaccagattcttgaagtgaaaagtccaataaagcaaagcaaatcagataagcaaataaagaatggtgaatgtgacaaggcatacctagatgaactggtagagcttcacagaaggttaatgacattgagagaaagacacattctgcagcagatcgtgaaccttatagaagaaactggacactttcatatcacaaacacaacatttgattttgatctttgctcgctggacaaaaccacagtccgtaaactacagagttacctggaaacatctggaacatcctgaggatataacaactggatgcatcaagaactattgtgttttttttttttggttttttttttttttggttgtgattttttgttcttgttgtttatatgaaaacactcaaaatgatgcaaccaaaagggaaaaaataaaaatcaaacaaccttcagctttatttttctttaaagccagtcatcatctcttgataaaggagaggttaaagcaaaccagcctcagcggaccactcttctctccaaggaaatccccgggaagagttagcctggatagccttgaaaacaaacaaatcaaacacaacacaagaaaactcaaagaatgtgtatggtatcatgtatctctctgtggtggttcattccacaggacgaatgcatattcaacacactgccttattacataactgatctatttattatcgcatacagatattctaagtcgttgagggaatgacaccatcagacattataagtacttggtcccgtggatgctctttcaatgcagcacccttgccatcccaagcccagtgaccttactcgtataccgtgccactttccaccaactttttccaagtcctttaactcgttgcagtctgtattttccaccttttgtttttccagttccaggacacagattatcaactggggggaccaaatagccaccttgattttcttctttgtggtctttttcctgaaagttggggcccagtccttggctgtatccatgtaatgatcttggaccatggtagaaaatgcaccaaataggatcatatgaattgctgtctagccttagtcaataaacttgtaggacttttaaacaaaagtgtacctgtaaatgtcctgaatccagcattgttgagctgtcatcaacattcttgtgtctgttttactgttacaatattaggtgaatatggaagtaaaggcattccacaggatcatcatttaaaaaaaaagaattctggtcctgttttctaaaaaaaaaaaactgttgtagaaattcttaatttggatctatttattagtcagagtttcagctttcttcagctgccagtgtgttactcatctttatcctaaaaatctggaatcagagatttttgtttgttcacatatgattctcttagacacttttatatttgaaaaaattaaaatctttctttggggaaaaattcttggttattctgccataacagattatgtattaacttgtagattcagtggttcaatacctgtttagttgcttgctaatatttccagaaggatttcttgtattggtgaaagacggttggggatggggggatttttttgttcttgttgtacccttgttttgaaactagaaatctgtcctgtggcatgcaaaagaaagcaaattatttttaaaagaaaaaaaccaaagtacttttggtgtcattattccatcttctccataagtggagaaatgaaaagtaagaacagctcatcttcaaagtttttactagaaattc

SEQ ID NO: 1495 - protein, 568 aa, Homo sapien
MASSCSVQVKLELGHRAQVRKKPTVEGFTHDWMVFVRGPEHSNIQHFVEKVVFHLHESFPRPKRVCKDPPYKVEESGYAGFILPIEVYFKNKEEPRKVRFDYDLFLHLEGHPPVNHLRCEKLTFNNPTEDFRRKLLKAGGDPNRSIHTSSSSSSSSSSSSSSSSSSSSSSSSSSSSSSSSSSSSSSSSSSTSFSKPHKLMKEHKEKPSKDSREHKSAFKEPSRDHNKSSKESSKKPKENKPLKEEKIVPKMAFKEPKPMSKEPKPDSNLLTITSGQDKKAPSKRPPISDSEELSAKKRKKSSSEALFKSFSSAPPLILTCSADKKQIKDKSHVKMGKVKIESETSEKKKSTLPPFDDIVDPNDSDVEENISSKSDSEQPSPASSSSSSSSSFTPSQTRQQGPLRSIMKDLHSDDNEEESDEVEDNDNDSEMERPVNRGGSRSRRVSLSDGSDSESSSASSPLHHEPPPPLLKTNNNQILEVKSPIKQSKSDKQIKNGECDKAYLDELVELHRRLMTLRERHILQQIVNLIEETGHFHITNTTFDFDLCSLDKTTVRKLQSYLETSGTS

SEQ ID NO: 1496 - DNA, 1824 bp, Homo sapien
cagctctctgtcagaatggccaccatggtaccatccgtgttgtggcccagggcctgctggactctgctggtctgctgtctgctgaccccaggtgtccaggggcaggagttccttttgcgggtggagccccagaaccctgtgctctctgctggagggtccctgtttgtgaactgcagtactgattgtcccagctctgagaaaatcgccttggagacgtccctatcaaaggagctggtggccagtggcatgggctgggcagccttcaatctcagcaacgtgactggcaacagtcggatcctctgctcagtgtactgcaatggctcccagataacaggctcctctaacatcaccgtgtacgggctcccggagcgtgtggagctggcacccctgcctccttggcagccggtgggccagaacttcaccctgcgctgccaagtggagggtgggtcgccccggaccagcctcacggtggtgctgcttcgctgggaggaggagctgagccggcagcccgcagtggaggagccagcggaggtcactgccactgtgctggccagcagagacgaccacggagcccctttctcatgccgcacagaactggacatgcagccccaggggctgggactgttcgtgaacacctcagccccccgccagctccgaacctttgtcctgcccgtgacccccccgcgcctcgtggccccccggttcttggaggtggaaacgtcgtggccggtggactgcaccctagacgggctttttccagcctcagaggcccaggtctacctggcgctgggggaccagatgctgaatgcgacagtcatgaaccacggggacacgctaacggccacagccacagccacggcgcgcgcggatcaggagggtgcccgggagatcgtctgcaacgtgaccctagggggcgagagacgggaggcccgggagaacttgacggtctttagcttcctaggacccattgtgaacctcagcgagcccaccgcccatgaggggtccacagtgaccgtgagttgcatggctggggctcgagtccaggtcacgctggacggagttccggccgcggccccggggcagccagctcaacttcagctaaatgctaccgagagtgacgacggacgcagcttcttctgcagtgccactctcgaggtggacggcgagttcttgcacaggaacagtagcgtccagctgcgagtcctgtatggtcccaaaattgaccgagccacatgcccccagcacttgaaatggaaagataaaacgagacacgtcctgcagtgccaagccaggggcaacccgtaccccgagctgcggtgtttgaaggaaggctccagccgggaggtgccggtggggatcccgttcttcgtcaacgtaacacataatggtacttatcagtgccaagcgtccagctcacgaggcaaatacaccctggtcgtggtgatggacattgaggctgggagctcccactttgtccccgtcttcgtggcggtgttactgaccctgggcgtggtgactatcgtactggccttaatgtacgtcttcagggagcaccaacggagcggcagttaccatgttagggaggagagcacctatctgcccctcacgtctatgcagccgacagaagcaatgggggaagaaccgtccagagctgagtgacgctgggatccgggatcaaagttggcgggggcttggctgtgccctcagattccgcaccaataaagccttcaaactccctaaaaaaaaaaaaaaaaaaaaaaaaaaaaaaaaaaaaaaaaaaaaaaaaaaaaaaaaaaaaaaaaaaaaaaaaaaaaaaaaaaaaaa

SEQ ID NO: 1497 - protein, 547 aa, Homo sapien
MATMVPSVLWPRACWTLLVCCLLTPGVQGQEFLLRVEPQNPVLSAGGSLFVNCSTDCPSSEKIALETSLSKELVASGMGWAAFNLSNVTGNSRILCSVYCNGSQITGSSNITVYGLPERVELAPLPPWQPVGQNFTLRCQVEGGSPRTSLTVVLLRWEEELSRQPAVEEPAEVTATVLASRDDHGAPFSCRTELDMQPQGLGLFVNTSAPRQLRTFVLPVTPPRLVAPRFLEVETSWPVDCTLDGLFPASEAQVYLALGDQMLNATVMNHGDTLTATATATARADQEGAREIVCNVTLGGERREARENLTVFSFLGPIVNLSEPTAHEGSTVTVSCMAGARVQVTLDGVPAAAPGQPAQLQLNATESDDGRSFFCSATLEVDGEFLHRNSSVQLRVLYGPKIDRATCPQHLKWKDKTRHVLQCQARGNPYPELRCLKEGSSREVPVGIPFFVNVTHNGTYQCQASSSRGKYTLVVVMDIEAGSSHFVPVFVAVLLTLGVVTIVLALMYVFREHQRSGSYHVREESTYLPLTSMQPTEAMGEEPSRAE

SEQ ID NO: 1498 - DNA, 2169 bp, Homo sapien
ccgcctccgagtgccttgcgcggacctgagctggagatgctggccgggctaccgacgtcagaccccgggcgcctcatcacggacccgcgcagcggccgcacctacctcaaaggccgcttgttgggcaaggggggcttcgcccgctgctacgaggccactgacacagagactggcagcgcctacgctgtcaaagtcatcccgcagagccgcgtcgccaagccgcatcagcgcgagaagatcctaaatgagattgagctgcaccgagacctgcagcaccgccacatcgtgcgtttttcgcaccactttgaggacgctgacaacatctacattttcttggagctctgcagccgaaagtccctggcccacatctggaaggcccggcacaccctgttggagccagaagtgcgctactacctgcggcagatcctttctggcctcaagtacttgcaccagcgcggcatcttgcaccgggacctcaagttgggaaattttttcatcactgagaacatggaactgaaggtgggggattttgggctggcagcccggttggagcctccggagcagaggaagaagaccatctgtggcacccccaactatgtggctccagaagtgctgctgagacagggccacggccctgaagcggatgtatggtcactgggctgtgtcatgtacacgctgctctgcgggagccctccctttgagacggctgacctgaaggagacgtaccgctgcatcaagcaggttcactacacgctgcctgccagcctctcactgcctgcccggcagctcctggccgccatccttcgggcctcaccccgagaccgcccctctattgaccagatcctgcgccatgacttctttaccaagggctacacccccgatcgactccctatcagcagctgcgtgacagtcccagacctgacaccccccaacccagctaggagtctgtttgccaaagttaccaagagcctctttggcagaaagaagaagagtaagaatcatgcccaggagagggatgaggtctccggtttggtgagcggcctcatgcgcacatccgttggccatcaggatgccaggccagaggctccagcagcttctggcccagcccctgtcagcctggtagagacagcacctgaagacagctcaccccgtgggacactggcaagcagtggagatggatttgaagaaggtctgactgtggccacagtagtggagtcagccctttgtgctctgagaaattgtatagctttcatgcccccagcggaacagaacccggcccccctggcccagccagagcctctggtgtgggtcagcaagtgggttgactactccaataagttcggctttgggtatcaactgtccagccgccgtgtggctgtgctcttcaacgatggcacacatatggccctgtcggccaacagaaagactgtgcactacaatcccaccagcacaaagcacttctccttctccgtgggtgctgtgccccgggccctgcagcctcagctgggtatcctgcggtacttcgcctcctacatggagcagcacctcatgaagggtggagatctgcccagtgtggaagaggtagaggtacctgctccgcccttgctgctgcagtgggtcaagacggatcaggctctcctcatgctgtttagtgatggcactgtccaggtgaacttctacggggaccacaccaagctgattctcagtggctgggagcccctccttgtgacttttgtggcccgaaatcgtagtgcttgtacttacctcgcttcccaccttcggcagctgggctgctctccagacctgcggcagcgactccgctatgctctgcgcctgctccgggaccgcagcccagcttaggacccaagccctgaaggcctgaggcctgtgcctgtcaggctctggcccttgcctttgtggccttcccccttcctttggtgcctcactgggggctttgggccgaatcccccagggaatcagggaccagctttactggagttgggggcggcttgtcttcgctggctcctaccccatctccaagataagcctgagccttagctcccagctagggggcgttatttatggaccacttttatttattgtcagacacttatttattgggatgtgagccccagggggcctcctcctaggataataaacaattttgca

SEQ ID NO: 1499 - protein, 607 aa, Homo sapien
MLAGLPTSDPGRLITDPRSGRTYLKGRLLGKGGFARCYEATDTETGSAYAVKVIPQSRVAKPHQREKILNEIELHRDLQHRHIVRFSHHFEDADNIYIFLELCSRKSLAHIWKARHTLLEPEVRYYLRQILSGLKYLHQRGILHRDLKLGNFFITENMELKVGDFGLAARLEPPEQRKKTICGTPNYVAPEVLLRQGHGPEADVWSLGCVMYTLLCGSPPFETADLKETYRCIKQVHYTLPASLSLPARQLLAAILRASPRDRPSIDQILRHDFFTKGYTPDRLPISSCVTVPDLTPPNPARSLFAKVTKSLFGRKKKSKNHAQERDEVSGLVSGLMRTSVGHQDARPEAPAASGPAPVSLVETAPEDSSPRGTLASSGDGFEEGLTVATVVESALCALRNCIAFMPPAEQNPAPLAQPEPLVWVSKWVDYSNKFGFGYQLSSRRVAVLFNDGTHMALSANRKTVHYNPTSTKHFSFSVGAVPRALQPQLGILRYFASYMEQHLMKGGDLPSVEEVEVPAPPLLLQWVKTDQALLMLFSDGTVQVNFYGDHTKLILSGWEPLLVTFVARNRSACTYLASHLRQLGCSPDLRQRLRYALRLLRDRSPA

SEQ ID NO: 1500 - DNA, 1670 bp, Homo sapien
attgagagtggctctaacaagtgccatttttccttgttagctttcatttctcagccctttacaagattaaaatagtctgcagtttaatctctccaaagctttacggacagtgattctgtcctaaacaagacagtgactccaggatttctgaagactattgtggaagaagcatccattaaggccaagctataacatcagaaatggtgaatgaatacaagaaaattcttttgctgaaaggatttgagctcatggatgattatcattttacatcaattaagtccttactggcctatgatttaggactaactacaaaaatgcaagaggaatacaacagaattaagattacagatttgatggaaaaaaagttccaaggcgttgcctgtctagacaaactaatagaacttgccaaagatatgccatcacttaaaaaccttgttaacaatcttcgaaaagagaagtcaaaagttgctaagaaaattaaaacacaagaaaaagctccagtgaaaaaaataaaccaggaagaagtgggtcttgcggcacctgcacccaccgcaagaaacaaactgacatcggaagcaagagggaggattcctgtagctcagaaaagaaaaactccaaacaaagaaaagactgaagccaaaaggaataaggtgtcccaagagcagagtaagcccccaggtccctcaggagccagcacatctgcagctgtggatcatcccccactaccccagacctcatcatcaactccatccaacacttcgtttactccgaatcaggaaacccaggcccaacggcaggtggatgcaagaagaaatgttccccaaaacgacccagtgacagtggtggtactgaaagcaacagcgccatttaaatacgagtccccagaaaatgggaaaagcacaatgtttcatgctacagtggccagtaagactcaatatttccatgtgaaagtcttcgacatcaacttgaaagagaaatttgtaaggaagaaggtcattaccatatctgattactctgaatgtaaaggagtaatggaaataaaggaagcatcatctgtgtctgactttaatcaaaattttgaggtcccaaacagaattatcgaaatagcaaataaaactcccaagatcagtcaactttacaagcaagcatctggaacaatggtgtatgggttgtttatgttacaaaagaaaagcgtacacaagaagaacacaatttatgaaatacaggataatacaggatccatggatgtagtggggagtggaaaatggcacaatatcaagtgtgagaaaggagataaacttcgactcttctgccttcaactgagaacagttgaccgcaagctgaaactggtgtgtggaagtcacagcttcatcaaggtcatcaaggccaagaaaaacaaggaaggaccaatgaatgttaattgaaatatgaaagctgaaatgcaacaaacaacttccgcttaaaacaattaagttgttaataactgtgattttgtaaatttcagtaattcatttaaatgatgtttcagtagatatattctagcatattaagagcttttataactgagttatagattagtttgctttctggaataaaattttcttcttatactcttccttttttttagatattacattttgcttttatgacattcacgaggcaaaaaaccg

SEQ ID NO: 1501 - protein, 407 aa, Homo sapien
MVNEYKKILLLKGFELMDDYHFTSIKSLLAYDLGLTTKMQEEYNRIKITDLMEKKFQGVACLDKLIELAKDMPSLKNLVNNLRKEKSKVAKKIKTQEKAPVKKINQEEVGLAAPAPTARNKLTSEARGRIPVAQKRKTPNKEKTEAKRNKVSQEQSKPPGPSGASTSAAVDHPPLPQTSSSTPSNTSFTPNQETQAQRQVDARRNVPQNDPVTVVVLKATAPFKYESPENGKSTMFHATVASKTQYFHVKVFDINLKEKFVRKKVITISDYSECKGVMEIKEASSVSDFNQNFEVPNRIIEIANKTPKISQLYKQASGTMVYGLFMLQKKSVHKKNTIYEIQDNTGSMDVVGSGKWHNIKCEKGDKLRLFCLQLRTVDRKLKLVCGSHSFIKVIKAKKNKEGPMNVN

SEQ ID NO: 1502 - DNA, 1389 bp, Homo sapien
cgcggacttctgccaagcaccggctcatgtgaggctcgcggcacagcgttctctgggctccccagaagccagcctttcgctcccggacccggcagcccgagcaggagccgtgggaccgggcgccagcaccctctgcggcgtgtcatgggcccgcgccgccggagccgaaagcccgaggccccgaggaggcgcagcccgagcccgaccccgacccccggcccctcccggcggggcccctccttaggcgcttcctcccatcaacacagtcggcggagacaaggttggctaaaggagatccgaaagcttcagaagagcacacacctcttgataaggaagctgcccttcagccgcctggcaagagaaatatgtgttaaattcactcgtggtgtggacttcaattggcaagcccaggccctattggccctacaagaggcagcagaagcatttctagttcatctctttgaggacgcctatctcctcaccttacatgcaggccgagttactctcttcccaaaggatgtgcaactggcccggaggatccggggccttgaggagggactcggctgagctcctgcacccagtgtttctgtcagtctttcctgctcagccaggggggatgataccggggactctccagagccatgactagatccaatggattctgcgatgctgtctggactttgctgtctctgaacagtatgtgtgtgttgctttaaatatttttcttttttttgagaaggagaagactgcatgactttcctctgtaacagaggtaatatatgagacaatcaacaccgttccaaaggcctgaaaataattttcagataaagagactccaaggttgactttagtttgtgagttactcatgtgactatttgaggattttgaaaacatcagatttgctgtggtatgggagaaaaggttatgtacttattattttagctctttctgtaatatttacattttttaccatatgtacatttgtacttttattttacacataagggaaaaaataagaccactttgagcagttgcctggaaggctgggcatttccatcatatagacctctgcccttcagagtagcctcaccattagtggcagcatcatgtaactgagtggactgtgcttgtcaacggatgtgtagcttttcagaaacttaattggggatgaatagaaaacctgtaagctttgatgttctggttacttctagtaaattcctgtcaaaatcaattcagaaattctaacttggagaatttaacattttactcttgtaaatcatagaagatgtatcataacagttcagaattttaaagtacattttcgatgcttttatgggtatttttgtagtttctttgtagagagataataaaaatcaaaatatttaatga

SEQ ID NO: 1503 - protein, 140 aa, Homo sapien
MGPRRRSRKPEAPRRRSPSPTPTPGPSRRGPSLGASSHQHSRRRQGWLKEIRKLQKSTHLLIRKLPFSRLAREICVKFTRGVDFNWQAQALLALQEAAEAFLVHLFEDAYLLTLHAGRVTLFPKDVQLARRIRGLEEGLG

SEQ ID NO: 1504 - DNA, 2905 bp, Homo sapien
cggcagccagctgagagcaatgggaaatggggagtcccagctgtcctcggtgcctgctcagaagctgggttggtttatccaggaatacctgaagccctacgaagaatgtcagacactgatcgacgagatggtgaacaccatctgtgacgtctgcaggaaccccgaacagttccccctggtgcagggagtggccataggtggctcctatggacggaaaacagtcttaagaggcaactccgatggtacccttgtccttttcttcagtgacttaaaacaattccaggatcagaagagaagccaacgtgacatcctcgataaaactggggataagctgaagttctgtctgttcacgaagtggttgaaaaacaatttcgagatccagaagtcccttgatgggtccaccatccaggtgttcacaaaaaatcagagaatctctttcgaggtgctggccgccttcaacgctctgagcttaaatgataatcccagcccctggatctatcgagagctcaaaagatccttggataagacaaatgccagtcctggtgagtttgcagtctgcttcactgaactccagcagaagttttttgacaaccgtcctggaaaactaaaggatttgatcctcttgataaagcactggcatcaacagtgccagaaaaaaatcaaggatttaccctcgctgtctccgtatgccctggagctgcttacggtgtatgcctgggaacaggggtgcagaaaagacaactttgacattgctgaaggcgtcagaacggttctggagctgatcaaatgccaggagaagctgtgtatctattggatggtcaactacaactttgaagatgagaccatcaggaacatcctgctgcaccagctccaatcagcgaggccagtaatcttggatccagttgacccaaccaataatgtgagtggagataaaatatgctggcaatggctgaaaaaagaagctcaaacctggttgacttctcccaacctggataatgagttacctgcaccatcttggaatgtcctgcctgcaccactcttcacgaccccaggccaccttctggataagttcatcaaggagtttctccagcccaacaaatgcttcctagagcagattgacagtgctgttaacatcatccgtacattccttaaagaaaactgcttccgacaatcaacagccaagatccagattgtccggggaggatcaaccgccaaaggcacagctctgaagactggctctgatgccgatctcgtcgtgttccataactcacttaaaagctacacctcccaaaaaaacgagcggcacaaaatcgtcaaggaaatccatgaacagctgaaagccttttggagggagaaggaggaggagcttgaagtcagctttgagcctcccaagtggaaggctcccagggtgctgagcttctctctgaaatccaaagtcctcaacgaaagtgtcagctttgatgtgcttcctgcctttaatgcactgggtcagctgagttctggctccacacccagccccgaggtttatgcagggctcattgatctgtataaatcctcggacctcccgggaggagagttttctacctgtttcacagtcctgcagcgaaacttcattcgctcccggcccaccaaactaaaggatttaattcgcctggtgaagcactggtacaaagagtgtgaaaggaaactgaagccaaaggggtctttgcccccaaagtatgccttggagctgctcaccatctatgcctgggagcaggggagtggagtgccggattttgacactgcagaaggtttccggacagtcctggagctggtcacacaatatcagcagctcggcatcttctggaaggtcaattacaactttgaagatgagaccgtgaggaagtttctactgagccagttgcagaaaaccaggcctgtgatcttggacccaggcgaacccacaggtgacgtgggtggaggggaccgttggtgttggcatcttctggacaaagaagcaaaggttaggttatcctctccctgcttcaaggatgggactggaaacccaataccaccttggaaagtgccgacaatgcagacaccaggaagttgtggagctaggatccatcctattgtcaatgagatgttctcatccagaagccatagaatcctgaataataattctaaaagaaacttctggagatcatctggcaatcgcttttaaagactcggctcaccgtgagaaagagtcactcacatccattcttcccttgatggtccctattcctccttcccttgccttcttggacttcttgaaatcaatcaagactgcaaaccctttcataaagctgccttgctgaactcctctctgcaggagccctgcttaaaatagttgatgtcatcactttatgtgcatcttatttctgtcaacttgtatttttttttcttgtatttttccaattagctcctcctttttccttccagtctaaaaaaggaatcctctgtgtcttcaaagcaaagctctttactttccccttggttctcataactctgtgatcttgctctcggtgcttccaactcatccacgtcctgtctgtttcctctgtatacaaaaccctttctgcccctgctgacacagacatcctctatgccagcagccaggccaaccctttcattagaacttcaagctctccaaaggctcagattataactgttgtcatatttatatgaggctgttgtcttttccttctgagcctgcctttatccccccacccaggagtatcctcttgccaaagcaaaagactttttccttggctttagccttaaagatacttgaaggtctaggtgctttaacctcacataccctcacttaaacttttatcactgttgcatataccagttgtgatacaataaagaatgtatctgg

SEQ ID NO: 1505 - protein, 727 aa, Homo sapien
MGNGESQLSSVPAQKLGWFIQEYLKPYEECQTLIDEMVNTICDVCRNPEQFPLVQGVAIGGSYGRKTVLRGNSDGTLVLFFSDLKQFQDQKRSQRDILDKTGDKLKFCLFTKWLKNNFEIQKSLDGSTIQVFTKNQRISFEVLAAFNALSLNDNPSPWIYRELKRSLDKTNASPGEFAVCFTELQQKFFDNRPGKLKDLILLIKHWHQQCQKKIKDLPSLSPYALELLTVYAWEQGCRKDNFDIAEGVRTVLELIKCQEKLCIYWMVNYNFEDETIRNILLHQLQSARPVILDPVDPTNNVSGDKICWQWLKKEAQTWLTSPNLDNELPAPSWNVLPAPLFTTPGHLLDKFIKEFLQPNKCFLEQIDSAVNIIRTFLKENCFRQSTAKIQIVRGGSTAKGTALKTGSDADLVVFHNSLKSYTSQKNERHKIVKEIHEQLKAFWREKEEELEVSFEPPKWKAPRVLSFSLKSKVLNESVSFDVLPAFNALGQLSSGSTPSPEVYAGLIDLYKSSDLPGGEFSTCFTVLQRNFIRSRPTKLKDLIRLVKHWYKECERKLKPKGSLPPKYALELLTIYAWEQGSGVPDFDTAEGFRTVLELVTQYQQLGIFWKVNYNFEDETVRKFLLSQLQKTRPVILDPGEPTGDVGGGDRWCWHLLDKEAKVRLSSPCFKDGTGNPIPPWKVPTMQTPGSCGARIHPIVNEMFSSRSHRILNNNSKRNFWRSSGNRF

SEQ ID NO: 1506 - DNA, 2961 bp, Homo sapien
aagagatgatttctccatcctgaacgtgcagcgagcttgtcaggaagatcggaggtgccaagtagcagagaaagcatcccccagctctgacagggagacagcacatgtctaaggcccacaagccttggccctaccggaggagaagtcaattttcttctcgaaaatacctgaaaaaagaaatgaattccttccagcaacagccaccgccattcggcacagtgccaccacaaatgatgtttcctccaaactggcagggggcagagaaggacgctgctttcctcgccaaggacttcaactttctcactttgaacaatcagccaccaccaggaaacaggagccaaccaagggcaatggggcccgagaacaacctgtacagccagtacgagcagaaggtgcgcccctgcattgacctcatcgactccctgcgggctctgggtgtggagcaggacctggccctgccagccatcgccgtcatcggggaccagagctcgggcaagagctctgtgctggaggcactgtcaggagtcgcgcttcccagaggcagcggaatcgtaaccaggtgtccgctggtgctgaaactgaaaaagcagccctgtgaggcatgggccggaaggatcagctaccggaacaccgagctagagcttcaggaccctggccaggtggagaaagagatacacaaagcccagaacgtcatggccgggaatggccggggcatcagccatgagctcatcagcctggagatcacctcccctgaggttccagacctgaccatcattgaccttcccggcatcaccagggtggctgtggacaaccagccccgagacatcggactgcagatcaaggctctcatcaagaagtacatccagaggcagcagacgatcaacttggtggtggttccctgtaacgtggacattgccaccacggaggcgctgagcatggcccatgaggtggacccggaaggggacaggaccatcggtatcctgaccaaaccagatctaatggacaggggcactgagaaaagcgtcatgaatgtggtgcggaacctcacgtaccccctcaagaagggctacatgattgtgaagtgccggggccagcaggagatcacaaacaggctgagcttggcagaggcaaccaagaaagaaattacattctttcaaacacatccatatttcagagttctcctggaggaggggtcagccacggttccccgactggcagaaagacttaccactgaactcatcatgcatatccaaaaatcgctcccgttgttagaaggacaaataagggagagccaccagaaggcgaccgaggagctgcggcgttgcggggctgacatccccagccaggaggccgacaagatgttctttctaattgagaaaatcaagatgtttaatcaggacatcgaaaagttagtagaaggagaagaagttgtaagggagaatgagacccgtttatacaacaaaatcagagaggattttaaaaactgggtaggcatacttgcaactaatacccaaaaagttaaaaatattatccacgaagaagttgaaaaatatgaaaagcagtatcgaggcaaggagcttctgggatttgtcaactacaagacatttgagatcatcgtgcatcagtacatccagcagctggtggagcccgcccttagcatgctccagaaagccatggaaattatccagcaagctttcattaacgtggccaaaaaacattttggcgaatttttcaaccttaaccaaactgttcagagcacgattgaagacataaaagtgaaacacacagcaaaggcagaaaacatgatccaacttcagttcagaatggagcagatggttttttgtcaagatcagatttacagtgttgttctgaagaaagtccgagaagagatttttaaccctctggggacgccttcacagaatatgaagttgaactctcattttcccagtaatgagtcttcggtttcctcctttactgaaataggcatccacctgaatgcctacttcttggaaaccagcaaacgtctcgccaaccagatcccatttataattcagtattttatgctccgagagaatggtgactccttgcagaaagccatgatgcagatactacaggaaaaaaatcgctattcctggctgcttcaagagcagagtgagaccgctaccaagagaagaatccttaaggagagaatttaccggctcactcaggcgcgacacgcactctgtcaattctccagcaaagagatccactgaagggcggcgatgcctgtggttgttttcttgtgcgtactcattcattctaaggggagtcggtgcaggatgccgcttctgctttggggccaaactcttctgtcactatcagtgtccatctctactgtactccctcagcatcagagcatgcatcaggggtccacacaggctcagctctctccaccacccagctcttccctgaccttcacgaagggatggctctccagtccttgggtcccgtagcacacagttacagtgtcctaagatactgctatcattcttcgctaatttgtatttgtattcccttccccctacaagattatgagaccccagagggggaaggtctgggtcaaattcttcttttgtatgtccagtctcctgcacagcacctgcagcattgtaactgcttaataaatgacatctcactgaacgaatgagtgctgtgtaagtgatggagatacctgaggctattgctcaagcccaggccttggacatttagtgactgttagccggtccctttcagatccagtggccatgccccctgcttcccatggttcactgtcattgtgtttcccagcctctccactcccccgccagaaaggagcctgagtgattctcttttcttcttgtttccctgattatgatgagcttccattgttctgttaagtcttgaagaggaatttaataaagcaaagaaactttttaaaaacgt

SEQ ID NO: 1507 - protein, 715 aa, Homo sapien
MSKAHKPWPYRRRSQFSSRKYLKKEMNSFQQQPPPFGTVPPQMMFPPNWQGAEKDAAFLAKDFNFLTLNNQPPPGNRSQPRAMGPENNLYSQYEQKVRPCIDLIDSLRALGVEQDLALPAIAVIGDQSSGKSSVLEALSGVALPRGSGIVTRCPLVLKLKKQPCEAWAGRISYRNTELELQDPGQVEKEIHKAQNVMAGNGRGISHELISLEITSPEVPDLTIIDLPGITRVAVDNQPRDIGLQIKALIKKYIQRQQTINLVVVPCNVDIATTEALSMAHEVDPEGDRTIGILTKPDLMDRGTEKSVMNVVRNLTYPLKKGYMIVKCRGQQEITNRLSLAEATKKEITFFQTHPYFRVLLEEGSATVPRLAERLTTELIMHIQKSLPLLEGQIRESHQKATEELRRCGADIPSQEADKMFFLIEKIKMFNQDIEKLVEGEEVVRENETRLYNKIREDFKNWVGILATNTQKVKNIIHEEVEKYEKQYRGKELLGFVNYKTFEIIVHQYIQQLVEPALSMLQKAMEIIQQAFINVAKKHFGEFFNLNQTVQSTIEDIKVKHTAKAENMIQLQFRMEQMVFCQDQIYSVVLKKVREEIFNPLGTPSQNMKLNSHFPSNESSVSSFTEIGIHLNAYFLETSKRLANQIPFIIQYFMLRENGDSLQKAMMQILQEKNRYSWLLQEQSETATKRRILKERIYRLTQARHALCQFSSKEIH

SEQ ID NO: 1508 - DNA, 2654 bp, Homo sapien
ctctgggcacttttgaactcacgaaccttgcgcaaaacccagaagatgtattcatgagccacccaggccactgacctcccactttggggaactcaaaggactgacctgcccctgccgcctgtgccccttgcgtggcgctcgcagaggatacgtgctacacggccttgtccggcctgtcgacccgtgctagtgggagcctagagaatggggcgctcctggtcgtgccgtgggctccatgggagagacattgcgggtttctggttggacggcccttttctggctcctgtgtggagttattcactctcccagaggctcctggagccagccaccctaactgagctgccagtggggtcgtgaggcaagatccccgccacccggggacatcttcaatctaggcgaggcgaagctgagcgggtctagtggaaagattgtgtctggtcgtttgaccacacaccgccctgatttgctgttttctttttttagggagaagggcttttctttagtggagaaatggaactcgcccccctacccccttgtctgctgctcccagccacgttggtggtattggccgatgagctggtttgactcattaatttctctcaatttgggtcccagctaaagaggtggggtgaagctggggacagctttcctgggtgagtttttcttttgaataatgtagtgcagtcaccctgtggcaaatgccaggacagctgcaggtgcccattagcaacgcctgccttctgggcaaggtgagggatgccataccttgagaccaagccggtgcccacctaagggctaaggcctcttgctggtgcacatgacatttgtcctgcagagctggggggaaggcgatgtggtgaccccacccccacccgttaatttaaagctgtttctaaacagttgagtttcttctaaagaggaagccttgcccagcaaggaccagtgagacagccggatcttggagacaattacaagacggggagtgagactcctgattgctctggaagcctgctgatttctacaactgatcatttgcagctgctggttttggtttccaccttaccctactggctgtaaaaacacaaatgtgtactttattgattttctttctaattctcccgcattggtggcttgggacttgggagagggagcaagccttcctccatggcccatcactcggctgtggagaacaaagaccaatgtgaagacactacagaggattctgtcttccaggcccagtccactggggagtgctggaatggggacctggggtggggaggcagagggtcactttacataggattaagttcgaggtggctaccgatttcagcacatgcactactgaaatttacacaaaaagaaagctgtgaaattgaagtcccaatttaagagtcctgaggcagaacctggtggctggaggcattcccagaggtggggaagagagcctgcccggccggagaacatctgccttgctgcacctgaggcccagcagagccgttcctgggactgtcagataatcggtgcagcggtggaaggagcctgcggctgctggcacagacttcacacagcacctcctctctgctgggtttccacacagcctgtcttcagatcctgctgccgcgtgcgaccagaggtgggaggcccctggtggcatggaagagggagggtcagtgccaagtctcaggaggagggcgcatgtgtgtatcaccctcagctggcggaacctggctgcgaactgtgcagttacgttgcatccacaggattccagttgcgtgtctgtttccttctctttctccgtatttatttttttattcttcggaggaggtggacatttcggaagtggtggggactaagggaagaactctctagttccctcagtgtgaagcctgtcgtgttctctccccttgcactggtcatcagtattgtgtaaaggaacaactgatatacttgagtgtgcaagcaaagaacccatttgccatgctgctatgaagactacttttagatcaacaataaaaaaaaacctacaaaaaaacctttattctttaattgttgcttttacggtgatattgtgcatgcaaaccaggagcattttgtgtcttaagaaaaataatcttagaacagatggctgtgaaaattacacccatgcacagaacaagccacaggaataatagttcaggatttggtttttctctttttcttgtaaacctggagggttgatatattctttccatgcagttattagaacttagttttgttccaacagttaaacttgcaatgaaaagaaaatgtgccatttttttcactcagaattattcatagctgtatatttgaaactgctaattacacacgtgtgatgtatgttggttttttagtgcaatttcttctgtagctattctttgaccaaactgtgggtattgttaatattaatttatatttgtctcattttgtatgtatgtgtagtgtgtttgtgagtatgtgtggtttataatctgacaaagtcatgaagctcagtttggctgtaatttaattccccttcccttatttttatttatttttgtactgtgctgattcaataaaatgcactgaccatccaaaaaaaatctatgtcgggtgcggagaaagaggtaatgaatgcggattcgatatcagcttat

SEQ ID NO: 1509 - protein, 8 aa, Homo sapien
MNADSISA

SEQ ID NO: 1510 - DNA, 2838 bp, Homo sapien
ctccggcccggccccgagcaccgcctccccagccagcgccgccgcgatggcggaggacagcgagtctgcggccagccagcagagcctggaactggacgaccaggacacgtgcgggatagacggggacaatgaggaggagacggagcacgccaaaggaagtcctggagggtatttgggagccaaaaagaaaaagaagaaacagaagagaaaaaaggagaaaccaaattccggaggcaccaagtcagactcggcatctgattcccaggagattaaaattcagcagccttcgaaaaatcccagtgttccaatgcagaagttgcaggatatccagagagcaatggagctgctatccgcatgccagggcccagccaggaacattgatgaggctgcaaagcacagataccagttttgggacacacaaccggtaccaaaactagatgaagtcataacatctcatggtgcaattgaaccagataaagacaacgtacgccaagaaccgtattctttgccacagggttttatgtgggacactttagacttgagtgatgccgaagtgctcaaggagttatacacgttgttaaatgagaattacgtagaagatgatgacaatatgttccgatttgactattcacccgagttcctgttgtgggctctgcgtccaccaggctggctcctgcagtggcactgtggggtcagagtgtcttcaaataaaaaactggtcgggttcataagtgccatcccagcaaacattcggatttatgacagtgtgaagaagatggtagaaatcaactttctttgtgttcataagaagttgagatcgaaacgggtagccccagtgctaatccgagagatcactagaagagtgaacctggaagggatcttccaggctgtgtacaccgcgggagtggttcttcctaagcccatagccacatgcagatactggcatcgatcactaaaccccagaaaattggtagaagtgaaattttctcacttgagtagaaatatgactttacagagaacaatgaagctatacagacttccagatgttacaaagacttcaggtttgagaccaatggaaccaaaagatatcaaatcagttcgagaattaatcaacacttacctgaagcagtttcatctggctccagtgatggatgaagaggaagtagcccactggttcctcccccgggagcacattattgacacgtttgtagtggagagccccaacggtaaactgactgatttcctgagcttctatacgctcccctccacggtgatgcaccaccctgctcacaagagcctcaaagccgcctactcattctacaacatccacacagagacgcccctgctggacctcatgagcgacgcgctcatcctggctaaatcgaaaggatttgatgtattcaatgcactggatttgatggaaaataagacattcttggaaaaactcaagtttggtataggagatggcaatttgcagtattacctgtacaattggaggtgtccaggtacagattctgaaaaggttggactagtactacaatagatggatatttttatttctagaactctgacatcatcatttgttaatatttaatgatttctggaactgccattccaaagaagaataaaagcacaactcaagtgaaattgaagtagtcgataatcagaaaagatgacaaaagtccacatgtgacatttgtacgtttctagctagaatgttaaacttcatcctttttttactgttgacctatttgtgggagggatgaaaggctacaaagagcacattcttgtaattttcaaatttttgcctgtctcttgaagaggtattttttcacccttagaaaagggactgtttttctatggactaagtagaagttacagagtcatgtaagaaaatctttgctattgtgtggagagaaattgctgcatttctgtttcttaagtgatggtacatttgtccatgtaacagaacaaaagatccatttggaaattttttttactggtatcaccttacatggtatcactgggaacatttatggaatcaacacttctgtagctcagtgacaggtggtggttgtttaagtgcagagcaatattaaatgtactggtgactagtacatgtatttctccataagcagagttgccgaatcaataaacatgcaagtttgtactttgatctttaccaggtcagtggattgcttcaaaagcagagttttgtgcaagcactcactgtgctctctgaaagagcctgaggccgggcgtggtggctcacgcctgtaatcccagcactttgggaggccaaggtgggcagatcatgaggtcaggagatcgagaccattctggccaacatagtgaaaccccatctctactaaaaatacaaaaattagccgggcgtggtggcgtgtgcctgtagtcccagctgcttgggaggctgaggcaggagaatcgcttgaacctgagaggtgaggttgcagtgagccgagatcgagccactgcactccagcctgggtgacagagcgtgagactccgtctcaaaaaaaaaaaaaaaagaaagagcctgtacccgcgactaactagacttttcttgctgttgtgcaaagttcagtttcttctcagcaacatcaaggatatatgaagaaaaggaaataaaaaactgtaaagtcaaaagagatgcctggtggaacttattcgtgctatcagggcattgatagtttgaatgtttttattacttatgcaaaattgcacatactcctctatgctgattttatcatgaaaactgtcatgtgtcatgctaatggaaaatgtcttatttgtaaataagtattcataattttgccg

SEQ ID NO: 1511 - protein, 498 aa, Homo sapien
MAEDSESAASQQSLELDDQDTCGIDGDNEEETEHAKGSPGGYLGAKKKKKKQKRKKEKPNSGGTKSDSASDSQEIKIQQPSKNPSVPMQKLQDIQRAMELLSACQGPARNIDEAAKHRYQFWDTQPVPKLDEVITSHGAIEPDKDNVRQEPYSLPQGFMWDTLDLSDAEVLKELYTLLNENYVEDDDNMFRFDYSPEFLLWALRPPGWLLQWHCGVRVSSNKKLVGFISAIPANIRIYDSVKKMVEINFLCVHKKLRSKRVAPVLIREITRRVNLEGIFQAVYTAGVVLPKPIATCRYWHRSLNPRKLVEVKFSHLSRNMTLQRTMKLYRLPDVTKTSGLRPMEPKDIKSVRELINTYLKQFHLAPVMDEEEVAHWFLPREHIIDTFVVESPNGKLTDFLSFYTLPSTVMHHPAHKSLKAAYSFYNIHTETPLLDLMSDALILAKSKGFDVFNALDLMENKTFLEKLKFGIGDGNLQYYLYNWRCPGTDSEKVGLVLQ

SEQ ID NO: 1512 - DNA, 2838 bp, Homo sapien; identical to SEQ ID NO: 1510

SEQ ID NO: 1513 - protein, 498 aa, Homo sapien; identical to SEQ ID NO: 1511

SEQ ID NO: 1514 - DNA, 2771 bp, Homo sapien
ggccacaggccagcgccactctgccaggctcccggccatcgcccgcctggtgcgccgcccgccagctctttgcccgcgcggggccgcccgccgcgggctcagggcagaccatgcgcccgccaagtccgctgcccgcccgctggctatgcgtgctggcaggcgccctcgcctgggcccttgggccggcgggcggccaggcggccaggctgcaggaggagtgtgactatgtgcagatgatcgaggtgcagcacaagcagtgcctggaggaggcccagctggagaatgagacaataggctgcagcaagatgtgggacaacctcacctgctggccagccacccctcggggccaggtagttgtcttggcctgtcccctcatcttcaagctcttctcctccattcaaggccgcaatgtaagccgcagctgcaccgacgaaggctggacgcacctggagcctggcccgtaccccattgcctgtggtttggatgacaaggcagcgagtttggatgagcagcagaccatgttctacggttctgtgaagaccggctacaccattggctacggcctgtccctcgccacccttctggtcgccacagctatcctgagcctgttcaggaagctccactgcacgcggaactacatccacatgcacctcttcatatccttcatcctgagggctgccgctgtcttcatcaaagacttggccctcttcgacagcggggagtcggaccagtgctccgagggctcggtgggctgtaaggcagccatggtctttttccaatattgtgtcatggctaacttcttctggctgctggtggagggcctctacctgtacaccctgcttgccgtctccttcttctctgagcggaagtacttctgggggtacatactcatcggctggggggtacccagcacattcaccatggtgtggaccatcgccaggatccattttgaggattatgggtgctgggacaccatcaactcctcactgtggtggatcataaagggccccatcctcacctccatcttggtaaacttcatcctgtttatttgcatcatccgaatcctgcttcagaaactgcggcccccagatatcaggaagagtgacagcagtccatactcaaggctagccaggtccacactcctgctgatccccctgtttggagtacactacatcatgttcgccttctttccggacaattttaagcctgaagtgaagatggtctttgagctcgtcgtggggtctttccagggttttgtggtggctatcctctactgcttcctcaatggtgaggtgcaggcggagctgaggcggaagtggcggcgctggcacctgcagggcgtcctgggctggaaccccaaataccggcacccgtcgggaggcagcaacggcgccacgtgcagcacgcaggtttccatgctgacccgcgtcagcccaggtgcccgccgctcctccagcttccaagccgaagtctccctggtctgaccaccaggatcccaggggcccaaggcggcccctcccgccccttcccactcaccccggcagacgccggggacagaggcctgcccgggcgcggccagccccggccctgggctcggaggctgcccccggccccctggtctctggtccggacactcctagagaacgcagccctagagcctgcctggagcgtttctagcaagtgagagagatgggagctcctctcctggaggattgcaggtggaactcagtcattagactcctcctccaaaggccccctacgccaatcaagggcaaaaagtctacatactttcatcctgactctgccccctgctggctcttctgcccaattggaggaaagcaaccggtggatcctcaaacaacactggtgtgacctgagggcagaaaggttctgcccggggaaggtcaccagcaccaacaccacggtagtgcctgaaatttcaccattgctgtcaagttcctttgggttaagcattaccactcaggcatttgactgaagatgcagctcactaccctattctctctttacgcttagttatcagctttttaaagtgggttattctggagtttttgtttggagagcacacctatcttagtggttccccaccgaagtggactggcccctgggtcagtctggtgggaggacggtgcaacccaaggactgagggactctgaagcctctgggaaatgagaaggcagccaccagcgaatgctaggtctcggactaagcctacctgctctccaagtctcagtggcttcatctgtcaagtgggatctgtcacaccagccatacttatctctctgtgctgtggaagcaacaggaatcaagagctgccctccttgtccacccacctatgtgccaactgttgtaactaggctcagagatgtgcacccatgggctctgacagaaagcagatacctcaccctgctacacatacaggatttgaactcagatctgtctgataggaatgtgaaagcacggactcttactgctaacttttgtgtatcgtaaccagccagatcctcttggttatttgtttaccacttgtattattaatgccattatcctgaattccccttgccaccccaccctccctggcgtgtggctgaggaggcctccatctcatgtatcatctggataggagcctgctggtcacagcctcctctgtctgcccttcaccccagtggccactcagcttcctacccacacctctgccagaagatcccctcaggactgcaacaggcttgtgcaacaataaatgttggcttgga

SEQ ID NO: 1515 - protein, 457 aa, Homo sapien
MRPPSPLPARWLCVLAGALAWALGPAGGQAARLQEECDYVQMIEVQHKQCLEEAQLENETIGCSKMWDNLTCWPATPRGQVVVLACPLIFKLFSSIQGRNVSRSCTDEGWTHLEPGPYPIACGLDDKAASLDEQQTMFYGSVKTGYTIGYGLSLATLLVATAILSLFRKLHCTRNYIHMHLFISFILRAAAVFIKDLALFDSGESDQCSEGSVGCKAAMVFFQYCVMANFFWLLVEGLYLYTLLAVSFFSERKYFWGYILIGWGVPSTFTMVWTIARIHFEDYGCWDTINSSLWWIIKGPILTSILVNFILFICIIRILLQKLRPPDIRKSDSSPYSRLARSTLLLIPLFGVHYIMFAFFPDNFKPEVKMVFELVVGSFQGFVVAILYCFLNGEVQAELRRKWRRWHLQGVLGWNPKYRHPSGGSNGATCSTQVSMLTRVSPGARRSSSFQAEVSLV

SEQ ID NO: 1516 - DNA, 2254 bp, Homo sapien
gggaattctgaaagccgctggcggaccgcgcgcagcggccagagaccgagccctaaggagagtgcggcgcttcccgaggcgtgcagctgggaactgcaactcatctgggttgtgcgcagaaggctggggcaagcgagtagagaagtggagcgtaagccaggggcgttgggggccgtgcgggtcgggcgcgtgccacgcccgcggggtgaagtcggagcgcggggcctgctggagagaggagcgctgcggaccgagtaatggcaatgcagatgcagcttgaagcaaatgcagatacttcagtggaagaagaaagctttggcccacaacccatttcacggttagagcagtgtggcataaatgccaacgatgtgaagaaattggaagaagctggattccatactgtggaggctgttgcctatgcgccaaagaaggagctaataaatattaagggaattagtgaagccaaagctgataaaattctggctgaggcagctaaattagttccaatgggtttcaccactgcaactgaattccaccaaaggcggtcagagatcatacagattactactggctccaaagagcttgacaaactacttcaaggtggaattgagactggatctatcacagaaatgtttggagaattccgaactgggaagacccagatctgtcatacgctagctgtcacctgccagcttcccattgaccggggtggaggtgaaggaaaggccatgtacattgacactgagggtacctttaggccagaacggctgctggcagtggctgagaggtatggtctctctggcagtgatgtcctggataatgtagcatatgctcgagcgttcaacacagaccaccagacccagctcctttatcaagcatcagccatgatggtagaatctaggtatgcactgcttattgtagacagtgccaccgccctttacagaacagactactcgggtcgaggtgagctttcagccaggcagatgcacttggccaggtttctgcggatgcttctgcgactcgctgatgagtttggtgtagcagtggtaatcactaatcaggtggtagctcaagtggatggagcagcgatgtttgctgctgatcccaaaaaacctattggaggaaatatcatcgcccatgcatcaacaaccagattgtatctgaggaaaggaagaggggaaaccagaatctgcaaaatctacgactctccctgtcttcctgaagctgaagctatgttcgccattaatgcagatggagtgggagatgccaaagactgaatcattgggtttttcctctgttaaaaaccttaagtgctgcagcctaatgagagtgcactgctccctggggttctctacaggcctcttcctgttgtgactgccaggataaagcttccgggaaaacagctattatatcagcttttctgatggtataaacaggagacaggtcagtagtcacaaactgatctaaaatgtttattccttctgtagtgtattaatctctgtgtgttttctttggttttggaggaggggtatgaagtatctttgacatggtgccttaggaatgacttgggtttaacaagctgtctactggacaatcttatgtttccaagagaactaaagctggagagacctgacccttctctcacttctaaattaatggtaaaataaaatgcctcagctatgtagcaaagggaatgggtctgcacagattctttttttctgtcagtaaaactctcaagcaggtttttaagttgtctgtctgaatgatcttgtgtaagggtttggttatggagtcttgtgccaaacctactaggccattagcccttcaccatctacctgcttggtctttcattgctaagactaactcaagataatcctagagtcttaaagcatttcaggccagtgtggtgtcttgcgcctgtactcccagcactttgggaggccgaggcaggtggatcgcttgagccaggagttttaagtccagcttggccaagatggtgaaatcccatctctacaaaaaatgcagaacttaatctggacacactgttacacgtgcctgtagtcccagctactctatagcctgaggtgggagaatcacttaagcctggaaggtggaagttgcagtgagtcgagattgcactgctgcattccagccagggtgacagagtgagaccatgtttcaaacaagaaacatttcagagggcaagtaaacagatttgattgtgaggcttctaataaagtagttattagtagtg

SEQ ID NO: 1517 - protein, 242 aa, Homo sapien
MAMQMQLEANADTSVEEESFGPQPISRLEQCGINANDVKKLEEAGFHTVEAVAYAPKKELINIKGISEAKADKILAVAERYGLSGSDVLDNVAYARAFNTDHQTQLLYQASAMMVESRYALLIVDSATALYRTDYSGRGELSARQMHLARFLRMLLRLADEFGVAVVITNQVVAQVDGAAMFAADPKKPIGGNIIAHASTTRLYLRKGRGETRICKIYDSPCLPEAEAMFAINADGVGDAKD

SEQ ID NO: 1518 - DNA, 3096 bp, Homo sapien
cgggcgcccagagggcaaatgaggggcggcggggtggcgggtcggggggagacgcggaatttcccagcgcgggggctctggcttaccctgcaaccgggcagtctctttctgtttacggagagaaaggggaaatggaaaagtcggggaggcggtggctggcgtccgctgcgccgcccctgggcaggctcagacgccgtgagtcaggggcagagcagggcggtctgagcgtgcgggcgacgcgggtctcactcgtccgctccgctctggactgcgcgccacgctctggggtccggcgccctggttcctgcttctgccgctgccgccgccggatcccagtggcccggcgtgctcggctcccacaggcctgcagccagcatcgcaccgaaccttcggggggccgcggctggagcgctcggccggcgtgggagcgccaaggccgcagatgcaatcttcttaccgcgaagaagccaggggaataggtagccacatcttgtttgcagataagaaaggaagctaacgcagtatctgcaaagccaggagtctgactcagtacttttctcactcatgcatacaaagcagctaaaaatgacacagcttatttaccatgcccctgacactgcactgagcactttatgagcttgaactctgttaatcctcacgaccacctcatgagactctccagaaagagcaacagtaatggagtacatgagcactggaagtgacaataaagaagagattgatttattaattaaacatttaaatgtgtctgatgtaatagacattatggaaaatctttatgcaagtgaagagccagcagtttatgaacccagtctaatgaccatgtgtcaagacagtaatcaaaacgatgagcgttctaagtctctgctgcttagtggccaagaggtaccatggttgtcatcagtcagatatggaactgtggaggatttgcttgcttttgcaaaccatatatccaacactgcaaagcatttttatggacaacgaccacaggaatctggaattttattaaacatggtcatcactccccaaaatggacgttaccaaatagattccgatgttctcctgatcccctggaagctgacttacaggaatattggttctgattttattcctcggggcgcctttggaaaggtatacttggcacaagatataaagacgaagaaaagaatggcgtgtaaactgatcccagtagatcaatttaagccatctgatgtggaaatccaggcttgcttccggcacgagaacatcgcagagctgtatggcgcagtcctgtggggtgaaactgtccatctctttatggaagcaggcgagggagggtctgttctggagaaactggagagctgtggaccaatgagagaatttgaaattatttgggtgacaaagcatgttctcaagggacttgattttctacactcaaagaaagtgatccatcatgatattaaacctagcaacattgttttcatgtccacaaaagctgttttggtggattttggcctaagtgttcaaatgaccgaagatgtctattttcctaaggacctccgaggaacagagatttacatgagcccagaggtcatcctgtgcaggggccattcaaccaaagcagacatctacagcctgggggccacgctcatccacatgcagacgggcaccccaccctgggtgaagcgctaccctcgctcagcctatccctcctacctgtacataatccacaagcaagcacctccactggaagacattgcagatgactgcagtccagggatgagagagctgatagaagcttccctggagagaaaccccaatcaccgcccaagagccgcagacctactaaaacatgaggccctgaacccgcccagagaggatcagccacgctgtcagagtctggactctgccctcttggagcgcaagaggctgctgagtaggaaggagctggaacttcctgagaacattgctgattcttcgtgcacaggaagcaccgaggaatctgagatgctcaagaggcaacgctctctctacatcgacctcggcgctctggctggctacttcaatcttgttcggggaccaccaacgcttgaatatggctgaaggatgccatgtttgctctaaattaagacagcattgatctcctggaggctggttctgctgcctctacacaggggccctgtacagtgaatggtgccattttcgaaggagcagtgtgacctcctgtgacccatgaatgtgcctccaagcggccctgtgtgtttgacatgtgaagctatttgatatgcaccaggtctcaaggttctcatttctcaggtgacgtgattctaaggcaggaatttgagagttcacagaaggatcgtgtctgctgactgtttcattcactgtgcactttgctcaaaattttaaaaataccaatcacaaggataatagagtagcctaaaattactattcttggttcttatttaagtatggaatattcattttactcagaatagctgttttgtgtatattggtgtatattatataactctttgagcctttattggtaaattctggtatacattgaattcattataatttgggtgactagaacaacttgaagattgtagcaataagctggactagtgtcctaaaaatggctaactgatgaattagaagccatctgacagcaggccactagtgacagtttcttttgtgttcctatggaaacattttatactgtacatgctatgctgaagacattcaaaacgtgatgttttgaatgtggataaaactgtgtaaaccacataatttttgtacatcccaaaggatgagaatgtgacctttaagaaaaatgaaaacttttgtaaattattgatgattttgtaattcttatgactaaattttcttttaagcatttgtatattaaaatagcatactgtgtatgttttatatcaaatgccttcatgaatctttcatacatatatatatttgtaacattgtaaagtatgtgagtagtcttatgtaaagtatgtttttacattatgcaaataaaacccaatacttttgtccaatgtggttggtcaaatcaactgaataaattcagtattttgcctt

SEQ ID NO: 1519 - protein, 467 aa, Homo sapien
MEYMSTGSDNKEEIDLLIKHLNVSDVIDIMENLYASEEPAVYEPSLMTMCQDSNQNDERSKSLLLSGQEVPWLSSVRYGTVEDLLAFANHISNTAKHFYGQRPQESGILLNMVITPQNGRYQIDSDVLLIPWKLTYRNIGSDFIPRGAFGKVYLAQDIKTKKRMACKLIPVDQFKPSDVEIQACFRHENIAELYGAVLWGETVHLFMEAGEGGSVLEKLESCGPMREFEIIWVTKHVLKGLDFLHSKKVIHHDIKPSNIVFMSTKAVLVDFGLSVQMTEDVYFPKDLRGTEIYMSPEVILCRGHSTKADIYSLGATLIHMQTGTPPWVKRYPRSAYPSYLYIIHKQAPPLEDIADDCSPGMRELIEASLERNPNHRPRAADLLKHEALNPPREDQPRCQSLDSALLERKRLLSRKELELPENIADSSCTGSTEESEMLKRQRSLYIDLGALAGYFNLVRGPPTLEYG

SEQ ID NO: 1520 - DNA, 487 bp, Homo sapien
ccttgctatagaagacctgggacagaggactgctgtctgccctctctggtcaccctgcctagctagaggatctgtgaccccagccatgaggaccctcgccatccttgctgccattctcctggtggccctgcaggcccaggctgagccactccaggcaagagctgatgaggttgctgcagccccggagcagattgcagcggacatcccagaagtggttgtttcccttgcatgggacgaaagcttggctccaaagcatccaggctcaaggaaaaacatggactgctattgcagaataccagcgtgcattgcaggagaacgtcgctatggaacctgcatctaccagggaagactctgggcattctgctgctgagcttgcagaaaaagaaaaatgagctcaaaatttgctttgagagctacagggaattgctattactcctgtaccttctgctcaatttcctttcctcatctcaaataaatgccttgttac

SEQ ID NO: 1521 - protein, 94 aa, Homo sapien
MRTLAILAAILLVALQAQAEPLQARADEVAAAPEQIAADIPEVVVSLAWDESLAPKHPGSRKNMDCYCRIPACIAGERRYGTCIYQGRLWAFCC

SEQ ID NO: 1522 - DNA, 2748 bp, Homo sapien
agcgggtgcggggcgggaccggcccggcctatatattgggttggcgccggcgccagctgagccgagcggtagctggtctggcgaggttttatacacctgaaagaagagaatgtcaagacgaagtagccgtttacaagctaagcagcagccccagcccagccagacggaatccccccaagaagcccagataatccaggccaagaagaggaaaactacccaggatgtcaaaaaaagaagagaggaggtcaccaagaaacatcagtatgaaattaggaattgttggccacctgtattatctggggggatcagtccttgcattatcattgaaacacctcacaaagaaataggaacaagtgatttctccagatttacaaattacagatttaaaaatctttttattaatccttcacctttgcctgatttaagctggggatgttcaaaagaagtctggctaaacatgttaaaaaaggagagcagatatgttcatgacaaacattttgaagttctgcattctgacttggaaccacagatgaggtccatacttctagactggcttttagaggtatgtgaagtatacacacttcatagggaaacattttatcttgcacaagacttttttgatagatttatgttgacacaaaaggatataaataaaaatatgcttcaactcattggaattacctcattattcattgcttccaaacttgaggaaatctatgctcctaaactccaagagtttgcttacgtcactgatggtgcttgcagtgaagaggatatcttaaggatggaactcattatattaaaggctttaaaatgggaactttgtcctgtaacaatcatctcctggctaaatctctttctccaagttgatgctcttaaagatgctcctaaagttcttctacctcagtattctcaggaaacattcattcaaatagctcagcttttagatctgtgtattctagccattgattcattagagttccagtacagaatactgactgctgctgccttgtgccattttacctccattgaagtggttaagaaagcctcaggtttggagtgggacagtatttcagaatgtgtagattggatggtaccttttgtcaatgtagtaaaaagtactagtccagtgaagctgaagacttttaagaagattcctatggaagacagacataatatccagacacatacaaactatttggctatgctggaggaagtaaattacataaacaccttcagaaaagggggacagttgtcaccagtgtgcaatggaggcattatgacaccaccgaagagcactgaaaaaccaccaggaaaacactaaagaagataactaagcaaacaagttggaattcaccaagattgggtagaactggtatcactgaactactaaagttttacagaaagtagtgctgtgattgattgccctagccaattcacaagttacactgccattctgattttaaaacttacaattggcactaaagaatacatttaattatttcctatgttagctgttaaagaaacagcaggacttgtttacaaagatgtcttcattcccaaggttactggatagaagccaaccacagtctataccatagcaatgtttttcctttaatccagtgttactgtgtttatcttgataaactaggaattttgtcactggagttttggactggataagtgctaccttaaagggtatactaagtgatacagtactttgaatctagttgttagattctcaaaattcctacactcttgactagtgcaatttggttcttgaaaattaaatttaaacttgtttacaaaggtttagttttgtaataaggtgactaatttatctatagctgctatagcaagctattataaaacttgaatttctacaaatggtgaaatttaatgttttttaaactagtttatttgccttgccataacacattttttaactaataaggcttagatgaacatggtgttcaacctgtgctctaaacagtgggagtaccaaagaaattataaacaagataaatgctgtggctccttcctaactggggctttcttgacatgtaggttgcttggtaataacctttttgtatatcacaatttgggtgaaaaacttaagtaccctttcaaactatttatatgaggaagtcactttactactctaagatatccctaaggaatttttttttttaatttagtgtgactaaggctttatttatgtttgtgaaactgttaaggtcctttctaaattcctccattgtgagataaggacagtgtcaaagtgataaagcttaacacttgacctaaacttctattttcttaaggaagaagagtattaaatatatactgactcctagaaatctatttattaaaaaaagacatgaaaacttgctgtacataggctagctatttctaaatattttaaattagcttttctaaaaaaaaaatccagcctcataaagtagattagaaaactagattgctagtttattttgttatcagatatgtgaatctcttctccctttgaagaaactatacatttattgttacggtatgaagtcttctgtatagtttgtttttaaactaatatttgtttcagtattttgtctgaaaagaaaacaccactaattgtgtacatatgtattatataaacttaaccttttaatactgtttatttttagcccattgtttaaaaaataaaagttaaaaaaatttaactgcttaaaagtaaaaaaaaaaaaaaaaaaa

SEQ ID NO: 1523 - protein, 404 aa, Homo sapien
MSRRSSRLQAKQQPQPSQTESPQEAQIIQAKKRKTTQDVKKRREEVTKKHQYEIRNCWPPVLSGGISPCIIIETPHKEIGTSDFSRFTNYRFKNLFINPSPLPDLSWGCSKEVWLNMLKKESRYVHDKHFEVLHSDLEPQMRSILLDWLLEVCEVYTLHRETFYLAQDFFDRFMLTQKDINKNMLQLIGITSLFIASKLEEIYAPKLQEFAYVTDGACSEEDILRMELIILKALKWELCPVTIISWLNLFLQVDALKDAPKVLLPQYSQETFIQIAQLLDLCILAIDSLEFQYRILTAAALCHFTSIEVVKKASGLEWDSISECVDWMVPFVNVVKSTSPVKLKTFKKIPMEDRHNIQTHTNYLAMLEEVNYINTFRKGGQLSPVCNGGIMTPPKSTEKPPGKH

SEQ ID NO: 1524 - DNA, 8257 bp, Homo sapien
taaatttaaaggcggggcggcctgtgagccctgaagtgccggccgcggagggtcctggccattttggtgggaccagttcagcctgataggatggcggaggaaggagccgtggccgtctgcgtgcgagtgcggccgctgaacagcagagaagaatcacttggagaaactgcccaagtttactggaaaactgacaataatgtcatttatcaagttgatggaagtaaatccttcaattttgatcgtgtctttcatggtaatgaaactaccaaaaatgtgtatgaagaaatagcagcaccaatcatcgattctgccatacaaggctacaatggtactatatttgcctatggacagactgcttcaggaaaaacatataccatgatgggttcagaagatcatttgggagttatacccagggcaattcatgacattttccaaaaaattaagaagtttcctgatagggaatttctcttacgtgtatcttacatggaaatatacaatgaaaccattacagatttactctgtggcactcaaaaaatgaaacctttaattattcgagaagatgtcaataggaatgtgtatgttgctgatctcacagaagaagttgtatatacatcagaaatggctttgaaatggattacaaagggagaaaagagcaggcattatggagaaacaaaaatgaatcaaagaagcagtcgttctcataccatctttaggatgattttggaaagcagagagaagggtgaaccttctaattgtgaaggatctgttaaggtatcccatttgaatttggttgatcttgcaggcagtgaaagagctgctcaaacaggcgctgcaggtgtgcggctcaaggaaggctgtaatataaatcgaagcttatttattttgggacaagtgatcaagaaacttagtgatggacaagttggtggtttcataaattatcgagatagcaagttaacacgaattcttcagaattccttgggaggaaatccaaagacacgtattatctgcacaattactccagtatcttttgatgaaactcttactgctctccagtttgccagtactgctaaatatatgaagaatactccttatgttaatgaggtatcaactgatgaagctctcctgaaaaggtatagaaaagaaataatggatcttaaaaaacaattagaggaggtttctttagagacgcgggctcaggcaatggaaaaagaccaattggcccaacttttggaagaaaaagatttgcttcagaaagtacagaatgagaaaattgaaaacttaacacggatgctggtgacctcttcttccctcacgttgcaacaggaattaaaggctaaaagaaaacgaagagttacttggtgccttggcaaaattaacaaaatgaagaactcaaactatgcagatcaatttaatataccaacaaatataacaacaaaaacacataagctttctataaatttattacgagaaattgatgaatctgtctgttcagagtctgatgttttcagtaacactcttgatacattaagtgagatagaatggaatccagcaacaaagctactaaatcaggagaatatagaaagtgagttgaactcacttcgtgctgactatgataatctggtattagactatgaacaactacgaacagaaaaagaagaaatggaattgaaattaaaagaaaagaatgatttggatgaatttgaggctctagaaagaaaaactaaaaaagatcaagagatgcaactaattcatgaaatttcgaacttaaagaatttagttaagcatcgagaagtatataatcaagatcttgagaatgaactcagttcaaaagtagagctgcttagagaaaaggaagaccagattaagaagctacaggaatacatagactctcaaaagctagaaaatataaaaatggacttgtcatactcattggaaagcattgaagacccaaaacaaatgaagcagactctgtttgatgctgaaactgtagcccttgatgccaagagagaatcagcctttcttagaagtgaaaatctggagttgaaggagaaaatgaaagaacttgcaactacatacaagcaaatggaaaatgatattcagttatatcaaagccaattggaggcaaaaaagaaaatgcaagttgatctggagaaagaattacaatctgcttttaatgagataacaaaactcacctcccttatagatggcaaagttccaaaagatttgctctgtaatttggaattggaaggaaagattactgatcttcagaaagaactaaataaagaagttgaagaaaatgaagctttgcgggaagaagtcattttgctttcagaattgaaatctttaccttctgaagtagaaaggctgaggaaagagatacaagacaaatctgaagagctccatataataacatcagaaaaagataaattgttttctgaagtagttcataaggagagtagagttcaaggtttacttgaagaaattgggaaaacaaaagatgacctagcaactacacagtcgaattataaaagcactgatcaagaattccaaaatttcaaaacccttcatatggactttgagcaaaagtataagatggtccttgaggagaatgagagaatgaatcaggaaatagttaatctctctaaagaagcccaaaaatttgattcgagtttgggtgctttgaagaccgagctttcttacaagacccaagaacttcaggagaaaacacgtgaggttcaagaaagactaaatgagatggaacagctgaaggaacaattagaaaatagagattctccgctgcaaactgtagaaagggagaaaacactgattactgagaaactgcagcaaactttagaagaagtaaaaactttaactcaagaaaaagatgatctaaaacaactccaagaaagcttgcaaattgagagggaccaactcaaaagtgatattcacgatactgttaacatgaatatagatactcaagaacaattacgaaatgctcttgagtctctgaaacaacatcaagaaacaattaatacactaaaatcgaaaatttctgaggaagtttccaggaatttgcatatggaggaaaatacaggagaaactaaagatgaatttcagcaaaagatggttggcatagataaaaaacaggatttggaagctaaaaatacccaaacactaactgcagatgttaaggataatgagataattgagcaacaaaggaagatattttctttaatacaggagaaaaatgaactccaacaaatgttagagagtgttatagcagaaaaggaacaattgaagactgacctaaaggaaaatattgaaatgaccattgaaaaccaggaagaattaagacttcttggggatgaacttaaaaagcaacaagagatagttgcacaagaaaagaaccatgccataaagaaagaaggagagctttctaggacctgtgacagactggcagaagttgaagaaaaactaaaggaaaagagccagcaactccaagaaaaacagcaacaacttcttaatgtacaagaagagatgagtgagatgcagaaaaagattaatgaaatagagaatttaaagaatgaattaaagaacaaagaattgacattggaacatatggaaacagagaggcttgagttggctcagaaacttaatgaaaattatgaggaagtgaaatctataaccaaagaaagaaaagttctaaaggaattacagaagtcatttgaaacagagagagaccaccttagaggatatataagagaaattgaagctacaggcctacaaaccaaagaagaactaaaaattgctcatattcacctaaaagaacaccaagaaactattgatgaactaagaagaagcgtatctgagaagacagctcaaataataaatactcaggacttagaaaaatcccataccaaattacaagaagagatcccagtgcttcatgaggaacaagagttactgcctaatgtgaaaaaagtcagtgagactcaggaaacaatgaatgaactggagttattaacagaacagtccacaaccaaggactcaacaacactggcaagaatagaaatggaaaggctcaggttgaatgaaaaatttcaagaaagtcaggaagagataaaatctctaaccaaggaaagagacaaccttaaaacgataaaagaagcccttgaagttaaacatgaccagctgaaagaacatattagagaaactttggctaaaatccaggagtctcaaagcaaacaagaacagtccttaaatatgaaagaaaaagacaatgaaactaccaaaatcgtgagtgagatggagcaattcaaacccaaagattcagcactactaaggatagaaatagaaatgctcggattgtccaaaagacttcaagaaagtcatgatgaaatgaaatctgtagctaaggagaaagatgacctacagaggctgcaagaagttcttcaatctgaaagtgaccagctcaaagaaaacataaaagaaattgtagctaaacacctggaaactgaagaggaacttaaagttgctcattgttgcctgaaagaacaagaggaaactattaatgagttaagagtgaatctttcagagaaggaaactgaaatatcaaccattcaaaagcagttagaagcaatcaatgataaattacagaacaagatccaagagatttatgagaaagaggaacaacttaatataaaacaaattagtgaggttcaggaaaacgtgaatgaactgaaacaattcaaggagcatcgcaaagccaaggattcagcactacaaagtatagaaagtaagatgctcgagttgaccaacagacttcaagaaagtcaagaagaaatacaaattatgattaaggaaaaagaggaaatgaaaagagtacaggaggcccttcagatagagagagaccaactgaaagaaaacactaaagaaattgtagctaaaatgaaagaatctcaagaaaaagaatatcagtttcttaagatgacagctgtcaatgagactcaggagaaaatgtgtgaaatagaacacttgaaggagcaatttgagacccagaagttaaacctggaaaacatagaaacggagaatataaggttgactcagatactacatgaaaaccttgaagaaatgagatctgtaacaaaagaaagagatgaccttaggagtgtggaggagactctcaaagtagagagagaccagctcaaggaaaaccttagagaaactataactagagacctagaaaaacaagaggagctaaaaattgttcacatgcatctgaaggagcaccaagaaactattgataaactaagagggattgtttcagagaaaacaaatgaaatatcaaatatgcaaaaggacttagaacactcaaatgatgccttaaaagcacaggatctgaaaatacaagaggaactaagaattgctcacatgcatctgaaagagcagcaggaaactattgacaaactcagaggaattgtttctgagaagacagataaactatcaaatatgcaaaaagatttagaaaattcaaatgctaaattacaagaaaagattcaagaacttaaggcaaatgaacatcaacttattacgttaaaaaaagatgtcaatgagacacagaaaaaagtgtctgaaatggagcaactaaagaaacaaataaaagaccaaagcttaactctgagtaaattagaaatagagaatttaaatttggctcaagaacttcatgaaaaccttgaagaaatgaaatctgtaatgaaagaaagagataatctaagaagagtagaggagacactcaaactggagagagaccaactcaaggaaagcctgcaagaaaccaaagctagagatctggaaatacaacaggaactaaaaactgctcgtatgctatcaaaagaacacaaagaaactgttgataaacttagagaaaaaatttcagaaaagacaattcaaatttcagacattcaaaaggatttagataaatcaaaagatgaattacagaaaaagatccaagaacttcagaaaaaagaacttcaactgcttagagtgaaagaagatgtcaatatgagtcataaaaaaattaatgaaatggaacagttgaagaagcaatttgagccaaactatctatgcaagtgtgagatggataacttccagttgactaagaaacttcatgaaagccttgaagaaataagaattgtagctaaagaaagagatgagctaaggaggataaaagaatctctcaaaatggaaagggaccaattcatagcaaccttaagggaaatgatagctagagaccgacagaaccaccaagtaaaacctgaaaaaaggttactaagtgatggacaacagcaccttatggaaagcctgagagaaaagtgctctagaataaaagagcttttgaagagatactcagagatggatgatcattatgagtgcttgaatagattgtctcttgacttggagaaggaaattgaattccacagaatcatgaagaaactgaagtatgtgttaagctatgttacaaaaataaaagaagaacaacatgaatgcatcaataaatttgaaatggattttattgatgaagtggaaaagcaaaaggaattgctaattaaaatacagcaccttcaacaagattgtgatgtaccatccagagaattaagggatctcaaattgaaccagaatatggatctacatattgaggaaattctcaaagatttctcagaaagtgagttccctagcataaagactgaatttcaacaagtactaagtaataggaaagaaatgacacagtttttggaagagtggttaaatactcgttttgatatagaaaagcttaaaaatggcatccagaaagaaaatgataggatttgtcaagtgaataacttctttaataacagaataattgccataatgaatgaatcaacagagtttgaggaaagaagtgctaccatatccaaagagtgggaacaggacctgaaatcactgaaagagaaaaatgaaaaactatttaaaaactaccaaacattgaagacttccttggcatctggtgcccaggttaatcctaccacacaagacaataagaatcctcatgttacatcaagagctacacagttaaccacagagaaaattcgagagctggaaaattcactgcatgaagctaaagaaagtgctatgcataaggaaagcaagattataaagatgcagaaagaacttgaggtgactaatgacataatagcaaaacttcaagccaaagttcatgaatcaaataaatgccttgaaaaaacaaaagagacaattcaagtacttcaggacaaagttgctttaggagctaagccatataaagaagaaattgaagatctcaaaatgaagcttgtgaaaatagacctagagaaaatgaaaaatgccaaagaatttgaaaaggaaatcagtgctacaaaagccactgtagaatatcaaaaggaagttataaggctattgagagaaaatctcagaagaagtcaacaggcccaagatacctcagtgatatcagaacatactgatcctcagccttcaaataaacccttaacttgtggaggtggcagcggcattgtacaaaacacaaaagctcttattttgaaaagtgaacatataaggctagaaaaagaaatttctaagttaaagcagcaaaatgaacagctaataaaacaaaagaatgaattgttaagcaataatcagcatctttccaatgaggtcaaaacttggaaggaaagaacccttaaaagagaggctcacaaacaagtaacttgtgagaattctccaaagtctcctaaagtgactggaacagcttctaaaaagaaacaaattacaccctctcaatgcaaggaacggaatttacaagatcctgtgccaaaggaatcaccaaaatcttgtttttttgatagccgatcaaagtctttaccatcacctcatccagttcgctattttgataactcaagtttaggcctttgtccagaggtgcaaaatgcaggagcagagagtgtggattctcagccaggtccttggcacgcctcctcaggcaaggatgtgcctgagtgcaaaactcagtagactcctctttgtcacttctctggagatccagcattccttatttggaaatgactttgtttatgtgtctatccctggtaatgatgttgtagtgcagcttaatttcaattcagtctttactttgccactagagttgaaagataagggaacaggaaatgaatgcattgtggtaatttag

SEQ ID NO: 1525 - protein, 2000 aa, Homo sapien
MAEEGAVAVCVRVRPLNSREESLGETAQVYWKTDNNVIYQVDGSKSFNFDRVFHGNETTKNVYEEIAAPIIDSAIQGYNGTIFAYGQTASGKTYTMMGSEDHLGVIPRAIHDIFQKIKKFPDREFLLRVSYMEIYNETITDLLCGTQKMKPLIIREDVNRNVYVADLTEEVVYTSEMALKWITKGEKSRHYGETKMNQRSSRSHTIFRMILESREKGEPSNCEGSVKVSHLNLVDLAGSERAAQTGAAGVRLKEGCNINRSLFILGQVIKKLSDGQVGGFINYRDSKLTRILQNSLGGNPKTRIICTITPVSFDETLTALQFASTAKYMKNTPYVNEVSTDEALLKRYRKEIMDLKKQLEEVSLETRAQAMEKDQLAQLLEEKDLLQKVQNEKIENLTRMLVTSSSLTLQQELKAKRKRRVTWCLGKINKMKNSNYADQFNIPTNITTKTHKLSINLLREIDESVCSESDVFSNTLDTLSEIEWNPATKLLNQENIESELNSLRADYDNLVLDYEQLRTEKEEMELKLKEKNDLDEFEALERKTKKDQEMQLIHEISNLKNLVKHREVYNQDLENELSSKVELLREKEDQIKKLQEYIDSQKLENIKMDLSYSLESIEDPKQMKQTLFDAETVALDAKRESAFLRSENLELKEKMKELATTYKQMENDIQLYQSQLEAKKKMQVDLEKELQSAFNEITKLTSLIDGKVPKDLLCNLELEGKITDLQKELNKEVEENEALREEVILLSELKSLPSEVERLRKEIQDKSEELHIITSEKDKLFSEVVHKESRVQGLLEEIGKTKDDLATTQSNYKSTDQEFQNFKTLHMDFEQKYKMVLEENERMNQEIVNLSKEAQKFDSSLGALKTELSYKTQELQEKTREVQERLNEMEQLKEQLENRDSPLQTVEREKTLITEKLQQTLEEVKTLTQEKDDLKQLQESLQIERDQLKSDIHDTVNMNIDTQEQLRNALESLKQHQETINTLKSKISEEVSRNLHMEENTGETKDEFQQKMVGIDKKQDLEAKNTQTLTADVKDNEIIEQQRKIFSLIQEKNELQQMLESVIAEKEQLKTDLKENIEMTIENQEELRLLGDELKKQQEIVAQEKNHAIKKEGELSRTCDRLAEVEEKLKEKSQQLQEKQQQLLNVQEEMSEMQKKINEIENLKNELKNKELTLEHMETERLELAQKLNENYEEVKSITKERKVLKELQKSFETERDHLRGYIREIEATGLQTKEELKIAHIHLKEHQETIDELRRSVSEKTAQIINTQDLEKSHTKLQEEIPVLHEEQELLPNVKKVSETQETMNELELLTEQSTTKDSTTLARIEMERLRLNEKFQESQEEIKSLTKERDNLKTIKEALEVKHDQLKEHIRETLAKIQESQSKQEQSLNMKEKDNETTKIVSEMEQFKPKDSALLRIEIEMLGLSKRLQESHDEMKSVAKEKDDLQRLQEVLQSESDQLKENIKEIVAKHLETEEELKVAHCCLKEQEETINELRVNLSEKETEISTIQKQLEAINDKLQNKIQEIYEKEEQLNIKQISEVQENVNELKQFKEHRKAKDSALQSIESKMLELTNRLQESQEEIQIMIKEKEEMKRVQEALQIERDQLKENTKEIVAKMKESQEKEYQFLKMTAVNETQEKMCEIEHLKEQFETQKLNLENIETENIRLTQILHENLEEMRSVTKERDDLRSVEETLKVERDQLKENLRETITRDLEKQEELKIVHMHLKEHQETIDKLRGIVSEKTNEISNMQKDLEHSNDALKAQDLKIQEELRIAHMHLKEQQETIDKLRGIVSEKTDKLSNMQKDLENSNAKLQEKIQELKANEHQLITLKKDVNETQKKVSEMEQLKKQIKDQSLTLSKLEIENLNLAQELHENLEEMKSVMKERDNLRRVEETLKLERDQLKESLQETKARDLEIQQELKTARMLSKEHKETVDKLREKISEKTIQISDIQKDLDKSKDELQKKIQELQKKELQLLRVKEDVNMSHKKINEME

SEQ ID NO: 1526 - DNA, 1994 bp, Homo sapien
aaacttcccgcacgcgttacaggagccaggtcggtataagcgccagcggcctcgccgcccgtcaagctgtccacatccctggcctcagcccgccacatcaccctgacctgcttacgcccagattttcttcaatcacatctgaataaatcacttgaagaaagcttatagcttcattgcaccatgtgtggcatttgggcgctgtttggcagtgatgattgcctttctgttcagtgtctgagtgctatgaagattgcacacagaggtccagatgcattccgttttgagaatgtcaatggatacaccaactgctgctttggatttcaccggttggcggtagttgacccgctgtttggaatgcagccaattcgagtgaagaaatatccgtatttgtggctctgttacaatggtgaaatctacaaccataagaagatgcaacagcattttgaatttgaataccagaccaaagtggatggtgagataatccttcatctttatgacaaaggaggaattgagcaaacaatttgtatgttggatggtgtgtttgcatttgttttactggatactgccaataagaaagtgttcctgggtagagatacatatggagtcagacctttgtttaaagcaatgacagaagatggatttttggctgtatgttcagaagctaaaggtcttgttacattgaagcactccgcgactccctttttaaaagtggagccttttcttcctggacactatgaagttttggatttaaagccaaatggcaaagttgcatccgtggaaatggttaaatatcatcactgtcgggatgaacccctgcacgccctctatgacaatgtggagaaactctttccaggttttgagatagaaactgtgaagaacaacctcaggatcctttttaataatgctgtaaagaaacgtttgatgacagacagaaggattggctgccttttatcagggggcttggactccagcttggttgctgccactctgttgaagcagctgaaagaagcccaagtacagtatcctctccagacatttgcaattggcatggaagacagccccgatttactggctgctagaaaggtggcagatcatattggaagtgaacattatgaagtcctttttaactctgaggaaggcattcaggctctggatgaagtcatattttccttggaaacttatgacattacaacagttcgtgcttcagtaggtatgtatttaatttccaagtatattcggaagaacacagatagcgtggtgatcttctctggagaaggatcagatgaacttacgcagggttacatatattttcacaaggctccttctcctgaaaaagccgaggaggagagtgagaggcttctgagggaactctatttgtttgatgttctccgcgcagatcgaactactgctgcccatggtcttgaactgagagtcccatttctagatcatcgattttcttcctattacttgtctctgccaccagaaatgagaattccaaagaatgggatagaaaaacatctcctgagagagacgtttgaggattccaatctgatacccaaagagattctctggcgaccaaaagaagccttcagtgatggaataacttcagttaagaattcctggtttaagattttacaggaatacgttgaacatcaggttgatgatgcaatgatggcaaatgcagcccagaaatttcccttcaatactcctaaaaccaaagaaggatattactaccgtcaagtctttgaacgccattacccaggccgggctgactggctgagccattactggatgcccaagtggatcaatgccactgacccttctgcccgcacgctgacccactacaagtcagctgtcaaagcttaggtggtctttatgctgtaatgtgaaagcaaatatttcttcgtgttggatggggactgtgggtagataggggaacaatgagagtcaactcaggctaacttgggtgtgaaaaaaataaaagtcctaaatct

SEQ ID NO: 1527 - protein, 561 aa, Homo sapien
MCGIWALFGSDDCLSVQCLSAMKIAHRGPDAFRFENVNGYTNCCFGFHRLAVVDPLFGMQPIRVKKYPYLWLCYNGEIYNHKKMQQHFEFEYQTKVDGEIILHLYDKGGIEQTICMLDGVFAFVLLDTANKKVFLGRDTYGVRPLFKAMTEDGFLAVCSEAKGLVTLKHSATPFLKVEPFLPGHYEVLDLKPNGKVASVEMVKYHHCRDEPLHALYDNVEKLFPGFEIETVKNNLRILFNNAVKKRLMTDRRIGCLLSGGLDSSLVAATLLKQLKEAQVQYPLQTFAIGMEDSPDLLAARKVADHIGSEHYEVLFNSEEGIQALDEVIFSLETYDITTVRASVGMYLISKYIRKNTDSVVIFSGEGSDELTQGYIYFHKAPSPEKAEEESERLLRELYLFDVLRADRTTAAHGLELRVPFLDHRFSSYYLSLPPEMRIPKNGIEKHLLRETFEDSNLIPKEILWRPKEAFSDGITSVKNSWFKILQEYVEHQVDDAMMANAAQKFPFNTPKTKEGYYYRQVFERHYPGRADWLSHYWMPKWINATDPSARTLTHYKSAVKA

SEQ ID NO: 1528 - DNA, 1399 bp, Homo sapien
cttaccgtggcgagttccgcgctcaatggagacgtttgaccccaccgagctgcccgagctgcttaaactttattaccggaggctctttccctactctcagtactatcgctggctcaactacggtggagtgataaagaattactttcaacaccgtgaattttcattcacactgaaagatgatatttacattcgctaccaatccttcaacaaccagagtgatctggaaaaggagatgcagaaaatgaatccatacaagattgatataggcgcagtatattctcacagacccaatcaacacaatacagtgaagctgggagctttccaggctcaggaaaaagaactggtatttgacattgacatgacagactacgacgatgtgaggagatgttgtagttctgcagacatatgtcctaagtgctggaccctcatgacaatggccatacgcatcattgacagagcattgaaggaggactttggatttaagcatcgtctctgggtatattctggaaggagaggtgttcattgttgggtctgtgatgaatcagttagaaaactgtcttctgcagtacgttctgggatagttgagtatttgagccttgtaaagggtggtcaagacgttaaaaagaaagttcacctaagtgaaaaaattcacccttttatcagaaaatctataaacataataaaaaaatactttgaagaatatgccttggttaatcaagatattctcgaaaataaagaaagctgggataagattttagcccttgttcctgaaacaattcatgatgaacttcaacaaagcttccaaaagtctcacaattcacttcagcgttgggagcacttgaagaaagtagccagcagatatcagaataacatcaaaaatgacaaatatggaccctggctggagtgggagattatgctccagtactgttttccacggctggatatcaatgtcagcaaaggaatcaatcatctactgaagagcccttttagtgttcatcctaaaacaggtcgcatctctgtgcctattgatttgcagaaagtggaccagtttgatccatttactgttccgaccataagcttcatctgccgtgaattggatgccatttccactaatgaagaggaaaaagaggagaatgaagctgaatctgatgtcaaacatagaaccagagattataagaagaccagtctagcaccttatgtgaaagtttttgaacattttcttgaaaatctggataaatcccgaaaaggagaacttcttaagaagagtgatttacaaaaagatttctgaagacagagctcctcaaaccattgtggatatcttctgccttcaaccacagatcaaatacttcaagagccatttaataaatatggcagaactataaagaaaaaaaaaaaaagg

SEQ ID NO: 1529 - protein, 420 aa, Homo sapien
METFDPTELPELLKLYYRRLFPYSQYYRWLNYGGVIKNYFQHREFSFTLKDDIYIRYQSFNNQSDLEKEMQKMNPYKIDIGAVYSHRPNQHNTVKLGAFQAQEKELVFDIDMTDYDDVRRCCSSADICPKCWTLMTMAIRIIDRALKEDFGFKHRLWVYSGRRGVHCWVCDESVRKLSSAVRSGIVEYLSLVKGGQDVKKKVHLSEKIHPFIRKSINIIKKYFEEYALVNQDILENKESWDKILALVPETIHDELQQSFQKSHNSLQRWEHLKKVASRYQNNIKNDKYGPWLEWEIMLQYCFPRLDINVSKGINHLLKSPFSVHPKTGRISVPIDLQKVDQFDPFTVPTISFICRELDAISTNEEEKEENEAESDVKHRTRDYKKTSLAPYVKVFEHFLENLDKSRKGELLKKSDLQKDF

SEQ ID NO: 1530 - DNA, 3927 bp, Homo sapien
gaattccggcccccgtgtctgggcgtccgcctcctggcctcctggctgaggggaagctgagtgggccacggcccatgtgtcgcactcgcctcggctcccacacagccgcctctgctccagcaaggatgtggctcttccacactctgctctgcatagccagcctggccctgctggccgctttcaatgtggatgtggcccggccctggctcacgcccaagggaggtgcccctttcgtgctcagctcccttctgcaccaagaccccagcaccaaccagacctggctcctggtcaccagccccagaaccaagaggacaccagggcccctccatcgatgttcccttgtccaggatgaaatcctttgccatcctgtagagcatgtccccatccccaaggggaggcaccggggagtgaccgttgtccggagccaccacggtgttttgatatgcattcaagtgctggtccggcggcctcacagcctcagctcagaactcacaggcacctgtagcctcctgggccctgacctccgtccccaggctcaggccaacttcttcgaccttgaaaatctcctggatccagatgcacgtgtggacactggagactgctacagcaacaaagaaggcggtggagaagacgatgtgaacacagccaggcagcgccgggctctggagaaggaggaggaggaagacaaggaggaggaggaagacgaggaggaggaggaagctggcaccgagattgccatcatcctggatggctcaggaagcattgatcccccagactttcagagagccaaagacttcatctccaacatgatgaggaacttctatgaaaagtgttttgagtgcaactttgccttggtgcagtatggaggagtgatccagactgagtttgaccttcgggacagccaggatgtgatggcctccctcgccagagtccagaacatcactcaagtggggagtgtcaccaagactgcctcagccatgcaacacgtcttagacagcatcttcacctcaagccacggctccaggagaaaggcatccaaggtcatggtggtgctcaccgatggtggcatattcgaggaccccctcaaccttacgacagtcatcaactcccccaaaatgcagggtgttgagcgctttgccattggggtgggagaagaatttaagagtgctaggactgcgagggaactgaacctgatcgcctcagacccggatgagacccatgctttcaaggtgaccaactacatggcgctggatgggctgctgagcaaactgcggtacaacatcatcagcatggaaggcacggttggagacgcccttcactaccagctggcacagattggcttcagtgctcagatcctggatgagcggcaggtgctgctcggcgccgtcggggcctttgactggtccggaggggcgttgctctacgacacacgcagccgccggggccgcttcctgaaccagacagcggcggcggcggcagacgcggaggctgcgcagtacagctacctgggttacgctgtggccgtgctgcacaagacctgcagcctctcctacgtcgcgggggctccacagtacaaacatcatggggccgtgtttgagctccagaaggagggcagagaggccagcttcctgccagtgctggagggagagcagatggggtcctattttggctctgagctgtgccctgtggacattgacatggatggaagcacggacttcttgctggtggctgctccattttaccacgttcatggagaagaaggcagagtctacgtgtaccgtctcagcgagcaggatggttctttctccttggcacgcatactgagtgggcaccccgggttcaccaatgcccgctttggctttgccatggcggctatgggggatctcagtcaggataagctcacagatgtggccatcggggcccccctggaaggttttggggcagatgatggtgccagcttcggcagtgtgtatatctacaatggacactgggacggcctctccgccagcccctcgcagcggatcagagcctccacggtggccccaggactccagtacttcggcatgtccatggctggtggctttgatattagtggcgacggccttgccgacatcaccgtgggcactctgggccaggcggttgtgttccgctcccggcctgtggttcgcctgaaggtctccatggccttcacccccagcgcactgcccatcggcttcaacggcgtcgtgaatgtccgtttatgttttgaaatcagctctgtaaccacagcctctgagtcaggcctccgtgaggcacttctcaacttcacgctggatgtggatgtggggaagcagaggagacggctgcagtgttcagacgtaagaagctgtctgggctgcctgagggagtggagcagcggatcccagctttgtgaggacctcctgctcatgcccacagagggagagctctgtgaggaggactgcttctccaatgccagtgtcaaagtcagctaccagctccagacccctgagggacagacggaccatccccagcccatcctggaccgctacactgagccctttgccatcttccagctgccctatgagaaggcctgcaagaataagctgttttgtgtcgcagaattacagttggccaccaccgtctctcagcaggagttggtggtgggtctcacaaaggagctgaccctgaacattaacctaactaactccggggaagattcctacatgacaagcatggccttgaattaccccagaaacctgcagttgaagaggatgcaaaagcctccctctccaaacattcagtgtgatgaccctcagccggttgcttctgtcctgatcatgaactgcaggattggtcaccccgtcctcaagaggtcatctgctcatgtttcagtcgtttggcagctagaggagaatgcctttccaaacaggacagcagacatcactgtgactgtcaccaattccaatgaaagacggtctttggccaacgagacccacacccttcaattcaggcatggcttcgttgcagttctgtccaaaccatccataatgtacgtgaacacaggccaggggctttctcaccacaaagaattcctcttccatgtacatggggagaacctctttggagcagaataccagttgcaaatttgcgtcccaaccaaattacgaggtctccaggttgcagcagtgaagaagctgacgaggactcaggcctccacggtgtgcacctggagtcaggagcgcgcttgtgcgtacagttcggttcagcatgtggaagaatggcattcagtgagctgtgtcatcgcttcagataaagaaaatgtcaccgtggctgcagagatctcctgggatcactctgaggagttactaaaagatgtaactgaactgcagatccttggtgaaatatctttcaacaaatctctatatgagggactgaatgcagagaaccacagaactaagatcactgtcgtcttcctgaaagatgagaagtaccattctttgcctatcatcattaaaggcagcgttggtggacttctggtgttgatcgtgattctggtcatcctgttcaagtgtggcttttttaaaagaaaatatcaacaactgaacttggagagcatcaggaaggcccagctgaaatcagagaatctgctcgaagaagagaattaggacctgctatccactgggagaggctatcagccagtcctgggacttggagacccagcatcctttgcattactttttccttcaggatgatctagagcagcatggagctgttggtagaatattagtttttaaccatacattgtcccaaaagtgtctgtgcattgtgcaaaaagtaaacttaggaaacatttggtattaaataaatttacacttttctttgcaaaaaaaaaaaaaaaaaaaaaaaaaaaaaaaaaaaaaaaaaaaa

SEQ ID NO: 1531 - protein, 1179 aa, Homo sapien
MWLFHTLLCIASLALLAAFNVDVARPWLTPKGGAPFVLSSLLHQDPSTNQTWLLVTSPRTKRTPGPLHRCSLVQDEILCHPVEHVPIPKGRHRGVTVVRSHHGVLICIQVLVRRPHSLSSELTGTCSLLGPDLRPQAQANFFDLENLLDPDARVDTGDCYSNKEGGGEDDVNTARQRRALEKEEEEDKEEEEDEEEEEAGTEIAIILDGSGSIDPPDFQRAKDFISNMMRNFYEKCFECNFALVQYGGVIQTEFDLRDSQDVMASLARVQNITQVGSVTKTASAMQHVLDSIFTSSHGSRRKASKVMVVLTDGGIFEDPLNLTTVINSPKMQGVERFAIGVGEEFKSARTARELNLIASDPDETHAFKVTNYMALDGLLSKLRYNIISMEGTVGDALHYQLAQIGFSAQILDERQVLLGAVGAFDWSGGALLYDTRSRRGRFLNQTAAAAADAEAAQYSYLGYAVAVLHKTCSLSYVAGAPQYKHHGAVFELQKEGREASFLPVLEGEQMGSYFGSELCPVDIDMDGSTDFLLVAAPFYHVHGEEGRVYVYRLSEQDGSFSLARILSGHPGFTNARFGFAMAAMGDLSQDKLTDVAIGAPLEGFGADDGASFGSVYIYNGHWDGLSASPSQRIRASTVAPGLQYFGMSMAGGFDISGDGLADITVGTLGQAVVFRSRPVVRLKVSMAFTPSALPIGFNGVVNVRLCFEISSVTTASESGLREALLNFTLDVDVGKQRRRLQCSDVRSCLGCLREWSSGSQLCEDLLLMPTEGELCEEDCFSNASVKVSYQLQTPEGQTDHPQPILDRYTEPFAIFQLPYEKACKNKLFCVAELQLATTVSQQELVVGLTKELTLNINLTNSGEDSYMTSMALNYPRNLQLKRMQKPPSPNIQCDDPQPVASVLIMNCRIGHPVLKRSSAHVSVVWQLEENAFPNRTADITVTVTNSNERRSLANETHTLQFRHGFVAVLSKPSIMYVNTGQGLSHHKEFLFHVHGENLFGAEYQLQICVPTKLRGLQVAAVKKLTRTQASTVCTWSQERACAYSSVQHVEEWHSVSCVIASDKENVTVAAEISWDHSEELLKDVTELQILGEISFNKSLYEGLNAENHRTKITVVFLKDEKYHSLPIIIKGSVGGLLVLIVILVILFKCGFFKRKYQQLNLESIRKAQLKSENLLEEEN

SEQ ID NO: 1532 - DNA, 1285 bp, Homo sapien
  Unsure 25: Unknown base
taacgctccctaaactgccacttgntcagctccgcgcctaaggtgtctattagtgcgcctgcgctgtgacctagaatgggcgcatgcgccgagcggaactggctggtttgaaaaccatggcgtgggtaccagcggagtccgcagtggaagagttgatgcctcggctattgccggtagagccttgcgacttgacggaaggtttcgatccctcggtacccccgaggacgcctcaggaatacctgaggcgggtccagatcgaagcagctcaatgtccagatgttgtggtagctcaaattgacccaaagaagttgaaaaggaagcaaagtgtgaatatttctctttcaggatgccaacccgcccctgaaggttattccccaacacttcaatggcaacagcaacaagtggcacagttttcaactgttcgacagaatgtgaacaaacatagaagtcactggaaatcacaacagttggatagtaatgtgacaatgccaaaatctgaagatgaagaaggctggaagaaattttgtctgggtgaaaagttatgtgctgacggggctgttggaccagccacaaatgaaagtcctggaatagattatgtacaaattggttttcctcccttgcttagtattgttagcagaatgaatcaggcaacagtaactagtgtcttggaatatctgagtaattggtttggagaaagagactttactccagaattgggaagatggctttatgctttattggcttgtcttgaaaagcctttgttacctgaggctcattcactgattcggcagcttgcaagaaggtgctctgaagtgaggctcttagtggatagcaaagatgatgagagggttcctgctttgaatttattaatctgcttggttagcaggtattttgaccaacgtgatttagctgatgagccatcttgatgtagctgatctctcagggatagaagatatttctcatgaaggcagcctaactctgaggaaaacaatgccaattcaagtacagatttcaacacatcttcaacactatgtgaagggttcacatcttaacctgtgcaattcagattgatactcagaatatgggttgatttgaatatctgaaatatcaatggaaaatcccactcagtttttgatgaacagtttgaacagttttctgtaatcaagcagcttgcatagaaattgtatgatgaaattttacataggttcttggtgctgttttgttctttttttgttttttgttgttttgttatttacttatatacatataaaattttattgaaaat

SEQ ID NO: 1533 - protein, 280 aa, Homo sapien
MRRAELAGLKTMAWVPAESAVEELMPRLLPVEPCDLTEGFDPSVPPRTPQEYLRRVQIEAAQCPDVVVAQIDPKKLKRKQSVNISLSGCQPAPEGYSPTLQWQQQQVAQFSTVRQNVNKHRSHWKSQQLDSNVTMPKSEDEEGWKKFCLGEKLCADGAVGPATNESPGIDYVQIGFPPLLSIVSRMNQATVTSVLEYLSNWFGERDFTPELGRWLYALLACLEKPLLPEAHSLIRQLARRCSEVRLLVDSKDDERVPALNLLICLVSRYFDQRDLADEPS

SEQ ID NO: 1534 - DNA, 1665 bp, Homo sapien
cgggatttagatcacgtcccgcaggccggcggaagtagctgatactctcattggttgcaaaaccttgatctgtgaaagcgggcgttttggaagataccggaagtagagtcacggagagtattaagaaatggagagaaaaataagcagaatccaccttgtttctgaacccagtataactcattttctacaagtatcttgggagaaaacactggaatctggttttgttattacacttactgatggtcattcagcatggactgggacagtttctgaatcagagatttcccaagaagctgatgacatggcaatggaaaaagggaaatatgttggtgaactgagaaaagcattgttgtcaggagcaggaccagctgatgtatacacgtttaatttttctaaagagtcttgttatttcttctttgagaaaaacctgaaagatgtctcattcagacttggttccttcaacctagagaaagttgaaaacccagctgaagtcattagagaacttatttgttattgcttggacaccattgcagaaaatcaagccaaaaatgagcacctgcagaaagaaaatgaaaggcttctgagagattggaatgatgttcaaggacgatttgaaaaatgtgtgagtgctaaggaagctttggagactgatctttataagcggtttattctggtgttgaatgagaagaaaacaaaaatcagaagtttgcataataaattattaaatgcagctcaagaacgagaaaaggacatcaaacaagaaggggaaactgcaatctgttctgaaatgactgctgaccgagatccagtctatgatgagagtactgatgaggaaagtgaaaaccaaactgatctctctgggttggcttcagctgctgtaagtaaagatgattccattatttcaagtcttgatgtcactgatattgcaccaagtagaaaaaggagacagcgaatgcaaagaaatcttgggacagaacctaaaatggctcctcaggagaatcagcttcaagaaaaggaaaattctaggcctgattcttcactacctgagacgtcgaaaaaggagcacatctcagctgaaaacatgtctttagaaactctgagaaacagcagcccagaagacctctttgatgagatttaacagtctcaaaaaatactttgatgttcactagactatgttttctattcatttctttaaaatgaaaaaggagaatttcaagtcagcagccgctattaccgtatcttacaatttaattacatacacagtgaattgaaaccattgtgcaaaatggattacacatgtatacaaagatacgatttgatgatgacactggcacattgagttctaaactattcattcagcatgcctataattacataaattgtatgagactttttgttgcaaaggacacatttatcatattcattcacacatattatatgtgatagctgtccaacatcctgtctgggaagattttgaaaacaggacaaagaaaacatcattttaaaatgtcttcagctttttttgaatagacgtattcaaacatattctgaacattgatgtttgaacattttaatttgtgtgatgatgtagaaaatataattttagtttgtacataaacattgtgaaaatctgataataaaatttttgatacattgaaaaaaaaa

SEQ ID NO: 1535 - protein, 336 aa, Homo sapien
MERKISRIHLVSEPSITHFLQVSWEKTLESGFVITLTDGHSAWTGTVSESEISQEADDMAMEKGKYVGELRKALLSGAGPADVYTFNFSKESCYFFFEKNLKDVSFRLGSFNLEKVENPAEVIRELICYCLDTIAENQAKNEHLQKENERLLRDWNDVQGRFEKCVSAKEALETDLYKRFILVLNEKKTKIRSLHNKLLNAAQEREKDIKQEGETAICSEMTADRDPVYDESTDEESENQTDLSGLASAAVSKDDSIISSLDVTDIAPSRKRRQRMQRNLGTEPKMAPQENQLQEKENSRPDSSLPETSKKEHISAENMSLETLRNSSPEDLFDEI

SEQ ID NO: 1536 - DNA, 917 bp, Homo sapien
aggaggcagtagttccccgcttcccttccgcgggagggagagttagctagccatccaagaaaacaccatgaaagataacgatatcaagagactactgtatacccatcttttatgcatattttcaattatcctaagtgtcttcattccatcactcttcttggagaacttctcaatattggaaacacacttgacatggttgtgcatctgttctggttttgtaactgctgtcaatctagtactatatttagtagtgaaaccaaatacatcctctaaaagaagttcattatcacacaaggtaactggatttttgaaatgctgtatctactttcttatgtcttgtttctcctttcatgtaatttttgttctgtatggagcaccactgatagagttggcattggaaacatttttatttgcagttattttgtctacttttactactgtgccttgcttatgtttgttaggaccaaacctcaaagcatggctaagagtgttcagtagaaatggagttacatccatatgggagaatagtctccagatcactacaatttctagctttgtaggagcatggcttggagcacttcctattccactggattgggaaagaccatggcaggtatggcccatctcctgtacgcttggagcgacctttggctacgtggctggccttgttatttcaccactctggatatactggaatagaaagcaacttacatacaagaacaattaactggagcaaagggagatatttctttgtgcagattctgtaagggctgggcagaaatgtgtatggtcaaagccaagcagttccatttacagctctgttttttacgtagttacaacatgatgtgattgtagctttttaaactatgaaacccctgagagattgtaccttctagttgaaataaagtatttataat

SEQ ID NO: 1537 - protein, 219 aa, Homo sapien
MKDNDIKRLLYTHLLCIFSIILSVFIPSLFLENFSILETHLTWLCICSGFVTAVNLVLYLVVKPNTSSKRSSLSHKVTGFLKCCIYFLMSCFSFHVIFVLYGAPLIELALETFLFAVILSTFTTVPCLCLLGPNLKAWLRVFSRNGVTSIWENSLQITTISSFVGAWLGALPIPLDWERPWQVWPISCTLGATFGYVAGLVISPLWIYWNRKQLTYKNN

SEQ ID NO: 1538 - DNA, 438 bp, Homo sapien
ggcacgagggcccgtgccgccccagccgctgccgcctgcaccggacccggagccgccatgcccaagtgtcccaagtgcaacaaggaggtgtacttcgccgagagggtgacctctctgggcaaggactggcatcggccctgcctgaagtgcgagaaatgtgggaagacgctgacctctgggggccacgctgagcacgaaggcaaaccctactgcaaccacccctgctacgcagccatgtttgggcctaaaggctttgggcggggcggagccgagagccacactttcaagtaaaccaggtggtggagaccccatccttggctgcttgcagggccactgtccaggcaaatgccaggccttgtccccagatgcccagggctcccttgttgcccctaatgctctcagtaaacctgaacacttggaaaaaaaaaaaaaaaaaaa

SEQ ID NO: 1539 - protein, 77 aa, Homo sapien
MPKCPKCNKEVYFAERVTSLGKDWHRPCLKCEKCGKTLTSGGHAEHEGKPYCNHPCYAAMFGPKGFGRGGAESHTFK

SEQ ID NO: 1540 - DNA, 1085 bp, Homo sapien
gcagcgcagggagccaggcgggctgccggcgggtgtgaagaaaaaaatgacactccaatgggctgcagtggcaacctttctttatgccgaaataggactcattttaatcttctgcctactttttattcctcctcagagatggcagaagattttttcatttaatgtctggggtaaaattgcaactttttggaacaaggctttccttaccattatcatcctattgattgttctatttctagatgctgtgagagaagtaaggaaatattcctcagttcataccattgagaagagctccaccagcagacctgatgcctatgaacacacacagatgaaactttttaggtctcaaagaaatctttcaatactttctggattctcgttatttttttggctagtgttgagacgtctggttacgcttattactcaactggcaaaagaacgttcaaacaaaggtgtacttaaaactcaagcagaaaatactaacaaggctgccaaaaaatttatggaagaaaacgaaaaactaaaaaggattttgaaaagccatggtaaagatgaagaatgtgttttggaagcagaaaataaaaaactagtagaagaccaggagaaactgaaaactgaattaaggaagacttcagatgccctttctaaggcacaaaatgatgtgatggaaatgaagatgcagtcagagagactttcgaaagaatatgatcaactcctgaaagaacactctgaacttcaggatcgtttagaaagaggcaacaagaaaagactgtgaactttataaaagacacttgcaatatactgtgtcaaaatgataattttgttatgttagcctctagaaaatttaagttcagaaaaatgcactatgaccggttcgtaatttttttaatgccacacataggttgtattgtaatggcattatcaaaatatttgatgatgtttcagatatattgcaaagtctgtattccagctcttaagaaaaatataagcatgttaaataccatatttacatattgataatgtcattggtatatggtggctgtttaccaataaaaggaaaaaattcaaaaaaaaaaaaaaaaaaa

SEQ ID NO: 1541 - protein, 242 aa, Homo sapien
MTLQWAAVATFLYAEIGLILIFCLLFIPPQRWQKIFSFNVWGKIATFWNKAFLTIIILLIVLFLDAVREVRKYSSVHTIEKSSTSRPDAYEHTQMKLFRSQRNLSILSGFSLFFWLVLRRLVTLITQLAKERSNKGVLKTQAENTNKAAKKFMEENEKLKRILKSHGKDEECVLEAENKKLVEDQEKLKTELRKTSDALSKAQNDVMEMKMQSERLSKEYDQLLKEHSELQDRLERGNKKRL

SEQ ID NO: 1542 - DNA, 3153 bp, Homo sapien
ccggggccacgcgattggcgcgaagttttcttttctccttccaccttcttttcatttctagtgagacacacgctttggtcctggctttcggcccgtagttgtagaaggagccctgctggtgcaggttagaggtgccgcatcccccggagctctcgaagtggaggcggtaggaaacggagggcttgcggctagccggaggaagctttggagccggaagccatggcacactaccccacaaggctgaagaccagaaaaacttattcatgggttggcaggcccttgttggatcgaaaactgcactaccaaacctatagagaaatgtgtgtgaaaacagaaggttgttccaccgagattcacatccagattggacagtttgtgttgattgaaggggatgatgatgaaaacccgtatgttgctaaattgcttgagttgttcgaagatgactctgatcctcctcctaagaaacgtgctcgagtacagtggtttgtccgattctgtgaagtccctgcctgtaaacggcatttgttgggccggaagcctggtgcacaggaaatattctggtatgattacccggcctgtgacagcaacattaatgcggagaccatcattggccttgttcgggtgatacctttagccccaaaggatgtggtaccgacgaatctgaaaaatgagaagacactctttgtgaaactatcctggaatgagaagaaattcaggccactttcctcagaactatttgcggagttgaataaaccacaagagagtgcagccaagtgccagaaacccgtgagagccaagagtaagagtgcagagagcccttcttggaccccagcagaacatgtggccaaaaggattgaatcaaggcactccgcctccaaatctcgccaaactcctacccatcctcttaccccaagagccagaaagaggctggagcttggcaacttaggtaaccctcagatgtcccagcagacttcatgtgcctccttggattctccaggaagaataaaacggaaagtggccttctcggagatcacctcaccttctaagagatctcagcctgataaacttcaaaccttgtctccagctctgaaagccccagagaaaaccagagagactggactctcttatactgaggatgacaagaaggcttcacctgaacatcgcataatcctgagaacccgaattgcagcttcgaaaaccatagacattagagaggagagaacacttacccctatcagtgggggacagagatcttcagtggtgccatccgtgattctgaaaccagaaaacatcaaaaagagggatgcaaaagaagcaaaagcccagaatgaagcgacctctactccccatcgtatccgcagaaagagttctgtcttgactatgaatcggattaggcagcagcttcggtttctaggtaatagtaaaagtgaccaagaagagaaagagattctgccagcagcagagatttcagactctagcagtgacgaagaagaggcttccacaccgccccttccaaggagagcacccagaactgtgtccaggaacctgcgatcttccttgaagtcatccttacataccctcacgaaggtgccaaagaagagtctcaagcctagaacgccacgttgtgccgctcctcagatccgtagtcgaagcctggctgcccaggagccagccagtgtgctggaggaagcccgactgaggctgcatgtttctgctgtacctgagtctcttccctgtcgggaacaggaattccaagacatctacaattttgtggaaagcaaactccttgaccataccggagggtgcatgtacatctccggtgtccctgggacagggaagactgccactgttcatgaagtgatacgctgcctgcagcaggcagcccaagccaatgatgttcctccctttcaatacattgaggtcaatggcatgaagctgacggagccccaccaagtctatgtgcacatcttgcagaagctaacaggccaaaaagcaacagccaaccatgcggcagaactgctggcaaagcaattctgcacccgagggtcacctcaggaaaccaccgtcctgcttgtggatgagctcgaccttctgtggactcacaaacaagacataatgtacaatctctttgactggcccactcataaggaggcccggcttgtggtcctggcaattgccaacacaatggacctgccagagcgaatcatgatgaaccgggtgtccagccgactgggtcttaccaggatgtgcttccagccctatacatatagccagctgcagcagatcctaaggtcccggctcaagcatctaaaggcctttgaagatgatgccatccagctggtagccaggaaggtagcagcactgtctggagatgcacgacggtgcctggacatctgcaggcgtgccacagagatctgtgagttctcccagcagaagcctgactcccctggcctggtcaccatagcccactcaatggaagctgtggatgagatgttttcatcatcatacatcacggccatcaaaaattcctctgttctggaacagagcttcctgagagccatcctcgcagagttccgtcgatcaggactggaggaagccacgtttcaacagatatatagtcaacatgtggcactgtgcagaatggagggactgccgtaccccaccatgtcagagaccatggccgtgtgttctcacctgggctcctgtcgcctcctgcttgtggagcccagcaggaacgatctgctccttcgggtgcggctcaacgtcagccaggatgatgtgctgtatgcgctgaaagacgagtaaaggggcttcacaagttaaaagactggggtcttgctgggttttgttttttgagacagggtcttgctctgtcgcccaggctggagtgcagtggcacgatcatggctcactgcagccttgacttctcaggcttaggtgaccccccaacctcatcctcccaggtggctgaaactacaggcacatgccaccatgcccagctgattttttgtagagacagggcttcaccatgttgccaagctagtctacaaagcatctgattttggaagtacatggaattgttgtaacaaagtatattgaatggaaatggctctcatgtattttggaattttccattaaataatttgcttttta

SEQ ID NO: 1543 - protein, 861 aa, Homo sapien [sequence omitted]

SEQ ID NO: 1544 - DNA, 2214 bp, Homo sapien
ttggaaccagagagaagccgggatggaaactccaaacaccacagaggactatgacacgaccacagagtttgactatggggatgcaactccgtgccagaaggtgaacgagagggcctttggggcccaactgctgccccctctgtactccttggtatttgtcattggcctggttggaaacatcctggtggtcctggtccttgtgcaatacaagaggctaaaaaacatgaccagcatctacctcctgaacctggccatttctgacctgctcttcctgttcacgcttcccttctggatcgactacaagttgaaggatgactgggtttttggtgatgccatgtgtaagatcctctctgggttttattacacaggcttgtacagcgagatctttttcatcatcctgctgacgattgacaggtacctggccatcgtccacgccgtgtttgccttgcgggcacggaccgtcacttttggtgtcatcaccagcatcatcatttgggccctggccatcttggcttccatgccaggcttatacttttccaagacccaatgggaattcactcaccacacctgcagccttcactttcctcacgaaagcctacgagagtggaagctgtttcaggctctgaaactgaacctctttgggctggtattgcctttgttggtcatgatcatctgctacacagggattataaagattctgctaagacgaccaaatgagaagaaatccaaagctgtccgtttgatttttgtcatcatgatcatcttttttctcttttggaccccctacaatttgactatacttatttctgttttccaagacttcctgttcacccatgagtgtgagcagagcagacatttggacctggctgtgcaagtgacggaggtgatcgcctacacgcactgctgtgtcaacccagtgatctacgccttcgttggtgagaggttccggaagtacctgcggcagttgttccacaggcgtgtggctgtgcacctggttaaatggctccccttcctctccgtggacaggctggacagggtcagctccacatctccctccacaggggagcatgaactctctgctgggttctgactcagaccataggaggccaacccaaaataagcaggcgtgacctgccaggcacactgagccagcagcctggctctcccagccaggttctgactcttggcacagcatggagtcacagccacttgggatagagagggaatgtaatggtggcctggggcttctgaggcttctggggcttcagtcttttccatgaacttctcccctggtagaaagaagatgaatgagcaaaaccaaatattccagagactgggactaatgtaccagagaagggcttggactcaagcaagatttcagatttgtgaccattagcatttgtcaacaaagtcacccacttcccactattgcttgcacaaaccaattaaacccagtagtggtgactgtgggctccattcaaagtgagctcctaagccatgggagacactgatgtatgaggaatttctgttcttccatcacctccccccccccgccaccctcccactgccaaagaacttggaaatagtgatttccacagtgactccactctgagtcccagagccaatcagtagccagcatctgcctccccttcactcccaccgcagatttgggctcttggaatcctggggaacatagaactcatgacggaagagttgagacctaacgagaaatagaaatggggaactactgctggcagtggaactaagaaagcccttaggaagaatttttatatccactaaaatcaaacaattcagggagtgggctaagcacgggccatatgaataacatggtgtgcttcttaaaatagccataaaggggagggactcatcatttccatttacccttcttttctgactatttttcagaatctctcttcttttcaagttgggtgatatgttggtagattctaatggctttattgcagcggttaataacaggcaaaaggaagcagggttggtttcccttctttttgttcttcatctaagccttctggttttatgggtcagagttccgactgccatcttggacttgtcagcaaaaaaaaataataataataataataaggcctgctgtgtaagctgacagtatttgtagctgatagggggttgggaggaagtgtctactaggagggtgggtgagatctgtgttgatgt

SEQ ID NO: 1545 - protein, 355 aa, Homo sapien [sequence omitted]

SEQ ID NO: 1546 - DNA, 2156 bp, Homo sapien
ggcacgagcccagaaacaaagacttcacggacaaagtcccttggaaccagagagaagccgggatggaaactccaaacaccacagaggactatgacacgaccacagagtttgactatggggatgcaactccgtgccagaaggtgaacgagagggcctttggggcccaactgctgccccctctgtactccttggtatttgtcattggcctggttggaaacatcctggtggtcctggtccttgtgcaatacaagaggctaaaaaacatgaccagcatctacctcctgaacctggccatttctgacctgctcttcctgttcacgcttcccttctggatcgactacaagttgaaggatgactgggtttttggtgatgccatgtgtaagatcctctctgggttttattacacaggcttgtacagcgagatctttttcatcatcctgctgacgattgacaggtacctggccatcgtccacgccgtgtttgccttgcgggcacggaccgtcacttttggtgtcatcaccagcatcatcatttgggccctggccatcttggcttccatgccaggcttatacttttccaagacccaatgggaattcactcaccacacctgcagccttcactttcctcacgaaagcctacgagagtggaagctgtttcaggctctgaaactgaacctctttgggctggtattgcctttgttggtcatgatcatctgctacacagggattataaagattctgctaagacgaccaaatgagaagaaatccaaagctgtccgtttgatttttgtcatcatgatcatcttttttctcttttggaccccctacaatttgactatacttatttctgttttccaagacttcctgttcacccatgagtgtgagcagagcagacatttggacctggctgtgcaagtgacggaggtgatcgcctacacgcactgctgtgtcaacccagtgatctacgccttcgttggtgagaggttccggaagtacctgcggcagttgttccacaggcgtgtggctgtgcacctggttaaatggctccccttcctctccgtggacaggctggagagggtcagctccacatctccctccacaggggagcatgaactctctgctgggttctgactcagaccataggaggccaacccaaaataagcaggcgtgacctgccaggcacactgagccagcagcctggctctcccagccaggttctgactcttggcacagcatggagtcacagccacttgggatagagagggaatgtaatggtggcctggggcttctgaggcttctggggcttcagtcttttccatgaacttctcccctggtagaaagaagatgaatgagcaaaaccaaatattccagagactgggactaagtgtaccagagaagggcttggactcaagcaagatttcagatttgtgaccattagcatttgtcaacaaagtcacccacttcccactattgcttgcacaaaccaattaaacccagtagtggtgactgtgggctccattcaaagtgagctcctaagccatgggagacactgatgtatgaggaatttctgttcttccatcacctccccccccccgccaccctcccactgccaagaacttggaaatagtgatttccacagtgactccactctgagtcccagagccaatcagtagccagcatctgcctccccttcactcccaccgcaggatttgggctcttggaatcctggggaacatagaactcatgacggaagagttgagacctaacgagaaatagaaatgggggaactactgctggcagtggaactaagaaagcccttaggaagaatttttatatccactaaaatcaaacaattcagggagtgggctaagcacgggccatatgaataacatggtgtgcttcttaaaatagccataaaggggagggactcatcatttccatttacccttcttttctgactatttttcagaatctctcttcttttcaagttgggtgatatgttggtagattctaatggctttattgcagcgattaataacaggcaaaaggaagcagggttggtttcccttctttttgttcttcatctaagccttctggttttatgggtcagagttccgactgccatcttggacttgtcagcaaaaaaaaaaaaaaaaa

SEQ ID NO: 1547 - protein, 355 aa, Homo sapien
METPNTTEDYDTTTEFDYGDATPCQKVNERAFGAQLLPPLYSLVFVIGLVGNILVVLVLVQYKRLKNMTSIYLLNLAISDLLFLFTLPFWIDYKLKDDWVFGDAMCKILSGFYYTGLYSEIFFIILLTIDRYLAIVHAVFALRARTVTFGVITSIIIWALAILASMPGLYFSKTQWEFTHHTCSLHFPHESLREWKLFQALKLNLFGLVLPLLVMIICYTGIIKILLRRPNEKKSKAVRLIFVIMIIFFLFWTPYNLTILISVFQDFLFTHECEQSRHLDLAVQVTEVIAYTHCCVNPVIYAFVGERFRKYLRQLFHRRVAVHLVKWLPFLSVDRLERVSSTSPSTGEHELSAGF

SEQ ID NO: 1548 - DNA, 776 bp, Homo sapien
aaggacacgggcagcagacagtggtcagtcctttcttggctctgctgacactcgagcccacattccgtcacctgctcagaatcatgcaggtctccactgctgcccttgctgtcctcctctgcaccatggctctctgcaaccagttctctgcatcacttgctgctgacacgccgaccgcctgctgcttcagctacacctcccggcagattccacagaatttcatagctgactactttgagacgagcagccagtgctccaagcccggtgtcatcttcctaaccaagcgaagccggcaggtctgtgctgaccccagtgaggagtgggtccagaaatatgtcagcgacctagagctgagtgcctgaggggtccagaagcttcgaggcccagcgacctcggtgggccagtggggaggagcaggagcctgagccttgggaaacatgcgtgtgacctccacagctacctcttctatggactggttgttgccaaacagccacactgtgggactcttcttaacttaaattttaatttatttatactatttagtttttgtaatttattttcgatttcacagtgtgtttgtgattgtttgctctgagagttcccctgtcccctcccccttccctcacaccgcgtctggtgacaaccgagtggctgtcatcagcctgtgtaggcagtcatggcaccaaagccaccagactgacaaatgtgtatcggatgcttttgttcagggctgtgatcggcctggggaaataataaagcacgctcttttaaaaggt

SEQ ID NO: 1549 - protein, 92 aa, Homo sapien
MQVSTAALAVLLCTMALCNQFSASLAADTPTACCFSYTSRQIPQNFIADYFETSSQCSKPGVIFLTKRSRQVCADPSEEWVQKYVSDLELSA

SEQ ID NO: 1550 - DNA, 538 bp, Homo sapien
gctacactagagcagagtacgagtctgaggcggagggagtaatggcaggacaagcgtttagaaagtttcttccactctttgaccgagtattggttgaaaggagtgctgctgaaactgtaaccaaaggaggcattatgcttccagaaaaatctcaaggaaaagtattgcaagcaacagtagtcgctgttggatcgggttctaaaggaaagggtggagagattcaaccagttagcgtgaaagttggagataaagttcttctcccagaatatggaggcaccaaagtagttctagatgacaaggattatttcctatttagagatggtgacattcttggaaagtacgtagactgaaataagtcactattgaaatggcatcaacatgatgctgcccattccactgaagttctgaaatctttcgtcatgtaaataatttccatatttctcttttataataaactaatgataactaatgacatccagtgtctccaaaattgtttccttgtactgatataaacacttccaaataaaaatatgtaaat

SEQ ID NO: 1551 - protein, 102 aa, Homo sapien
MAGQAFRKFLPLFDRVLVERSAAETVTKGGIMLPEKSQGKVLQATVVAVGSGSKGKGGEIQPVSVKVGDKVLLPEYGGTKVVLDDKDYFLFRDGDILGKYVD

SEQ ID NO: 1552 - DNA, 1177 bp, Homo sapien
gccaaggctggggcaggggagtcagcagaggcctcgctcgggcgcccagtggtcctgccgcctggtctcacctcgctatggttcgtctgcctctgcagtgcgtcctctggggctgcttgctgaccgctgtccatccagaaccacccactgcatgcagagaaaaacagtacctaataaacagtcagtgctgttctttgtgccagccaggacagaaactggtgagtgactgcacagagttcactgaaacggaatgccttccttgcggtgaaagcgaattcctagacacctggaacagagagacacactgccaccagcacaaatactgcgaccccaacctagggcttcgggtccagcagaagggcacctcagaaacagacaccatctgcacctgtgaagaaggctggcactgtacgagtgaggcctgtgagagctgtgtcctgcaccgctcatgctcgcccggctttggggtcaagcagattgctacaggggtttctgataccatctgcgagccctgcccagtcggcttcttctccaatgtgtcatctgctttcgaaaaatgtcacccttggacaagctgtgagaccaaagacctggttgtgcaacaggcaggcacaaacaagactgatgttgtctgtggtccccaggatcggctgagagccctggtggtgatccccatcatcttcgggatcctgtttgccatcctcttggtgctggtctttatcaaaaaggtggccaagaagccaaccaataaggccccccaccccaagcaggaaccccaggagatcaattttcccgacgatcttcctggctccaacactgctgctccagtgcaggagactttacatggatgccaaccggtcacccaggaggatggcaaagagagtcgcatctcagtgcaggagagacagtgaggctgcacccacccaggagtgtggccacgtgggcaaacaggcagttggccagagagcctggtgctgctgctgctgtggcgtgagggtgaggggctggcactgactgggcatagctccccgcttctgcctgcacccctgcagtttgagacaggagacctggcactggatgcagaaacagttcaccttgaagaacctctcacttcaccctggagcccatccagtctcccaacttgtattaaagacagaggcagaaaaaaaaaaaaaaa

SEQ ID NO: 1553 - protein, 277 aa, Homo sapien
MVRLPLQCVLWGCLLTAVHPEPPTACREKQYLINSQCCSLCQPGQKLVSDCTEFTETECLPCGESEFLDTWNRETHCHQHKYCDPNLGLRVQQKGTSETDTICTCEEGWHCTSEACESCVLHRSCSPGFGVKQIATGVSDTICEPCPVGFFSNVSSAFEKCHPWTSCETKDLVVQQAGTNKTDVVCGPQDRLRALVVIPIIFGILFAILLVLVFIKKVAKKPTNKAPHPKQEPQEINFPDDLPGSNTAAPVQETLHGCQPVTQEDGKESRISVQERQ

SEQ ID NO: 1554 - DNA, 1896 bp, Homo sapien
ggtcaacgcctgcggctgttgatattcttgctcagaggccgtaactttggccttctgctcagggaagactctgagtccgacgttggcctacccagtcggaaggcagagctgcaatctagttaactacctcctttcccctagatttcctttcattctgctcaagtcttcgcctgtgtccgatccctatctactttctctcctcttgtagcaagcctcagactccaggcttgagctaggttttgtttttctcctggtgagaattcgaagaccatgtctacggaactcttctcatccacaagagaggaaggaagctctggctcaggacccagttttaggtctaatcaaaggaaaatgttaaacctgctcctggagagagacacttcctttaccgtctgtccagatgtccctagaactccagtgggcaaatttcttggtgattctgcaaacctaagcattttgtctgggtcacctggattcttcaggacttcaggaagtgcatttagctgggatgacaatggaaacttggtggacagtgaaatgaaatatttgggcagtcccattactactgttccaaaattggataaaaatccaaacctaggagaagaccaggcagaagagatttcagatgaattaatggagttttccctgaaagatcaagaagcaaaggtgagcagaagtggcctatatcgctccccgtcgatgccagagaacttgaacaggccaagactgaagcaggtggaaaaattcaaggacaacacaataccagataaagttaaaaaaaagtatttttctggccaaggaaagctcaggaagggcttatgtttaaagaagacagtctctctgtgtgacattactatcactcagatgctggaggaagattctaaccaggggcacctgattggtgatttttccaaggtatgtgcgctgccaaccgtgtcagggaaacaccaagatctgaagtatgtcaacccagaaacagtggctgccttactgtcggggaagttccagggtctgattgagaagttttatgtcattgattgtcgctatccatatgagtatctgggaggacacatccagggagccttaaacttatatagtcaggaagaactgtttaacttctttctgaagaagcccatcgtccctttggacacccagaagagaataatcatcgtgttccactgtgaattctcctcagagaggggcccccgaatgtgccgctgtctgcgtgaagaggacaggtctctgaaccagtatcctgcattgtactacccagagctatatatccttaaaggcggctacagagacttctttccagaatatatggaactgtgtgaaccacagagctactgccctatgcatcatcaggaccacaagactgagttgctgaggtgtcgaagccagagcaaagtgcaggaaggggagcggcagctgcgggagcagattgcccttctggtgaaggacatgagcccatgataacattccagccactggctgctaacaagtcaccaaaaagacactgcagaaaccctgagcagaaagaggccttctggatggccaaacccaagattattaaaagatgtctctgcaaaccaacaggctaccaacttgtatccaggcctgggaatggattaggtttcagcagagctgaaagctggtggcagagtcctggagctggctctataaggcagccttgagttgcatagagatttgtattggttcagggaactctggcattccttttcccaactcctcatgtcttctcacaagccagccaactctttctctctgggcttcgggctatgcaagagcgttgtctaccttctttctttgtattttccttctttgtttccccctctttcttttttaaaaatggaaaaataaacactacagaatgag

SEQ ID NO: 1555 - protein, 400 aa, Homo sapien
MSTELFSSTREEGSSGSGPSFRSNQRKMLNLLLERDTSFTVCPDVPRTPVGKFLGDSANLSILSGSPGFFRTSGSAFSWDDNGNLVDSEMKYLGSPITTVPKLDKNPNLGEDQAEEISDELMEFSLKDQEAKVSRSGLYRSPSMPENLNRPRLKQVEKFKDNTIPDKVKKKYFSGQGKLRKGLCLKKTVSLCDITITQMLEEDSNQGHLIGDFSKVCALPTVSGKHQDLKYVNPETVAALLSGKFQGLIEKFYVIDCRYPYEYLGGHIQGALNLYSQEELFNFFLKKPIVPLDTQKRIIIVFHCEFSSERGPRMCRCLREEDRSLNQYPALYYPELYILKGGYRDFFPEYMELCEPQSYCPMHHQDHKTELLRCRSQSKVQEGERQLREQIALLVKDMSP

SEQ ID NO: 1556 - DNA, 3291 bp, Homo sapien
aagtcgcgaccagagccattggagggcgcggggactgcaaccctaatcagagcccaaatggcgcagtgggaaatgctgcagaatcttgacagcccctttcaggatcagctgcaccagctttactcgcacagcctcctgcctgtggacattcgacagtacttggctgtctggattgaagaccagaactggcaggaagctgcacttgggagtgatgattccaaggctaccatgctattcttccacttcttggatcagctgaactatgagtgtggccgttgcagccaggacccagagtccttgttgctgcagcacaatttgcggaaattctgccgggacattcagcccttttcccaggatcctacccagttggctgagatgatctttaacctccttctggaagaaaaaagaattttgatccaggctcagagggcccaattggaacaaggagagccagttctcgaaacacctgtggagagccagcaacatgagattgaatcccggatcctggatttaagggctatgatggagaagctggtaaaatccatcagccaactgaaagaccagcaggatgtcttctgcttccgatataagatccaggccaaagggaagacaccctctctggacccccatcagaccaaagagcagaagattctgcaggaaactctcaatgaactggacaaaaggagaaaggaggtgctggatgcctccaaagcactgctaggccgattaactaccctaatcgagctactgctgccaaagttggaggagtggaaggcccagcagcaaaaagcctgcatcagagctcccattgaccacgggttggaacagctggagacatggttcacagctggagcaaagctgttgtttcacctgaggcagctgctgaaggagctgaagggactgagttgcctggttagctatcaggatgaccctctgaccaaaggggtggacctacgcaacgcccaggtcacagagttgctacagcgtctgctccacagagcctttgtggtagaaacccagccctgcatgccccaaactccccatcgacccctcatcctcaagactggcagcaagttcaccgtccgaacaaggctgctggtgagactccaggaaggcaatgagtcactgactgtggaagtctccattgacaggaatcctcctcaattacaaggcttccggaagttcaacattctgacttcaaaccagaaaactttgacccccgagaaggggcagagtcagggtttgatttgggactttggttacctgactctggtggagcaacgttcaggtggttcaggaaagggcagcaataaggggccactaggtgtgacagaggaactgcacatcatcagcttcacggtcaaatatacctaccagggtctgaagcaggagctgaaaacggacaccctccctgtggtgattatttccaacatgaaccagctctcaattgcctgggcttcagttctctggttcaatttgctcagcccaaaccttcagaaccagcagttcttctccaacccccccaaggccccctggagcttgctgggccctgctctcagttggcagttctcctcctatgttggccgaggcctcaactcagaccagctgagcatgctgagaaacaagctgttcgggcagaactgtaggactgaggatccattattgtcctgggctgacttcactaagcgagagagccctcctggcaagttaccattctggacatggctggacaaaattctggagttggtacatgaccacctgaaggatctctggaatgatggacgcatcatgggctttgtgagtcggagccaggagcgccggctgctgaagaagaccatgtctggcacctttctactgcgcttcagtgaatcgtcagaagggggcattacctgctcctgggtggagcaccaggatgatgacaaggtgctcatctactctgtgcaaccgtacacgaaggaggtgctgcagtcactcccgctgactgaaatcatccgccattaccagttgctcactgaggagaatatacctgaaaacccactgcgcttcctctatccccgaatcccccgggatgaagcttttgggtgctactaccaggagaaagttaatctccaggaacggaggaaatacctgaaacacaggctcattgtggtctctaatagacaggtggatgaactgcaacaaccgctggagcttaagccagagccagagctggagtcattagagctggaactagggctggtgccagagccagagctcagcctggacttagagccactgctgaaggcagggctggatctggggccagagctagagtctgtgctggagtccactctggagcctgtgatagagcccacactatgcatggtatcacaaacagtgccagagccagaccaaggacctgtatcacagccagtgccagagccagatttgccctgtgatctgagacatttgaacactgagccaatggaaatcttcagaaactgtgtaaagattgaagaaatcatgccgaatggtgacccactgttggctggccagaacaccgtggatgaggtttacgtctcccgccccagccacttctacactgatggacccttgatgccttctgacttctaggaaccacatttcctctgttcttttcatatctctttgcccttcctactcctcatagcatgatattgttctccaaggatgggaatcaggcatgtgtcccttccaagctgtgttaactgttcaaactcaggcctgtgtgactccattggggtgagaggtgaaagcataacatgggtacagaggggacaacaatgaatcagaacagatgctgagccataggtctaaataggatcctggaggctgcctgctgtgctgggaggtataggggtcctgggggcaggccagggcagttgacaggtacttggagggctcagggcagtggcttctttccagtatggaaggatttcaacattttaatagttggttaggctaaactggtgcatactggcattggccttggtggggagcacagacacaggataggactccatttctttcttccattccttcatgtctaggataacttgctttcttctttcctttactcctggctcaagccctgaatttcttcttttcctgcaggggttgagagctttctgccttagcctaccatgtgaaactctaccctgaagaaagggatggataggaagtagacctctttttcttaccagtctcctcccctactctgccccctaagctggctgtacctgttcctcccccataaaatgatcctgccaatct

SEQ ID NO: 1557 - protein, 851 aa, Homo sapien
MAQWEMLQNLDSPFQDQLHQLYSHSLLPVDIRQYLAVWIEDQNWQEAALGSDDSKATMLFFHFLDQLNYECGRCSQDPESLLLQHNLRKFCRDIQPFSQDPTQLAEMIFNLLLEEKRILIQAQRAQLEQGEPVLETPVESQQHEIESRILDLRAMMEKLVKSISQLKDQQDVFCFRYKIQAKGKTPSLDPHQTKEQKILQETLNELDKRRKEVLDASKALLGRLTTLIELLLPKLEEWKAQQQKACIRAPIDHGLEQLETWFTAGAKLLFHLRQLLKELKGLSCLVSYQDDPLTKGVDLRNAQVTELLQRLLHRAFVVETQPCMPQTPHRPLILKTGSKFTVRTRLLVRLQEGNESLTVEVSIDRNPPQLQGFRKFNILTSNQKTLTPEKGQSQGLIWDFGYLTLVEQRSGGSGKGSNKGPLGVTEELHIISFTVKYTYQGLKQELKTDTLPVVIISNMNQLSIAWASVLWFNLLSPNLQNQQFFSNPPKAPWSLLGPALSWQFSSYVGRGLNSDQLSMLRNKLFGQNCRTEDPLLSWADFTKRESPPGKLPFWTWLDKILELVHDHLKDLWNDGRIMGFVSRSQERRLLKKTMSGTFLLRFSESSEGGITCSWVEHQDDDKVLIYSVQPYTKEVLQSLPLTEIIRHYQLLTEENIPENPLRFLYPRIPRDEAFGCYYQEKVNLQERRKYLKHRLIVVSNRQVDELQQPLELKPEPELESLELELGLVPEPELSLDLEPLLKAGLDLGPELESVLESTLEPVIEPTLCMVSQTVPEPDQGPVSQPVPEPDLPCDLRHLNTEPMEIFRNCVKIEEIMPNGDPLLAGQNTVDEVYVSRPSHFYTDGPLMPSDF

SEQ ID NO: 1558 - DNA, 1040 bp, Homo sapien
cgacgagccatggttgctgggagcgacgcggggcgggccctgggggtcctcagcgtggtctgcctgctgcactgctttggtttcatcagctgtttttcccaacaaatatatggtgttgtgtatgggaatgtaactttccatgtaccaagcaatgtgcctttaaaagaggtcctatggaaaaaacaaaaggataaagttgcagaactggaaaattctgaattcagagctttctcatcttttaaaaatagggtttatttagacactgtgtcaggtagcctcactatctacaacttaacatcatcagatgaagatgagtatgaaatggaatcgccaaatattactgataccatgaagttctttctttatgtgcttgagtctcttccatctcccacactaacttgtgcattgactaatggaagcattgaagtccaatgcatgataccagagcattacaacagccatcgaggacttataatgtactcatgggattgtcctatggagcaatgtaaacgtaactcaaccagtatatattttaagatggaaaatgatcttccacaaaaaatacagtgtactcttagcaatccattatttaatacaacatcatcaatcattttgacaacctgtatcccaagcagcggtcattcaagacacagatatgcacttatacccataccattagcagtaattacaacatgtattgtgctgtatatgaatggtattctgaaatgtgacagaaaaccagacagaaccaactccaattgattggtaacagaagatgaagacaacagcataactaaattattttaaaaactaaaaagccatctgatttctcatttgagtattacaatttttgaacaactgttggaaatgtaacttgaagcagctgctttaagaagaaatacccactaacaaagaacaagcattagttttggctgtcatcaacttattatatgactaggtgcttgctttttttgtcagtaaattgtttttactgatgatgtagatacttttgtaaataaatgtaaatatgtacacaagtg

SEQ ID NO: 1559 - protein, 250 aa, Homo sapien
MVAGSDAGRALGVLSVVCLLHCFGFISCFSQQIYGVVYGNVTFHVPSNVPLKEVLWKKQKDKVAELENSEFRAFSSFKNRVYLDTVSGSLTIYNLTSSDEDEYEMESPNITDTMKFFLYVLESLPSPTLTCALTNGSIEVQCMIPEHYNSHRGLIMYSWDCPMEQCKRNSTSIYFKMENDLPQKIQCTLSNPLFNTTSSIILTTCIPSSGHSRHRYALIPIPLAVITTCIVLYMNGILKCDRKPDRTNSN

SEQ ID NO: 1560 - DNA, 998 bp, Homo sapien
gcttttcatgccttggcgtttcctttggcggattttctgttttcggaagttgctgggttcgttttattcagcggcagtggtgctttcccgaatctcagaatgcctgttaaaagatcactgaagttggatggtctgttagaagaaaattcatttgatccttcaaaaatcacaaggaagaaaagtgttataacttattctccaacaactggaacttgtcaaatgagtctatttgcttctcccacaagttctgaagagcaaaagcacagaaatggactatcaaatgaaaagagaaaaaaattgaatcaccccagtttaactgaaagcaaagaatctacaacaaaagacaatgatgaattcatgatgttgttatcaaaagttgagaaattgtcagaagaaatcatggagataatgcaaaatttaagtagtatacaggctttggagggcagtagagagcttgaaaatctcattggaatctcctgtgcatcacgtttcttaaaaagagaaatgcagaaaaccaaagaactaatgacaaaagtgaataaacaaaaactgtttgaaaagagtacaggacttcctcacaaagcatcacgtcatcttgacagctatgaattccttaaagccattttaaactgaggcattaagaagaaatgcactcaccatgagcaccaacttctgcatctgcctgatcatatttaaaggaacagagaaatatttgtaattaatctgcccagtaaataccagctcgtagcagttggcaggtgcatgtctagataaaatttcttgcagctaatttaaactttctacacgcaccagtagataatctcaatgtaaataatacatttcttcttggctctttaatgtaagccaacatggagaggaagatcttgacttatattctgtaccacatacacttctgtggacttttagcatttgtgggtagacttaataaagcatgtataaaagtggcttaaaaaaaaaaaaaaaaaaaaaaaaaaaaa

SEQ ID NO: 1561 - protein, 177 aa, Homo sapien
MPVKRSLKLDGLLEENSFDPSKITRKKSVITYSPTTGTCQMSLFASPTSSEEQKHRNGLSNEKRKKLNHPSLTESKESTTKDNDEFMMLLSKVEKLSEEIMEIMQNLSSIQALEGSRELENLIGISCASRFLKREMQKTKELMTKVNKQKLFEKSTGLPHKASRHLDSYEFLKAILN

SEQ ID NO: 1562 - DNA, 2314 bp, Homo sapien
ggaattcccgcccggcccggccccgcgccccgcagccccgggcgccgcgcgtcctgcccggcctgcggcccagcccttgcgccgctcgtccgacccgcgatcgtccaccagaccgtgcctcccggccgcccgggccccgcgtgcatgcttcggtctgggccagcctctgggccgtccgtccccactggccgggccatgccgagtcgccgcgtcgccagaccgccggctgcgccggagctgggggccttagggtcccccgacctctcctcactctcgctcgccgtttccaggagcacagatgaattggagatcatcgacgagtacatcaaggagaacggcttcggcctggacgggggacagccgggcccgggcgaggggctgccacgcctggtgtctcgcggggctgcgtccctgagcacggtcaccctgggccctgtggcgcccccagccacgccgccgccttggggctgccccctgggccgactagtgtccccagcgccgggcccgggcccgcagccgcacctggtcatcacggagcagcccaagcagcgcggcatgccgttccgctacgagtgcgagggccgctcggccggcagcatccttggggagagcagcaccgaggccagcaagacgctgcccgccatcgagctccgggattgtggagggctgcgggaggtggaggtgactgcctgcctggtgtggaaggactggcctcaccgagtccacccccacagcctcgtggggaaagactgcaccgacggcatctgcagggtgcggctccggcctcacgtcagcccccggcacagttttaacaacctgggcatccagtgtgtgaggaagaaggagattgaggctgccattgagcggaagattcaactgggcattgacccctacaacgctgggtccctgaagaaccatcaggaagtagacatgaatgtggtgaggatctgcttccaggcctcatatcgggaccagcagggacagatgcgccggatggatcctgtgctttccgagcccgtctatgacaagaaatccacaaacacatcagagctgcggatttgccgaattaacaaggaaagcgggccgtgcaccggtggcgaggagctctacttgctctgcgacaaggtgcagaaagaggacatatcagtggtgttcagcagggcctcctgggaaggtcgggctgacttctcccaggccgacgtgcaccgccagattgccattgtgttcaagacgccgccctacgaggacctggagattgtcgagcccgtgacagtcaacgtcttcctgcagcggctcaccgatggggtctgcagcgagccattgcctttcacgtacctgcctcgcgaccatgacagctacggcgtggacaagaaggcgaaacgggggatgcccgacgtccttggggagctgaacagctctgacccccatggcatcgagagcaaacggcggaagaaaaagccggccatcctggaccacttcctgcccaaccacggctcaggcccgttcctcccgccgtcagccctgctgccagaccctgacttcttctctggcaccgtgtccctgcccggcctggagccccctggcgggcctgacctcctggacgatggctttgcctacgaccctacggcccccacactcttcaccatgctggacctgctgcccccggcaccgccacacgctagcgctgttgtgtgcagcggaggtgccggggccgtggttggggagacccccggccctgaaccactgacactggactcgtaccaggccccgggccccggggatggaggcaccgccagccttgtgggcagcaacatgttccccaatcattaccgcgaggcggcctttgggggcggcctcctatccccggggcctgaagccacgtagccccgcgatgccagaggaggggcactgggtggggagggaggtggaggagccgtgcaatcccaaccaggatgtctagcacccccatccccttggcccttcctcatgcttctgaagtggacatattcagccttggcgagaagctccgttgcacgggtttccccttgagcccattttacagatgaggaaactgagtccggagaggaaaagggacatggctcccgtgcactagcttgttacagctgcctctgtccccacatgtgggggcaccttctccagtaggattcggaaaagattgtacatatgggaggagggggcagattcctggccctccctccccagacttgacttgaaggtggggggtaggttggttgttcagagtcttcccaataaagatgagtttttgagcctcaaaaaaaaaaaaaggaattcc

SEQ ID NO: 1563 - protein, 579 aa, Homo sapien
MLRSGPASGPSVPTGRAMPSRRVARPPAAPELGALGSPDLSSLSLAVSRSTDELEIIDEYIKENGFGLDGGQPGPGEGLPRLVSRGAASLSTVTLGPVAPPATPPPWGCPLGRLVSPAPGPGPQPHLVITEQPKQRGMPFRYECEGRSAGSILGESSTEASKTLPAIELRDCGGLREVEVTACLVWKDWPHRVHPHSLVGKDCTDGICRVRLRPHVSPRHSFNNLGIQCVRKKEIEAAIERKIQLGIDPYNAGSLKNHQEVDMNVVRICFQASYRDQQGQMRRMDPVLSEPVYDKKSTNTSELRICRINKESGPCTGGEELYLLCDKVQKEDISVVFSRASWEGRADFSQADVHRQIAIVFKTPPYEDLEIVEPVTVNVFLQRLTDGVCSEPLPFTYLPRDHDSYGVDKKAKRGMPDVLGELNSSDPHGIESKRRKKKPAILDHFLPNHGSGPFLPPSALLPDPDFFSGTVSLPGLEPPGGPDLLDDGFAYDPTAPTLFTMLDLLPPAPPHASAVVCSGGAGAVVGETPGPEPLTLDSYQAPGPGDGGTASLVGSNMFPNHYREAAFGGGLLSPGPEAT

SEQ ID NO: 1564 - DNA, 2494 bp, Homo sapien
ggggtgagagctcctcctaggacacccctttccccttggggaaagaattgtgcccccaggcccttccccgcggaggtccctctcctccttccccctcatctccccttcctgggacagaaagtgcctccacctgcatccccaggggcccggcctccagggcccgctggccccacagcaggcaagctgagatgacggtcaagctggatttcgaggagtgtctcaaggactcaccccgtttccgagcctctattgagctggtggaagccgaagtgtcagaattggagacccgtctggaaaagctcctgaaactgggcactggtctcctggaaagtgggcgccattaccttgctgccagccgcgccttcgttgtcggcatttgtgacctggcccgcctgggtccaccagagcccatgatggcggagtgtctggaaaaattcaccgtgagcctgaaccacaagctggacagccatgcggagcttctagatgccacccaacacacactgcagcagcagatccagaccctggtcaaggaaggtctgcggggtttccgagaggctcgccgggatttctggcggggggctgagagcctggaggctgccctgacccacaacgcagaggttcccaggcgccgggcccaggaggcagaagaggcaggagctgctttgaggacggctcgagctgggtaccggggacgggcactggattatgccctgcagatcaacgtgattgaggacaagaggaagtttgacatcatggagtttgtgctgcgtttggtggaggcccaggctacccatttccagcagggccatgaggagctgagccggctgtcccagtatcgaaaggagctgggcgcccagttgcaccagctggtcttgaattcagcacgagagaagagggacatggagcagagacacgtgctgctgaaacagaaggagctgggtggggaggagccagaaccaagcttaagagaggggcctggtggcctggtgatggaaggacatctcttcaaacgggccagcaacgcatttaagacctggagcagacgctggttcaccattcagagcaaccaactggtttaccagaagaagtacaaggaccctgtgactgtggtggtggatgaccttcgtctctgcacagtgaaactctgccctgactcagaaaggcggttctgctttgaggtggtgtccaccagcaagtcctgcctcctccaggctgactcagagcgcctcctgcagctgtgggtcagtgctgtgcagagcagcattgcttctgccttcagtcaggctcgccttgatgacagcccccggggtccaggccagggctcaggacacctggccataggctctgctgccaccctgggctctggtggaatggccaggggaagggagcctgggggagtcgggcacgtggtggcccaggtccagagtgtggatggcaatgcccagtgctgcgactgccgggagccagccccggagtgggccagcatcaaccttggtgtcaccctctgcattcagtgttccggcatccacaggagccttggtgttcacttctccaaagtccggtctctgacccttgactcatgggagccagaactagtgaagctcatgtgtgagctgggaaatgtcatcatcaaccagatctatgaggcccgcgtggaggccatggcagtgaagaaaccagggcccagctgctcccggcaggagaaggaggcctggattcacgctaaatacgtggagaagaagttcctgaccaagctgcctgagattcgagggcgaagaggtggccgggggcgcccaagggggcagcctcctgtgcccccaaagccttccatcaggccccggccagggagcttgagatccaagccagagcccccctctgaggacctgggaagcctgcaccctggggccctactgtttcgagcgtctgggcatcctccatctcttcccaccatggctgatgcccttgcccatggagctgatgtcaactgggtcaatgggggccaagataatgccacaccgctgatccaggccacagctgctaattctcttctggcctgtgagtttctcctccagaacggggcgaacgtgaaccaagcggacagtgcgggccggggcccgctgcaccacgcaaccattcttggccacacggggctcgcctgcctgttcctgaaacggggagctgatctgggggctcgagactctgaaggcagggaccctctgaccatcgccatggaaacagccaacgctgacatcgtcaccctgctacgactggcaaagatgagggaggctgaagcggcccaggggcaggcaggagatgagacgtatcttgacatcttccgcgacttctccctcatggcgtcagacgacccggagaagctgagccgtcgcagtcatgacctccacacgctgtgacccgaggcccacggggcccgcgcctgcctcccttccccgccaccgggccctctgccattaaagcctccgtgcttcgctcttcc

SEQ ID NO: 1565 - protein, 740 aa, Homo sapien
MTVKLDFEECLKDSPRFRASIELVEAEVSELETRLEKLLKLGTGLLESGRHYLAASRAFVVGICDLARLGPPEPMMAECLEKFTVSLNHKLDSHAELLDATQHTLQQQIQTLVKEGLRGFREARRDFWRGAESLEAALTHNAEVPRRRAQEAEEAGAALRTARAGYRGRALDYALQINVIEDKRKFDIMEFVLRLVEAQATHFQQGHEELSRLSQYRKELGAQLHQLVLNSAREKRDMEQRHVLLKQKELGGEEPEPSLREGPGGLVMEGHLFKRASNAFKTWSRRWFTIQSNQLVYQKKYKDPVTVVVDDLRLCTVKLCPDSERRFCFEVVSTSKSCLLQADSERLLQLWVSAVQSSIASAFSQARLDDSPRGPGQGSGHLAIGSAATLGSGGMARGREPGGVGHVVAQVQSVDGNAQCCDCREPAPEWASINLGVTLCIQCSGIHRSLGVHFSKVRSLTLDSWEPELVKLMCELGNVIINQIYEARVEAMAVKKPGPSCSRQEKEAWIHAKYVEKKFLTKLPEIRGRRGGRGRPRGQPPVPPKPSIRPRPGSLRSKPEPPSEDLGSLHPGALLFRASGHPPSLPTMADALAHGADVNWVNGGQDNATPLIQATAANSLLACEFLLQNGANVNQADSAGRGPLHHATILGHTGLACLFLKRGADLGARDSEGRDPLTIAMETANADIVTLLRLAKMREAEAAQGQAGDETYLDIFRDFSLMASDDPEKLSRRSHDLHTL

SEQ ID NO: 1566 - DNA, 1627 bp, Homo sapien
ctccgctgctgtcgccaggagtcacttcacgagaagccaggtcacaaccgtcggcccttgtctggaaaagtaaaagtggatcctgccacgttcggagctccctggcgcctcgcccggctggagctagagaactcgtcctgtggcggcccccggcgtggggcgggacagcggccccctggagggggcagtcccgggagaacctgcggcggccggagcggtaaaaataagtgactaaagaagcagacctgggaatcacctaacatgtcgaggaggagatttgattgccgaagtatttcaggcctactaactacaactcctcaaattccaataaaaatggaaaactttaataatttctatatacttacatctaaagagctagggagaggaaaatttgctgtggttagacaatgtatatcaaaatctactggccaagaatatgctgcaaaatttctaaaaaagagaagaagaggacaggattgtcgggcagaaattttacacgagattgctgtgcttgaattggcaaagtcttgtccccgtgttattaatcttcatgaggtctatgaaaatacaagtgaaatcattttgatattggaatatgctgcaggtggagaaattttcagcctgtgtttacctgagttggctgaaatggtttctgaaaatgatgttatcagactcattaaacaaatacttgaaggagtttattatctacatcagaataacattgtacaccttgatttaaagccacagaatatattactgagcagcatataccctctcggggacattaaaatagtagattttggaatgtctcgaaaaatagggcatgcgtgtgaacttcgggaaatcatgggaacaccagaatatttagctccagaaatcctgaactatgatcccattaccacagcaacagatatgtggaatattggtataatagcatatatgttgttaactcacacatcaccatttgtgggagaagataatcaagaaacatacctcaatatttctcaagttaatgtagattattcggaagaaactttttcatcagtttcacagctggccacagactttattcagagccttttagtaaaaaatccagagaaaagaccaacagcagagatatgcctttctcattcttggctacagcagtgggactttgaaaacttgtttcaccctgaagaaacttccagttcctctcaaactcaggatcattctgtaaggtcctctgaagacaagacttctaaatcctcctgtaatggaacctgtggtgatagagaagacaaagagaatatcccagaggatagcagcatggtttccaaaagatttcgtttcgatgactcattacccaatccccatgaacttgtttcagatttgctctgttagcacttttttctttgactcatttggactgaatttgaaattttatatccactccagtgagattatgatttgtagcttcatatatgacatgtttatattgtaaatgcacttttccatggaataatttagggaagtgttttaatgttaaattactagttgctagcatgttatgatttcatatcctgagatagctctgcagataagaaaatatttaaatatatgacaaaaagtaaaattgtacatgtgaaag

SEQ ID NO: 1567 - protein, 372 aa, Homo sapien
MSRRRFDCRSISGLLTTTPQIPIKMENFNNFYILTSKELGRGKFAVVRQCISKSTGQEYAAKFLKKRRRGQDCRAEILHEIAVLELAKSCPRVINLHEVYENTSEIILILEYAAGGEIFSLCLPELAEMVSENDVIRLIKQILEGVYYLHQNNIVHLDLKPQNILLSSIYPLGDIKIVDFGMSRKIGHACELREIMGTPEYLAPEILNYDPITTATDMWNIGIIAYMLLTHTSPFVGEDNQETYLNISQVNVDYSEETFSSVSQLATDFIQSLLVKNPEKRPTAEICLSHSWLQQWDFENLFHPEETSSSSQTQDHSVRSSEDKTSKSSCNGTCGDREDKENIPEDSSMVSKRFRFDDSLPNPHELVSDLLC

SEQ ID NO: 1568 - DNA, 1292 bp, Homo sapien
cagggagttgagaaactgtggcacaaggcgagagctggtttcctctgccctgttagagctgggggactcttcagagtcaaaggccagagagcatggagctgagtggagccaccatggcccgggggctcgctgtcctgctagtcttgttcctgcatatcaagaacctgcctgcccaggctgcggacacatgtccagaggtgaaggtggtgggcctggagggctctgacaagctcaccattctccgaggctgcccggggctgcccggggccccagggccaaagggagaggcaggtgtcattggagagagaggagaacgcggtctccctggagcccctggaaaggcaggaccagtggggcccaaaggagaccgaggagagaaggggatgcgtggagagaaaggagacgctgggcagtctcagtcgtgtgcgacaggcccacgcaactgcaaggacctgctagaccgggggtatttcctgagcggctggcacaccatctacctgcccgactgccggcccctgactgtgctctgtgacatggacacggacggagggggctggaccgttttccagcggaggatggatggctctgtggacttctatcgggactgggccgcatacaagcagggcttcggcagtcagctgggggagttctggctggggaacgacaacatccacgccctgactgcccagggaagcagcgagctccgtgtagacctggtggactttgagggcaaccaccagtttgctaagtacaaatcattcaaggtggctgacgaggcagagaagtacaagctggtactgggagcctttgtcgggggcagtgcgggtaattctctaacgggccacaacaacaacttcttctccaccaaagaccaagacaatgatgtgagttcttcgaattgtgctgagaagttccagggagcctggtggtacgccgactgtcatgcttcaaacctcaatggtctctacctcatgggaccccatgagagctatgccaatggtatcaactggagtgcggcgaaggggtacaaatatagctacaaggtgtcagagatgaaggtgcggcccgcctagacgggccaggacccctccacatgcacctgctagtggggaggccacacccacaagcgctgcgtcgtggaagtcaccccatttccccagccagacacactcccatgacgcccacagctgcccctttgcccccagctcagtcaagccgccacatgcccacaacctcaccagagggagaattatgtttctaaatatgtttactttgggacagaaaaaaaaaaa

SEQ ID NO: 1569 - protein, 326 aa, Homo sapien
MELSGATMARGLAVLLVLFLHIKNLPAQAADTCPEVKVVGLEGSDKLTILRGCPGLPGAPGPKGEAGVIGERGERGLPGAPGKAGPVGPKGDRGEKGMRGEKGDAGQSQSCATGPRNCKDLLDRGYFLSGWHTIYLPDCRPLTVLCDMDTDGGGWTVFQRRMDGSVDFYRDWAAYKQGFGSQLGEFWLGNDNIHALTAQGSSELRVDLVDFEGNHQFAKYKSFKVADEAEKYKLVLGAFVGGSAGNSLTGHNNNFFSTKDQDNDVSSSNCAEKFQGAWWYADCHASNLNGLYLMGPHESYANGINWSAAKGYKYSYKVSEMKVRPA

SEQ ID NO: 1570 - DNA, 1270 bp, Homo sapien
agacgttcgcacacctgggtgccagcgccccagaggtcccgggacagcccgaggcgccgcgcccgccgccccgagctccccaagccttcgagagcggcgcacactcccggtctccactcgctcttccaacacccgctcgttttggcggcagctcgtgtcccagagaccgagttgccccagagaccgagacgccgccgctgcgaaggaccaatgagagccccgctgctaccgccggcgccggtggtgctgtcgctcttgatactcggctcaggccattatgctgctggattggacctcaatgacacctactctgggaagcgtgaaccattttctggggaccacagtgctgatggatttgaggttacctcaagaagtgagatgtcttcagggagtgagatttcccctgtgagtgaaatgccttctagtagtgaaccgtcctcgggagccgactatgactactcagaagagtatgataacgaaccacaaatacctggctatattgtcgatgattcagtcagagttgaacaggtagttaagcccccccaaaacaagacggaaagtgaaaatacttcagataaacccaaaagaaagaaaaagggaggcaaaaatggaaaaaatagaagaaacagaaagaagaaaaatccatgtaatgcagaatttcaaaatttctgcattcacggagaatgcaaatatatagagcacctggaagcagtaacatgcaaatgtcagcaagaatatttcggtgaacggtgtggggaaaagtccatgaaaactcacagcatgattgacagtagtttatcaaaaattgcattagcagccatagctgcctttatgtctgctgtgatcctcacagctgttgctgttattacagtccagcttagaagacaatacgtcaggaaatatgaaggagaagctgaggaacgaaagaaacttcgacaagagaatggaaatgtacatgctatagcataactgaagataaaattacaggatatcacattggagtcactgccaagtcatagccataaatgatgagtcggtcctctttccagtggatcataagacaatggaccctttttgttatgatggttttaaactttcaattgtcactttttatgctatttctgtatataaaggtgcacgaaggtaaaaagtattttttcaagttgtaaataatttatttaatatttaatggaagtgtatttattttacagctcattaaacttttttaaccaaacagaaaaaaaaaaaaaaaaaaaaaaaaaaaaaaaaa

SEQ ID NO: 1571 - protein, 252 aa, Homo sapien
MRAPLLPPAPVVLSLLILGSGHYAAGLDLNDTYSGKREPFSGDHSADGFEVTSRSEMSSGSEISPVSEMPSSSEPSSGADYDYSEEYDNEPQIPGYIVDDSVRVEQVVKPPQNKTESENTSDKPKRKKKGGKNGKNRRNRKKKNPCNAEFQNFCIHGECKYIEHLEAVTCKCQQEYFGERCGEKSMKTHSMIDSSLSKIALAAIAAFMSAVILTAVAVITVQLRRQYVRKYEGEAEERKKLRQENGNVHAIA

SEQ ID NO: 1572 - DNA, 931 bp, Homo sapien
gcagagcccagggagctggaggtcggcgcttcctctcgtgcttggtccactgacgcgcggccccgccgcgaggagcatcagatccatgctgctgctgactcggagccccacagcttggcacaggctctctcagctcaagcctccggtcctccctgggaccctgggaggccaggccctgcatctgaggtcctggcttttgtcaaggcagggccctgcagagacaggtgggcagggccagccccagggccctgggcttcgaacccggctgctgatcacaggcctgttcggggctggactcggtggggcctggctggccctgagggctgagaaggagaggctgcagcagcaaaagcgaacagaagccctgcgccaggcagctgtgggccagggcgacttccacctgctggatcacagaggccgggctcgctgcaaggctgacttccggggccagtgggtgctgatgtactttggcttcactcactgccctgacatctgcccagacgagctggagaagctggtgcaggtggtgcggcagctggaagcagagcctggtttgcctccagtgcagcctgtcttcatcactgtggaccccgagcgggacgacgttgaagccatggcccgctacgtccaggacttccacccaagactgttgggtctgaccggctccaccaaacaggttgcccaggctagtcacagttaccgcgtgtactacaatgccggccccaaggatgaggaccaggactacatcgtggaccactccattgccatctacctgctcaaccctgacggcctcttcacggattactacggccggagcagatcggctgagcagatctcagacagtgtgcggcggcacatggcggctttccgcagtgtcctgtcttgagccactgcagtctgggccccatcattaaacgggctgcgtttaaaa

SEQ ID NO: 1573 - protein, 266 aa, Homo sapien
MLLLTRSPTAWHRLSQLKPPVLPGTLGGQALHLRSWLLSRQGPAETGGQGQPQGPGLRTRLLITGLFGAGLGGAWLALRAEKERLQQQKRTEALRQAAVGQGDFHLLDHRGRARCKADFRGQWVLMYFGFTHCPDICPDELEKLVQVVRQLEAEPGLPPVQPVFITVDPERDDVEAMARYVQDFHPRLLGLTGSTKQVAQASHSYRVYYNAGPKDEDQDYIVDHSIAIYLLNPDGLFTDYYGRSRSAEQISDSVRRHMAAFRSVLS

SEQ ID NO: 1574 - DNA, 1216 bp, Homo sapien
ttcggcacttgggagaagatgtttgaaaaaactgactctgctaatgagcctggactcagagctcaagtctgaactctacctccagacagaatgaagttcatctcgacatctctgcttctcatgctgctggtcagcagcctctctccagtccaaggtgttctggaggtctattacacaagcttgaggtgtagatgtgtccaagagagctcagtctttatccctagacgcttcattgatcgaattcaaatcttgccccgtgggaatggttgtccaagaaaagaaatcatagtctggaagaagaacaagtcaattgtgtgtgtggaccctcaagctgaatggatacaaagaatgatggaagtattgagaaaaagaagttcttcaactctaccagttccagtgtttaagagaaagattccctgatgctgatatttccactaagaacacctgcattcttcccttatccctgctctggattttagttttgtgcttagttaaatcttttccagggagaaagaacttccccatacaaataaggcatgaggactatgtgaaaaataaccttgcaggagctgatggggcaaactcaagcttcttcactcacagcaccctatatacacttggagtttgcattcttattcatcagggaggaaagtttctttgaaaatagttattcagttataagtaatacaggattattttgattatatacttgttgtttaatgtttaaaatttcttagaaaacaatggaatgagaatttaagcctcaaatttgaacatgtggcttgaattaagaagaaaattatggcatatattaaaagcaggcttctatgaaagactcaaaaagctgcctgggaggcagatggaacttgagcctgtcaagaggcaaaggaatccatgtagtagatatcctctgcttaaaaactcactacggaggagaattaagtcctacttttaaagaatttctttataaaatttactgtctaagattaatagcattcgaagatccccagacttcatagaatactcagggaaagcatttaaagggtgatgtacacatgtatcctttcacacatttgccttgacaaacttctttcactcacatctttttcactgactttttttgtgggggcggggccggggggactctggtatctaattctttaatgattcctataaatctaatgacattcaataaagttgagcaaacattttactt

SEQ ID NO: 1575 - protein, 109 aa, Homo sapien
MKFISTSLLLMLLVSSLSPVQGVLEVYYTSLRCRCVQESSVFIPRRFIDRIQILPRGNGCPRKEIIVWKKNKSIVCVDPQAEWIQRMMEVLRKRSSSTLPVPVFKRKIP

SEQ ID NO: 1576 - DNA, 2984 bp, Homo sapien
taactgagcgaggagcaattgattaatagctcggcgaggggactcactgactgttataataacactacaccagcaactcctggcttcccagcagccggaacacagacaggagagagtcagtggcaaatagacatttttcttatttcttaaaaaacagcaacttgtttgctacttttatttctgttgatttttttttcttggtgtgtgtggtggttgtttttaagtgtggagggcaaaaggagataccatcccaggctcagtccaacccctctccaaaacggcttttctgacactccaggtagcgagggagttgggtctccaggttgtgcgaggagcaaatgatgaccgccaaggccgtagacaaaatcccagtaactctcagtggttttgtgcaccagctgtctgacaacatctacccggtggaggacctcgccgccacgtcggtgaccatctttcccaatgccgaactgggaggcccctttgaccagatgaacggagtggccggagatggcatgatcaacattgacatgactggagagaagaggtcgttggatctcccatatcccagcagctttgctcccgtctctgcacctagaaaccagaccttcacttacatgggcaagttctccattgaccctcagtaccctggtgccagctgctacccagaaggcataatcaatattgtgagtgcaggcatcttgcaaggggtcacttccccagcttcaaccacagcctcatccagcgtcacctctgcctcccccaacccactggccacaggacccctgggtgtgtgcaccatgtcccagacccagcctgacctggaccacctgtactctccgccaccgcctcctcctccttattctggctgtgcaggagacctctaccaggacccttctgcgttcctgtcagcagccaccacctccacctcttcctctctggcctacccaccacctccttcctatccatcccccaagccagccacggacccaggtctcttcccaatgatcccagactatcctggattctttccatctcagtgccagagagacctacatggtacagctggcccagaccgtaagccctttccctgcccactggacaccctgcgggtgccccctccactcactccactctctacaatccgtaactttaccctggggggccccagtgctggggtgaccggaccaggggccagtggaggcagcgagggaccccggctgcctggtagcagctcagcagcagcagcagccgccgccgccgccgcctataacccacaccacctgccactgcggcccattctgaggcctcgcaagtaccccaacagacccagcaagacgccggtgcacgagaggccctacccgtgcccagcagaaggctgcgaccggcggttctcccgctctgacgagctgacacggcacatccgaatccacactgggcataagcccttccagtgtcggatctgcatgcgcaacttcagccgcagtgaccacctcaccacccatatccgcacccacaccggtgagaagcccttcgcctgtgactactgtggccgaaagtttgcccggagtgatgagaggaagcgccacaccaagatccacctgagacagaaagagcggaaaagcagtgccccctctgcatcggtgccagccccctctacagcctcctgctctgggggcgtgcagcctgggggtaccctgtgcagcagtaacagcagcagtcttggcggagggccgctcgccccttgctcctctcggacccggacaccttgagatgagactcaggctgatacaccagctcccaaaggtcccggaggccctttgtccactggagctgcacaacaaacactaccaccctttcctgtccctctctccctttgttgggcaaagggctttggtggagctagcactgccccctttccacctagaagcaggttcttcctaaaacttagcccattctagtctctcttaggtgagttgactatcaacccaaggcaaaggggaggctcagaaggaggtggtgtggggatcccctggccaagagggctgaggtctgaccctgctttaaagggttgtttgactaggttttgctaccccacttccccttattttgacccatcacaggtttttgaccctggatgtcagagttgatctaagacgttttctacaataggttgggagatgctgatcccttcaagtggggacagcaaaaagacaagcaaaactgatgtgcactttatggcttgggactgatttgggggacattgtacagtgagtgaagtatagcctttatgccacactctgtggccctaaaatggtgaatcagagcatatctagttgtctcaacccttgaagcaatatgtattatatactcagagaacagaagtgcaatgtgatgggaggaacgtagcaatatctgctccttttcgagttgtttgagaaatgtaggctattttttcagtgtatatccactcagattttgtgtatttttgatgtacccacactgttctctaaattctgaatctttgggaaaaaatgtaaagcatttatgatctcagaggttaacttatttaagggggatgtacatattctctgaaactaggatgcatgcaattgtgttggaagtgtccttggtcgccttgtgtgatgtagacaaatgttacaaggctgcatgtaaatgggttgccttattatggagaaaaaaatcactccctgagtttagtatggctgtatatttatgcctattaatatttggaattttttttagaaagtatatttttgtatgctttgttttgtgacttaaaagtgttacctttgtagtcaaatttcagataagaatgtacataatgttaccggagctgatttgtttggtcattagctcttaatagttgtgaaaaaataaatctattctaacgcaaaaccactaactgaagttcagatataatggatggtttgtgactatagtgtaaataaatacttttcaacaat

SEQ ID NO: 1577 - protein, 476 aa, Homo sapien
MMTAKAVDKIPVTLSGFVHQLSDNIYPVEDLAATSVTIFPNAELGGPFDQMNGVAGDGMINIDMTGEKRSLDLPYPSSFAPVSAPRNQTFTYMGKFSIDPQYPGASCYPEGIINIVSAGILQGVTSPASTTASSSVTSASPNPLATGPLGVCTMSQTQPDLDHLYSPPPPPPPYSGCAGDLYQDPSAFLSAATTSTSSSLAYPPPPSYPSPKPATDPGLFPMIPDYPGFFPSQCQRDLHGTAGPDRKPFPCPLDTLRVPPPLTPLSTIRNFTLGGPSAGVTGPGASGGSEGPRLPGSSSAAAAAAAAAAYNPHHLPLRPILRPRKYPNRPSKTPVHERPYPCPAEGCDRRFSRSDELTRHIRIHTGHKPFQCRICMRNFSRSDHLTTHIRTHTGEKPFACDYCGRKFARSDERKRHTKIHLRQKERKSSAPSASVPAPSTASCSGGVQPGGTLCSSNSSSLGGGPLAPCSSRTRTP

SEQ ID NO: 1578 - DNA, 2910 bp, Homo sapien
gcccaggtgactgactaatccgccgccttcaggagacagaattggccaaggcctgaaggccccggagtgcaccagcggcatgtacaaagagaccgtctactccgccttcaatctgctcatgcattacccacccccctcgggagcagggcagcacccccagccgcagcccccgctgcacaaggccaatcagcccccccacggtgtcccccaactctctctctacgaacatttcaacagcccacatcccacccctgcacctgcggacatcagccagaagcaagttcacaggcctctgcagacccctgacctctctggcttctactccctgacctcaggcagcatggggcagctcccccacactgtgagctggttcacccacccatccttgatgctaggttctggtgtacctggtcacccagcagccatcccccacccggccattgtgcccccctcagggaagcaggagctgcagcccttcgaccgcaacctgaagacacaagcagagtccaaggcagagaaggaggccaagaagccaaccatcaagaagcccctcaatgccttcatgctgtacatgaaggagatgagagccaaggtcattgcagagtgcacacttaaggagagcgctgccatcaaccagatcctgggccgcaggtggcacgcgctgtcgcgagaagagcaggccaagtactatgagctggcccgcaaggagaggcagctgcacatgcagctatacccaggctggtcagcgcgggacaactacgggaagaagaagaggcggtcgagggaaaagcaccaagaatccaccacagaccctggctcgcctaagaaatgccgtgctcgctttggcctcaaccagcagacggattggtgtggtccgtgcagataactctcttcactattcctaggaggaaaaagaaatgcattcggtacttacccggagaaggccgctgccccagccccgttccttccgatgacagtgctctaggctgccccgggtccccagctccccaggactcaccctcataccatctgctgccccgcttccccacagaactgcttactagccctgcggagcggcacctacatccccaggtctctccactgctctcagcctcccaaccccagggcccccacaggccccccgcagcaccctgcagagcacacaggtacagcaacaggaatctcagagacaggtggcctagcaggcacaggacacctggccgcctccaggagcctaccccctgaaaatgacagagacccagatctcatggaaactggcaggggtcctgttaacgtcatctcagggtccagaccctgaagatttcagaggctgcagaacttctgcctgaacctggggtcatcgattcaaactgctccaagtggtgggaatcagatctgtcttgatgtgtcatctaattaagggaatcccttgtacctatgactccgtcgatctattctttgtaccatctgtcttgccagccagaagcctctgcctccctagcttttctgctataggtcagagatgggctgaactgagcctagctaccttctctacccatctcccccatcccccactgccacaccctccccattcagacacttcatggaccaagaatgagctggtttgtcaaacaacatgtgagcatggtcacaagcacaaagctcaagatgacagctcttctaaggaaatggagaagctctgtttataaaaacaaaaacaaaaccagctgctactcataagttggaccagaggaagccccttactatgatctcaggagcttgcaagaagcaggaaggggaatggaataggttaagtttaggcctatcaacctaagcaacagaaataatctgacactaccttatcaggcaaattggggaggggagggtgtatctagctctagttcaaattatttggaagtgttccctgagaaacccaccagcctaagaagctctggccccaggcttgtcactagcagctgcagtcaacagttcaaagaagtcatggcccaaatccagtgtgcacccctccccattcacagagcctttttcacaattccatttccagttcatctatggcagtccagccagcttctgggcagcttgagagggcaaacccaaaacctcatgacagccagagcctgtctttcagcattcagtcgcctgggaagctccagtttccccatggggctgcgggacagaggaccattacaactagatcaaggagcccagaaaacctccagtagtggacaacaggttttcaccatagcctacgttaacccatttttgagccaagcttcaaccctcagccttgaaaaacaagtctttaatttaatttttgttttttgcctaaatccaaagaaaaagggctgccgggccaggcgcggtcgtcacgcctgtaatcccagcactttggcaggccgaggcaggtggatcacctgacgtcagtagtttgagaccagcctggccaacatggtgaaaccctgtatctactaaaaatacaaaaattagccggacgtggtggtgcgcgcatgtaatcccagctactcgggaggctgaggcggaagaatcacttgaacccgggaggcggaggttccagtgagccgagatggcgctattgcactccagtctgggtaacagggagactgcatctcaaaaaaaaaaaaaaaaaaaaagggctgtccatgtattcacacacccctcaaaaaaagcctttagttcctactttagccactggtttctcagaatccaaagatcacatattctagtgtaacactgcaagaagtcttgagaaaaagattattgtagtgttcaaaatatttttgtattgttaatgcatcatcatagaaaaacttttaaacatgagaataaagatactttttactgggtttgtttttcaaagcctgaaaaaaa

SEQ ID NO: 1579 - protein, 268 aa, Homo sapien
MYKETVYSAFNLLMHYPPPSGAGQHPQPQPPLHKANQPPHGVPQLSLYEHFNSPHPTPAPADISQKQVHRPLQTPDLSGFYSLTSGSMGQLPHTVSWFTHPSLMLGSGVPGHPAAIPHPAIVPPSGKQELQPFDRNLKTQAESKAEKEAKKPTIKKPLNAFMLYMKEMRAKVIAECTLKESAAINQILGRRWHALSREEQAKYYELARKERQLHMQLYPGWSARDNYGKKKRRSREKHQESTTDPGSPKKCRARFGLNQQTDWCGPCR

SEQ ID NO: 1580 - DNA, 2910 bp, Homo sapien; identical to SEQ ID NO: 1578

SEQ ID NO: 1581 - protein, 268 aa, Homo sapien; identical to SEQ ID NO: 1579

SEQ ID NO: 1582 - DNA, 5749 bp, Homo sapien
cgcgggagccaacttcaggctgctcagaggaagcccgtgcagtcagtcacctgggtgcaagagcgttgctgcctcgggctctcccgctgcagggagagcggcactcgctggcctggatgtggttggatttaggggggctccgcagcaggggtttcgtggcggtggcaagcgctgcaacaggtagacggcgagagacggaccccggccgaggcagggatggagaccaaaggctaccacagtctccctgaaggtctagatatggaaagacggtggggtcaagtttctcaggctgtggagcgttcttccctgggacctacagagaggaccgatgagaataactacatggagattgtcaacgtaagctgtgtttccggtgctattccaaacaacagtactcaaggaagcagcaaagaaaaacaagaactactcccttgccttcagcaagacaataatcggcctgggattttaacatctgatattaaaactgagctggaatctaaggaactttcagcaactgtagctgagtccatgggtttatatatggattctgtaagagatgctgactattcctatgagcagcagaaccaacaaggaagcatgagtccagctaagatttatcagaatgttgaacagctggtgaaattttacaaaggaaatggccatcgtccttccactctaagttgtgtgaacacgcccttgagatcatttatgtctgactctgggagctccgtgaatggtggcgtcatgcgcgccattgttaaaagccctatcatgtgtcatgagaaaagcccgtctgtttgcagccctctgaacatgacatcttcggtttgcagccctgctggaatcaactctgtgtcctccaccacagccagctttggcagttttccagtgcacagcccaatcacccagggaactcctctgacatgctcccctaatgctgaaaatcgaggctccaggtcgcacagccctgcacatgctagcaatgtgggctctcctctctcaagtccgttaagtagcatgaaatcctcaatttccagccctccaagtcactgcagtgtaaaatctccagtctccagtcccaataatgtcactctgagatcctctgtgtctagccctgcaaatattaacaactcaaggtgctctgtttccagcccttcgaacactaataacagatccacgctttccagtccggcagccagtactgtgggatctatctgtagccctgtaaacaatgccttcagctacactgcttctggcacctctgctggatccagtacattgcgggatgtggttcccagtccagacacgcaggagaaaggtgctcaagaggtcccttttcctaagactgaggaagtagagagtgccatctcaaatggtgtgactggccagcttaatattgtccagtacataaaaccagaaccagatggagcttttagcagctcatgtctaggaggaaatagcaaaataaattcggattcttcattctcagtaccaataaagcaagaatcaaccaagcattcatgttcaggcacctcttttaaagggaatccaacagtaaacccgtttccatttatggatggctcgtatttttcctttatggatgataaagactattattccctatcaggaattttaggaccacctgtgcccggctttgatggtaactgtgaaggcagcggattcccagtgggtattaaacaagaaccagatgacgggagctattacccagaggccagcatcccttcctctgctattgttggggtgaattcaggtggacagtccttccactacaggattggtgctcaaggtacaatatctttatcacgatcggctagagaccaatctttccaacacctgagttcctttcctcctgtcaatactttagtggagtcatggaaatcacacggcgacctgtcgtctagaagaagtgatgggtatccggtcttagaatacattccagaaaatgtatcaagctctactttacgaagtgtttctactggatcttcaagaccttcaaaaatatgtttggtgtgtggggatgaggcttcaggatgccattatggggtagtcacctgtggcagctgcaaagttttcttcaaaagagcagtggaagggcaacacaactatttatgtgctggaagaaatgattgcatcattgataagattcgacgaaagaattgtcctgcttgcagacttcagaaatgtcttcaagctggaatgaatttaggagcacgaaagtcaaagaagttgggaaagttaaaagggattcacgaggagcagccacagcagcagcagcccccacccccacccccacccccgcaaagcccagaggaagggacaacgtacatcgctcctgcaaaagaaccctcggtcaacacagcactggttcctcagctctccacaatctcacgagcgctcacaccttcccccgttatggtccttgaaaacattgaacctgaaattgtatatgcaggctatgacagctcaaaaccagatacagccgaaaatctgctctccacgctcaaccgcttagcaggcaaacagatgatccaagtcgtgaagtgggcaaaggtacttccaggatttaaaaacttgcctcttgaggaccaaattaccctaatccagtattcttggatgtgtctatcatcatttgccttgagctggagatcgtacaaacatacgaacagccaatttctctattttgcaccagacctagtctttaatgaagagaagatgcatcagtctgccatgtatgaactatgccaggggatgcaccaaatcagccttcagttcgttcgactgcagctcacctttgaagaatacaccatcatgaaagttttgctgctactaagcacaattccaaaggatggcctcaaaagccaggctgcatttgaagaaatgaggacaaattacatcaaagaactgaggaagatggtaactaagtgtcccaacaattctgggcagagctggcagaggttctaccaactgaccaagctgctggactccatgcatgacctggtgagcgacctgctggaattctgcttctacaccttccgagagtcccatgcgctgaaggtagagttccccgcaatgctggtggagatcatcagcgaccagctgcccaaggtggagtcggggaacgccaagccgctctacttccaccggaagtgactgcccgctgcccagaagaactttgccttaagtttccctgtgttgttccacacccagaaggacccaagaaaacctgtttttaacatgtgatggttgattcacacttgttcaacagtttctcaagtttaaagtcatgtcagaggtttggagccgggaaagctgtttttccgtggatttggcgagaccagagcagtctgaaggattccccacctccaatcccccagcgcttagaaacatgttcctgttcctcgggatgaaaagccatatctagtcaataactctgattttgatattttcacagatggaagaagttttaactatgccgtgtagtttctggtatcgttcgcttgttttaaaagggttcaaggactaacgaacgttttaaagcttacccttggtttgcacataaaacgtatagtcaatatggggcattaatattcttttgttattaaaaaaacacaaaaaaataataaaaaaatatatacagattcctgttgtgtaataacagaactcgtggcgtggggcagcagctgcctctgagccctcgctcgtccacggtcttctgcatcactggtatacacactcgttagcgtccatttcttatttaattagaatggataagatgatgttaaatgccttggtttgatttctagtatctattgtgttggctttacaaataattttttgcagtcttttgctgtgctgtacattactgtatgtataaattatgaaggacctgaaataaggtataaggatcttttgtaaatgagacacatacaaaaaaaatctttaatggttaataggatgaatgggaaagtatttttgaaagaattctattttgctggagactatttaagtactatctttgtctaaacaaggtaatttttttttgtaaagtgcaatgtcctgcatgcataatgaaccgtttacagtgtatttaagaaagggaaagctgtgccttttttagcttcatatctaatttaccattattttacagtctctgttgtaaataaccacactgaaacctcttcggttgtcttgaaacctttctactttttctgtactttttgttttgttcttggtctcccgcttggggcatttgtgggactccagcacgttttctggcttctgcttcatcctgctccatcggggaatgacacactgcggtgtctgcagctcctggaaggtgtcatttgacaacacatgtgggagaggaggtccttggagtgctgcagctttgggaaagcctgcctcgtttcccttttcctctagaagcagaaccagctctacgagagtgagactgggaacttgatggctcagagagcatcttttcctcccattttagaaaatcagattttctcctgtgggaaaaaaaaattccatgcactctctctctgttaaagatcagctattcccttctgatcttggaaagaggttctgcactcctggaaccggtcacaggaacgcacagatcatggcaggatgcgctgggacggcccatcttggcaaggttcagtctgaatggcatggagaccgggagatagaggggttttagatttttaaaaggtaggttttaaaaataagttttatacataaacagttttggagaaaaattacagatcatataagcaagacagtggcactaaaatgtttaattcattaatctgtttgtttggcactgatgcaatgtatggcttttctcttgccccaaatcacaaacatatgtatctttggggaaactaacaatatgattgcactaaataaactactttgaatagaggccaaattaatcttttaaaaatgatgataatcatcaggtttactcagtgaaatcatattaattattttccaaaatctaaaagctgtagctggagaagcccatggccacgaggaagcagcaattaattagatcaacacttttctccagggttcaccatgcaggcaacattaccttgtctttcaaaagacacctgccttagtgcaaggggaaacctgtgaaagctgcactcagagggaggagtctttcttacataatttgcaatttcaggaatttaatttataggcagatctttaaatacagtcaacttacggtgcacagtaatatgaaagccacactttgaaggtaataaatacacagcatgcagactgggagttgctagcaaacaaatggcttacttacaaaagcagcttttagttcagacttagtttttataaaatgagaattctgacttacttaaccaggtttgggatggagatggtctgcatcagctttttgtattaacaaagttactggctctttgtgtgtctccaggtaactttgcttgattaaacagcaaagccatattctaaattcactgttgaatgcctgtcccagtccaaattgtctgtctgctcttatttttgtaccatattgctcttaaaaatcttggtttggtacagttcataattcaccaaaaagttcatataatttaaagaaacactaaattagtttaaaatgaagcaatttatatctttatgcaaaaacatatgtctgtctttgcaaaggactgtaagcagattacaataaatcctttacttt

SEQ ID NO: 1583 - protein, 984 aa, Homo sapien
METKGYHSLPEGLDMERRWGQVSQAVERSSLGPTERTDENNYMEIVNVSCVSGAIPNNSTQGSSKEKQELLPCLQQDNNRPGILTSDIKTELESKELSATVAESMGLYMDSVRDADYSYEQQNQQGSMSPAKIYQNVEQLVKFYKGNGHRPSTLSCVNTPLRSFMSDSGSSVNGGVMRAIVKSPIMCHEKSPSVCSPLNMTSSVCSPAGINSVSSTTASFGSFPVHSPITQGTPLTCSPNAENRGSRSHSPAHASNVGSPLSSPLSSMKSSISSPPSHCSVKSPVSSPNNVTLRSSVSSPANINNSRCSVSSPSNTNNRSTLSSPAASTVGSICSPVNNAFSYTASGTSAGSSTLRDVVPSPDTQEKGAQEVPFPKTEEVESAISNGVTGQLNIVQYIKPEPDGAFSSSCLGGNSKINSDSSFSVPIKQESTKHSCSGTSFKGNPTVNPFPFMDGSYFSFMDDKDYYSLSGILGPPVPGFDGNCEGSGFPVGIKQEPDDGSYYPEASIPSSAIVGVNSGGQSFHYRIGAQGTISLSRSARDQSFQHLSSFPPVNTLVESWKSHGDLSSRRSDGYPVLEYIPENVSSSTLRSVSTGSSRPSKICLVCGDEASGCHYGVVTCGSCKVFFKRAVEGQHNYLCAGRNDCIIDKIRRKNCPACRLQKCLQAGMNLGARKSKKLGKLKGIHEEQPQQQQPPPPPPPPQSPEEGTTYIAPAKEPSVNTALVPQLSTISRALTPSPVMVLENIEPEIVYAGYDSSKPDTAENLLSTLNRLAGKQMIQVVKWAKVLPGFKNLPLEDQITLIQYSWMCLSSFALSWRSYKHTNSQFLYFAPDLVFNEEKMHQSAMYELCQGMHQISLQFVRLQLTFEEYTIMKVLLLLSTIPKDGLKSQAAFEEMRTNYIKELRKMVTKCPNNSGQSWQRFYQLTKLLDSMHDLVSDLLEFCFYTFRESHALKVEFPAMLVEIISDQLPKVESGNAKPLYFHRK

SEQ ID NO: 1584 - DNA, 3641 bp, Homo sapien
tttgctttcccgtttcttaaacattggcgttcccaagtttctccttggtcctcctgtcatttttatctactctcgtagcttcaaataccatctagtttatagtttatttagcatgttgtccaagccaccgtcttgggcccagggctctacctgtagcttttcatccacacttctcaggttgcttcttacacagcgccatagtagttaaaatacggtctggggatagtcgtctcttcatcagtctcccccgacgacctgcgcaggcgtggcttgaggaaacgcccgctgtgggcggagccacccgaaaggctccggtcgggggcgggaacaggatcggcccgcgggctggcgtcgataggctgccgcagagacagggcgggctctgctaagggacgcgcctcgccgtggggcggtgcctgcgcctgagcctctacgagagggaaggaacgctgctccgagctccgcgtcgcgtcgcgtagattcgcgtcgccgtcgacctcagaggcggggccggaagcgctacggtttgacccccgagtccctctgttcccgaaggggcggccgtctttctcccgacccgctccgccccctctccttcttccccattacccggaggccgaagcccccagccagggcggggcggcgcagcccgagctcccggacccggaagaagcgccatctcccgcctccaccatggagcccaccgcaccgtccctcaccgaggaggacctcactgaagtgaagaaggacgccttagaaaatttacgtgtatacctgtgtgagaaaatcatagctgagagacattttgatcatctacgtgcaaaaaaaatactcagtagagaagacactgaagaaatttcttgtcgaacatcaagtagaaaaagggctggaaaattgttagactacttacaggaaaacccaaaaggtctggacacccttgttgaatctattcggcgagaaaaaacacagaacttcctgatacagaagattacagatgaagtgctgaaacttagaaatataaaactagaacatctgaaaggactaaaatgtagcagttgtgaaccttttccagatggagccacgaacaacctctccagatcaaattcagatgagagtaatttctctgaaaaactgagggcatccactgtcatgtaccatccagaaggagaatccagcacgacgccctttttttctactaattcttctctgaatttgcctgttctagaagtaggcagaactgaaaataccatcttctcttcaactacacttcccagacctggggacccaggggctcctcctttgccaccagatctacagttagaagaagaaggaacttgtgcaaactctagtgagatgtttcttcccttaagatcacgtactgtttcacgacaatgacactttattgccttttaatttttaatgatgacaaaaaatgttttaaagaatatgactttttataaaatggctgtaatcatttgtttacatttgatgcatgtcttttaaaatgcaatgtaagcatactttgtaaataggatttttagaattaaaaaagcatacttctaggatagctaactgtaaatcatgttgatcatgtactttttagtaatttctttttttcctttttaaggtctttcagtacttttttaaatattttctattttaagactgattttaatagggaatatatctctatttgagaatagacccttactaggaagaacgttttttcctcagtgcatttgtgctagaaattttcaagagtcgaatagtctttgccagtcattcagcagcaaattttcagcattaagctgttcctgttcagtaataaaaccggtcactgatgggaaaactgccaatatagaaaaataaaaatctcttttccactccattgtcgtataggcatgtaaacagcctctttttgatactggaggaacacttgatggagtgtgagccacctaagatctcggtttgccaaaattcatttctaattaaccttactaattatactactttgttaggattttcacattcttggcttaatcattttcattcctaaagaaaaatatcttggcctaaacctcagttattacatgtaatttgatgaggtattttttccttttttctttttttttttttttttttttgagacagtcttgctctatcgcccaggctggagtgcagtggcgcattctaggctcactgcaacttctgcctcccatgcttacgtgatcctctcacctcagcctctcaagtaatatagctgagactacaagtgtgtgccaccatgcctcactaatttttgtattatttttgtagagacggtgttttgccatgttggccaggctggtcttgaactcctggactcaagcaacctacccagcgtggcctcccaaagtgctgggattacagacacgagccacctcacctagcctgatgagatttttaaaaaatattttctctgtacttttcattctcttttaatgaggaccaatgtacagttgaaataactggaacaaattatttttggtgtgtgtgacaattctgtttttaatgctatttgaacaagtgggccattagccagatttgtctttttgttgtaaaacaaaatttgactaattttacatgtttataaatcttatgctctcactgtttgtttttatttaaattacaattttatctgtttcctgacattgtctcctatatatttctattattaattgcaaaaacatagaaatggaaattttgctatcaacaataaaatttttttaaagtagtgagtgctattttggagttccaaattttcagtaggaagtatctaaaacttttttttaatacgtgccattatctatagaaaacattacttcaggttgtgagattgagttgcatttctggatggactgatgaatttatccgacatgaagaagattggcatattagctttaaaaatttttaaagattggattttttttagtataagcactttctaaggattatagagaaatgtttcacctccaatgcatagcaaaaatagtggtgttagaaagaaaataggttacatttaaggaaggtgctttaaaaagcagaagcagactttaaaattaaatttgtggacacctttttaaaaattgaatcaaagattataatttagatatacaataacacctatatatagataagttttaacactgagttttctttcagactgttttctaactacatagacaataaaattaagctttgcataaagctaggtttgtgggtttttgacttctgacaagtcatgttgttctttttccttttagccctgaaaactagccacttgccaaaaagtgtgtaatttaggatgacttgacaggatgcaatttgcttaactaagttcattaatcgcagcacagaaaacagttacttttcagggataccatattatcataatacaaaaacacgttagttcatttttatgtatatgtatatatttttaatactttattctttggagcagttgtaggtttacaaaaaacgcagaaaactacagagtgtttccaaatacccccttctccctcagtttcccatactatcttgcactgatcgtggcacattggttataattgagtcaatgttttgttttgtttggggttttgttt

SEQ ID NO: 1585 - protein, 233 aa, Homo sapien
MEPTAPSLTEEDLTEVKKDALENLRVYLCEKIIAERHFDHLRAKKILSREDTEEISCRTSSRKRAGKLLDYLQENPKGLDTLVESIRREKTQNFLIQKITDEVLKLRNIKLEHLKGLKCSSCEPFPDGATNNLSRSNSDESNFSEKLRASTVMYHPEGESSTTPFFSTNSSLNLPVLEVGRTENTIFSSTTLPRPGDPGAPPLPPDLQLEEEGTCANSSEMFLPLRSRTVSRQ

SEQ ID NO: 1586 - DNA, 3868 bp, Homo sapien
atgaacctctgaaaactgccggcatctgaggtttcctccaaggccctctgaagtgcagcccataatgaaggtcttggcggcaggagttgtgcccctgctgttggttctgcactggaaacatggggcggggagccccctccccatcacccctgtcaacgccacctgtgccatacgccacccatgtcacaacaacctcatgaaccagatcaggagccaactggcacagctcaatggcagtgccaatgccctctttattctctattacacagcccagggggagccgttccccaacaacctggacaagctatgtggccccaacgtgacggacttcccgcccttccacgccaacggcacggagaaggccaagctggtggagctgtaccgcatagtcgtgtaccttggcacctccctgggcaacatcacccgggaccagaagatcctcaaccccagtgccctcagcctccacagcaagctcaacgccaccgccgacatcctgcgaggcctccttagcaacgtgctgtgccgcctgtgcagcaagtaccacgtgggccatgtggacgtgacctacggccctgacacctcgggtaaggatgtcttccagaagaagaagctgggctgtcaactcctggggaagtataagcagatcatcgccgtgttggcccaggccttctagcaggaggtcttgaagtgtgctgtgaaccgagggatctcaggagttgggtccagatgtgggggcctgtccaagggtggctggggcccagggcatcgctaaacccaaatgggggctgctggcagaccccgagggtgcctggccagtccactccactctgggctgggctgtgatgaagctgagcagagtggaaacttccatagggagggagctagaagaaggtgccccttcctctgggagattgtggactggggagcgtgggctggacttctgcctctacttgtccctttggccccttgctcactttgtgcagtgaacaaactacacaagtcatctacaagagccctgaccacagggtgagacagcagggcccaggggagtggaccagcccccagcaaattatcaccatctgtgcctttgctgccccttaggttgggacttaggtgggccagaggggctaggatcccaaaggactccttgtcccctagaagtttgatgagtggaagatagagaggggcctctgggatggaaggctgtcttcttttgaggatgatcagagaacttgggcataggaacaatctggcagaagtttccagaaggaggtcacttggcattcaggctcttggggaggcagagaagccaccttcaggcctgggaaggaagacactgggaggaggagaggcctggaaagctttggtaggttcttcgttctcttccccgtgatcttccctgcagcctgggatggccagggtctgatggctggacctgcagcaggggtttgtggaggtgggtagggcaggggcaggttgctaagtcaggtgcagaggttctgagggacccaggctcttcctctgggtaaaggtctgtaagaaggggctggggtagctcagagtagcagctcacatctgaggccctgggaggtcttgtgaggtcacacagaggtacttgagggggactggaggccgtctctggtccccagggcaagggaacagcagaacttagggtcagggtctcagggaaccctgagctccaagcgtgctgtgcgtctgacctggcatgatttctatttattatgatatcctatttatattaacttattggtgctttcagtggccaagttaattcccctttccctggtccctactcaacaaaatatgatgatggctcccgacacaagcgccagggccagggcttagcagggcctggtctggaagtcgacaatgttacaagtggaataagcttacgggtgaagctcagagaagggtcggatctgagagaatggggaggcctgagtgggagtggggggccttgctccacccccatcccctactgtgacttgctttagcgtgtcagggtccaggctgcaggggctgggccaatttgtggagaggccgggtgcctttctgtcttgcttccagggggctggttcacactgttcttgggcgccccagcattgtgttgtgaggcgcactgttcctggcagatattgtgccccctggagcagtgggcaagacagtccttgtggcccaccctgtccttgtttctgtgtccccatgctgcctctgaaatagcgccctggaacaaccctgcccctgcacccagcatgctccgacacagcagggaagctcctcctgtggcccggacacccatagacggtgcggggggcctggctgggccagaccccaggaaggtggggtagactggggggatcagctgcccattgctcccaagaggaggagagggaggctgcagacgcctgggactcagaccaggaagctgtgggccctcctgctccacccccatcccactcccacccatgtctgggctcccaggcagggaacccgatctcttcctttgtgctggggccaggcgagtggagaaacgccctccagtctgagagcaggggagggaaggaggcagcagagttggggcagctgctcagagcagtgttctggcttcttctcaaaccctgagcgggctgccggcctccaagttcctccgacaagatgatggtactaattatggtacttttcactcactttgcacctttccctgtcgctctctaagcactttacctggatggcgcgtgggcagtgtgcaggcaggtcctgaggcctggggttggggtggagggtgcggcccggagttgtccatctgtccatcccaacagcaagacgaggatgtggctgttgagatgtgggccacactcacccttgtccaggatgcagggactgccttctccttcctgcttcatccggcttagcttggggctggctgcattcccccaggatgggcttcgagaaagacaaacttgtctggaaaccagagttgctgattccacccggggggcccggctgactcgcccatcacctcatctccctgtggacttgggagctctgtgccaggcccaccttgcggccctggctctgagtcgctctcccacccagcctggacttggccccatgggacccatcctcagtgctccctccagatcccgtccggcagcttggcgtccaccctgcacagcatcactgaatcacagagcctttgcgtgaaacagctctgccaggccgggagctgggtttctcttccctttttatctgctggtgtggaccacacctgggcctggccggaggaagagagagtttaccaagagagatgtctccgggcccttatttattatttaaacatttttttaaaaagcactgctagtttacttgtctctcctccccatcgtccccatcgtcctccttgtccctgacttggggcacttccaccctgacccagccagtccagctctgccttgccggctctccagagtagacatagtgtgtggggttggagctctggcacccggggaggtagcatttccctgcagatggtacagatgttcctgccttagagtcatctctagttccccacctcaatcccggcatccagccttcagtcccgcccacgtgctagctccgtgggcccaccgtgcggccttagaggtttccctccttcctttccactgaaaagcacatggccttgggtgacaaattcctctttgatgaatgtaccctgtggggatgtttcatactgacagattatttttatttattcaatgtcatatttaaaatatttattttttataccaaatgaatcacttttttttttaagaaaaaaaagagaaatgaataaagaatctactcttcg

SEQ ID NO: 1587 - protein, 202 aa, Homo sapien
MKVLAAGVVPLLLVLHWKHGAGSPLPITPVNATCAIRHPCHNNLMNQIRSQLAQLNGSANALFILYYTAQGEPFPNNLDKLCGPNVTDFPPFHANGTEKAKLVELYRIVVYLGTSLGNITRDQKILNPSALSLHSKLNATADILRGLLSNVLCRLCSKYHVGHVDVTYGPDTSGKDVFQKKKLGCQLLGKYKQIIAVLAQAF

SEQ ID NO: 1588 - DNA, 2400 bp, Homo sapien
taggatggaaaggcagatgtaaagtccctcatggcgaaatataacacggggggcaacccgacagaggatgtctcagtcaatagccgacccttcagagtcacagggccaaactcatcttcaggaatacaagcaagaaagaacttattcaacaaccaaggaaatgccagccctcctgcaggacccagcaatgtacctaagtttgggtccccaaagccacctgtggcagtcaaaccttcttctgaggaaaagcctgacaaggaacccaagcccccgtttctaaagcccactggagcaggccaaagattcggaacaccagccagcttgaccaccagagaccccgaggcgaaagtgggatttctgaaacctgtaggccccaagcccatcaacttgcccaaagaagattccaaacctacatttccctggcctcctggaaacaagccatctcttcacagtgtaaaccaagaccatgacttaaagccactaggcccgaaatctgggcctactcctccaacctcagaaaatgaacagaagcaagcgtttcccaaattgactggggttaaagggaaatttatgtcagcatcacaagatcttgaacccaagcccctcttccccaaacccgcctttggccagaagccgcccctaagtaccgagaactcccatgaagacgaaagccccatgaagaatgtgtcttcatcaaaagggtccccagctcccctgggagtcaggtccaaaagcggccctttaaaaccagcaagggaagactcagaaaataaagaccatgcaggggagatttcaagtttgccctttcctggagtggttttgaaacctgctgcgagcaggggaggcctaggtctctccaaaaatggtgaagaaaaaaaggaagataggaagatagatgctgctaagaacaccttccagagcaaaataaatcaggaagagttggcctcagggactcctcctgccaggttccctaaggccccttctaagctgacagtgggggggccatggggccaaagtcaggaaaaggaaaagggagacaagaattcagccaccccgaaacagaagccattgcctcccttgtttaccttgggtccacctccaccaaaacccaacagaccaccaaatgttgacctgacgaaattccacaaaacctcttctggaaacagtactagcaaaggccagacgtcttactcaacaacttccctgccaccacctccaccatcccatccggccagccaaccaccattgccagcatctcacccatcacaaccaccagtcccaagcctacctcccagaaacattaaacctccgtttgacctaaaaagccctgtcaatgaagacaatcaagatggtgtcacgcactctgatggtgctggaaatctagatgaggaacaagacagtgaaggagaaacatatgaagacatagaagcatccaaagaaagagagaagaaaagggaaaaggaagaaaagaagaggttagagctggagaaaaaggaacagaaagagaaagaaaagaaagaacaagaaataaagaagaaatttaaactaacaggccctattcaagtcatccatcttgcaaaagcttgttgtgatgtcaaaggaggaaagaatgaactgagcttcaagcaaggagagcaaattgaaatcatccgcatcacagacaacccagaaggaaaatggttgggcagaacagcaaggggttcatatggctatattaaaacaactgctgtagagattgactatgattctttgaaactgaaaaaagactctcttggtgccccttcaagacctattgaagatgaccaagaagtatatgatgatgttgcagagcaggatgatattagcagccacagtcagagtggaagtggagggatattccctccaccaccagatgatgacatttatgatgggattgaagaggaagatgctgatgatggtttccctgctcctcctaaacaattggacatgggagatgaagtttacgatgatgtggatacctctgatttccctgtttcatcagcagagatgagtcaaggaactaattttggaaaagctaagacagaagaaaaggaccttaagaagctaaaaaagcaggaaaaagaagaaaaagacttcaggaaaaaatttaaatatgatggtgaaattagagtcctatattcaactaaagttacaacttccataacttctaaaaagtggggaaccagagatctacaggtaaaacctggtgaatctctagaagttatacaaaccacagatgacacaaaagttctctgcagaaatgaagaagggaaatatggttatgtccttcggagttacctagcggacaatgatggagagatctatgatgatattgctgatggctgcatctatgacaatgactagcactcaactttggtcatt

SEQ ID NO: 1589 - protein, 783 aa, Homo sapien
MAKYNTGGNPTEDVSVNSRPFRVTGPNSSSGIQARKNLFNNQGNASPPAGPSNVPKFGSPKPPVAVKPSSEEKPDKEPKPPFLKPTGAGQRFGTPASLTTRDPEAKVGFLKPVGPKPINLPKEDSKPTFPWPPGNKPSLHSVNQDHDLKPLGPKSGPTPPTSENEQKQAFPKLTGVKGKFMSASQDLEPKPLFPKPAFGQKPPLSTENSHEDESPMKNVSSSKGSPAPLGVRSKSGPLKPAREDSENKDHAGEISSLPFPGVVLKPAASRGGLGLSKNGEEKKEDRKIDAAKNTFQSKINQEELASGTPPARFPKAPSKLTVGGPWGQSQEKEKGDKNSATPKQKPLPPLFTLGPPPPKPNRPPNVDLTKFHKTSSGNSTSKGQTSYSTTSLPPPPPSHPASQPPLPASHPSQPPVPSLPPRNIKPPFDLKSPVNEDNQDGVTHSDGAGNLDEEQDSEGETYEDIEASKEREKKREKEEKKRLELEKKEQKEKEKKEQEIKKKFKLTGPIQVIHLAKACCDVKGGKNELSFKQGEQIEIIRITDNPEGKWLGRTARGSYGYIKTTAVEIDYDSLKLKKDSLGAPSRPIEDDQEVYDDVAEQDDISSHSQSGSGGIFPPPPDDDIYDGIEEEDADDGFPAPPKQLDMGDEVYDDVDTSDFPVSSAEMSQGTNFGKAKTEEKDLKKLKKQEKEEKDFRKKFKYDGEIRVLYSTKVTTSITSKKWGTRDLQVKPGESLEVIQTTDDTKVLCRNEEGKYGYVLRSYLADNDGEIYDDIADGCIYDND

SEQ ID NO: 1590 - DNA, 4262 bp, Homo sapien
cgaagaggatccggagcagctgctgccagcccgcgggcactgaagtcctcccggctgccgctcgagtagccacgggcgcgatcgggaccagaagtctcctcctccatgatcactttggaagccgggggggaagactttgccctgccctgagagctggtctgcgtttcccaggcgcggcggcggcggagcagcagctgcagcagccgagtccaaataggagcggccacagccaggggcgtgtgcgccccgcgcggagcgagctcgggttcccctcggaatgtccccggggcgcccggcgcgctgaccccgaagccgcctccgccttcggcgcctgctgcctccctcggccaggcttgttgttcgggactgtgagcttcctggctcctgggcagtggggaagcccccgggggcgagtgacctcagctggccacgacccagccctcccccgtgcgtatctcgcttaagatggcagcggagtcaggggaactaatcggggcttgtgagttcatgaaagatcggttatattttgctactttaaggaatagaccaaaaagcacagtaaatacccactatttctccatcgatgaggagctggtctatgaaaatttctatgcagattttggaccgctgaacttggcaatggtgtacagatattgctgcaaactaaacaagaaactaaaatcatacagtttgtcaagaaagaaaatagtgcactacacctgttttgaccaacggaaaagagcaaatgcagcatttttgataggtgcctatgcagtaatctatttaaagaagacaccagaagaagcctacagagcactcctgtctggctcaaaccccccctatcttccattcagggatgcttcctttggaaattgcacttacaatctcaccattctcgactgtttgcagggaatcagaaagggattacaacatggattttttgactttgagacatttgatgtggatgaatatgaacattatgagcgagttgaaaatggtgacttcaactggattgttccaggaaaatttttagcatttagtggaccacatcctaaaagcaaaattgagaatggttatcctcttcacgcccctgaagcctactttccttatttcaaaaagcataatgtgactgcagttgtgaggctaaacaaaaagatttatgaggcaaagcgcttcacagacgctggcttcgagcactatgacctcttcttcatagatggcagcacacccagtgacaacatcgtgcgaaggttcctgaacatctgtgagaacaccgaaggggccatcgccgttcactgcaaagctggtcttggaagaacagggacattgatagcctgttatgtaatgaaacactacaggtttacacatgctgaaataattgcttggattagaatatgccggccaggctctattataggaccccagcagcacttcctggaagaaaaacaagcatcgttgtgggtccaaggagacattttccgatccaaactgaaaaatcgaccatccagtgaaggaagtattaataaaattctttctggcctagatgatatgtctattggtggaaatctttcaaaaacacaaaacatggaacgatttggagaggataacttagaagatgatgatgtggaaatgaaaaatggtataacccagggagacaaactacgtgccttaaaaagtcagagacagccacgtacctcaccatcctgtgcatttaggtcagatgatacaaaaggacatccaagagcagtgtcccagcctttcagattaagttcatccctgcaaggatctgcagttactttgaagacatcaaaaatggcactgtccccttcagcaacggccaagaggatcaacagaacttctttgtcttcgggtgccactgtaagaagcttttccataaactcccggctagccagttctctagggaacttgaatgctgcaacagatgatccagagaacaaaaagacctcctcatcctctaaggcaggcttcacagccagcccgtttaccaacctcttgaatggcagctcccagccaactaccagaaattaccctgagctcaacaataatcagtacaacagaagcagcaacagcaacgggggcaacctgaacagccccccaggcccccacagcgccaagacagaggagcacaccaccatcctccgaccctcctacaccgggctttcttcttcttcagcgagattcctgagccgttctatcccttcccttcagtctgaatatgttcattactaaggccttgccactccagtgaaagctgttcttctcttagacacaatttcttcatctggacgagcagtggagagggaaagcaacttcttgctggaagaatatctctgccttcttaccttaaattaaaaagagcactaagataacaccttcaagagacttgaaaacagaaaactggttaatgactactataaatgcactgaaactatgttatggagatttccatacttttaaagacagttttaatgttgaatttggtattttgaagggttatttttaatgtattttggtaatacatttattattatatttacatgtacagtgttacattatatatgtattgtgaactttaaaagactattttgataaatttataaatatataaaattatgtaaaaactacactatattttgatttagattttcctgctgtttgctaccaaaaatttgtattttaaatctgtttagttttagtatggttttgtctctaatgaataaataattccttcttattaagaagaagtaagggagaaagtttttagaaagtgatttttatgctcgcactataaatatggcaggtcagttcattcttttgggaagtcagtttagttacactgagtttatccaagtttatctctaccaagagtataatggcatgggatggcttatttaggacaattccctttcctattgtttttgttgctgagccaatttgagttagttttgcatcctggggggctttaaaatacagcatgcagtgaaagatcagaattcactgaatatttcttctgagagcatggtttcatggtttttctctatgaaatgactcaatattccaaatgtttttttttccttcctcctttcaaaagagttcttaacccaattaggatatcctgctttgggtatgaggttgttgttgcctgtaatcacacatggtttgacatcagttttaaatcaatggagagaaaaaactgaaaaagatgctgctaagtagttctctgtattaaaggagatatttttaaaacagggtacaaccccctgctgcacacgctagcatatctggaacctactatgaaaatgaaaggacccttataggtactcacagccctttcatgtaagtatgatctgatatttaggtcttcagaagcctgtaggtttcatttctatgaggaatcgaggagcgttacatcctgatatccttccaggctgcttaagaatggactgcttcgacactgaaagtgctagttaaatggattcatatgaagtgctttactcccaaccattgagttatttataatgtatttattaggggagggtaccttgagtctattatatatgcttcatcaaaacatcttgttcatgttttatgtttttaaaaaaggcatttgaatgaatgtttgactcaggtttgttaaattaacttcagtaactgcagtaccaaaaattacactcaactgatgaaaaaaacgaattgtatgatttaggaatcaaaaactaaaataagtggaattatgtatcttttctaaagttaaaaaagtaaaatattttattatgagttattataaaaattggttaattgtataggaagatgacagtatttttttcaagttatcataaaaagtaattcagatgacatttgagaagtaggggaaagggaatcatgttgacagttttagttctgtgaacactaatttgtgtgaagctattaaaatgattgtaaagttgactactgtaaatttcccataattatgtgtgtatatgtgtcatatgtatgtacatgtatatgtctaaaaattactttacacatgtgcctacatagacacaccaagaagtggatgtatataatatagaaagtatatagcaaagtaattttactctgataataaaaattgtttgacatgtattttgttatgaatagtttatcttccaaaagatattttgctctattttaaagtgtagaagaatacactgctaataaataataaaagttttattcaatttaaaaaaaaaaaaaaaaaa

SEQ ID NO: 1591 - protein, 383 aa, Homo sapien
MAAESGELIGACEFMKDRLYFATLRNRPKSTVNTHYFSIDEELVYENFYADFGPLNLAMVYRYCCKLNKKLKSYSLSRKKIVHYTCFDQRKRANAAFLIGAYAVIYLKKTPEEAYRALLSGSNPPYLPFRDASFGNCTYNLTILDCLQGIRKGLQHGFFDFETFDVDEYEHYERVENGDFNWIVPGKFLAFSGPHPKSKIENGYPLHAPEAYFPYFKKHNVTAVVRLNKKIYEAKRFTDAGFEHYDLFFIDGSTPSDNIVRRFLNICENTEGAIAVHCKAGLGRTGTLIACYVMKHYRFTHAEIIAWIRICRPGSIIGPQQHFLEEKQASLWVQGDIFRSKLKNRPSSEGSINKILSGLDDMSIGGNLSKTQNMERFGEVSFP

SEQ ID NO: 1592 - DNA, 4045 bp, Homo sapien
gcagccagagctcagcagggccctggagagatggccacggtcccagcaccggggaggactggagagcgcgcgctgccaccgccccatgtctcagccagggcttccttcctcggctccaccctgtggatgtaatggcggcccctgctctgtcctggcgtctgcccctcctcatcctcctcctgcccctggctacctcttgggcatctgcagcggtgaatggcacttcccagttcacatgcttctacaactcgagagccaacatctcctgtgtctggagccaagatggggctctgcaggacacttcctgccaagtccatgcctggccggacagacggcggtggaaccaaacctgtgagctgctccccgtgagtcaagcatcctgggcctgcaacctgatcctcggagccccagattctcagaaactgaccacagttgacatcgtcaccctgagggtgctgtgccgtgagggggtgcgatggagggtgatggccatccaggacttcaagccctttgagaaccttcgcctgatggcccccatctccctccaagttgtccacgtggagacccacagatgcaacataagctgggaaatctcccaagcctcccactactttgaaagacacctggagttcgaggcccggacgctgtccccaggccacacctgggaggaggcccccctgctgactctcaagcagaagcaggaatggatctgcctggagacgctcaccccagacacccagtatgagtttcaggtgcgggtcaagcctctgcaaggcgagttcacgacctggagcccctggagccagcccctggccttcaggacaaagcctgcagcccttgggaaggacaccattccgtggctcggccacctcctcgtgggcctcagcggggcttttggcttcatcatcttagtgtacttgctgatcaactgcaggaacaccgggccatggctgaagaaggtcctgaagtgtaacaccccagacccctcgaagttcttttcccagctgagctcagagcatggaggagacgtccagaagtggctctcttcgcccttcccctcatcgtccttcagccctggcggcctggcacctgagatctcgccactagaagtgctggagagggacaaggtgacgcagctgctcctgcagcaggacaaggtgcctgagcccgcatccttaagcagcaaccactcgctgaccagctgcttcaccaaccagggttacttcttcttccacctcccggatgccttggagatagaggcctgccaggtgtactttacttacgacccctactcagaggaagaccctgatgagggtgtggccggggcacccacagggtcttccccccaacccctgcagcctctgtcaggggaggacgacgcctactgcaccttcccctccagggatgacctgctgctcttctcccccagtctcctcggtggccccagccccccaagcactgcccctgggggcagtggggccggtgaagagaggatgcccccttctttgcaagaaagagtccccagagactgggacccccagcccctggggcctcccaccccaggagtcccagacctggtggattttcagccaccccctgagctggtgctgcgagaggctggggaggaggtccctgacgctggccccagggagggagtcagtttcccctggtccaggcctcctgggcagggggagttcagggcccttaatgctcgcctgcccctgaacactgatgcctacttgtccctccaagaactccagggtcaggacccaactcacttggtgtagacagatggccagggtgggaggcaggcagctgcctgctctgcgccgagcctcagaaggaccctgttgagggtcctcagtccactgctgaggacactcagtgtccagttgcagctggacttctccacccggatggcccccacccagtcctgcacacttggtccatccatttccaaacctccactgctgctcccgggtcctgctgcccgagccaggaactgtgtgtgttgcaggggggcagtaactccccaactccctcgttaatcacaggatcccacgaatttaggctcagaagcatcgctcctctccagccctgcagctattcaccaatatcagtcctcgcggctctccagggctccctgccctgacctcttccctgggttttctgccccagcctcctccttccctcccctccccgtccacagggcagcctgagcgtgctttccaaaacccaaatatggccacgctccccctcggttcaaaaccttgcacaggtcccactgccctcagccccacttctcagcctggtacttgtacctccggtgtcgtgtggggacatccccttctgcaatcctccctaccgtcctcctgagccactcagagctccctcacaccccctctgttgcacatgctattccctggggctgctgtgcgctccccctcatctaggtgacaaacttccctgactcttcaagtgccggttttgcttctcctggagggaagcactgcctcccttaatctgccagaaacttctagcgtcagtgctggagggagaagctgtcagggacccagggcgcctggagaaagaggccctgttactattcctttgggatctctgaggcctcagagtgcttggctgctgtatctttaatgctggggcccaagtaagggcacagatccccccacaaagtggatgcctgctgcatcttcccacagtggcttcacagacccacaagagaagctgatggggagtaaaccctggagtccgaggcccaggcagcagccccgcctagtggtgggccctgatgctgccaggcctgggacctcccactgccccctccactggaggggtctcctctgcagctcagggactggcacactggcctccagaagggcagctccacagggcagggcctcattatttttcactgccccagacacagtgcccaacaccccgtcgtataccctggatgaacgaattaattacctggcaccacctcgtctgggctccctgcgcctgacattcacacagagaggcagagtcccgtgcccattaggtctggcatgccccctcctgcaaggggctcaaccccctaccccgacccctccacgtatctttcctaggcagatcacgttgcaatggctcaaacaacattccaccccagcaggacagtgaccccagtcccagctaactctgacctgggagccctcaggcacctgcacttacaggccttgctcacagctgattgggcacctgaccacacgcccccacaggctctgaccagcagcctatgagggggtttggcaccaagctctgtccaatcaggtaggctgggcctgaactagccaatcagatcaactctgtcttgggcgtttgaactcagggagggaggcccttgggagcaggtgcttgtggacaaggctccacaagcgttgagccttggaaaggtagacaagcgttgagccactaagcagaggaccttgggttcccaatacaaaaatacctactgctgagagggctgctgaccatttggtcaggattcctgttgcctttatatccaaaataaactcccctttcttgaggttgtctgagtcttgggtctatgccttgaaaaaagctgaattattggacagtctcacctcctgccatagggtcctgaatgtttcagaccacaaggggctccacacctttgctgtgtgttctggggcaacctactaatcctctctgcaagtcggtctccttatccccccaaatggaaattgtatttgccttctccactttgggaggctcccacttcttgggagggttacattttttaagtcttaatcatttgtgacatatgtatctatacatccgtatcttttaatgatccgtgtgtaccatctttgtgattatttccttaatattttttctttaagtcagttcattttcgttgaaatacatttatttaaagaaaaatctttgttactctgtaaatgaaaaaacccattttcgctataaataaaaggtaactgtacaaaataagtacaatgcaacaaaa

SEQ ID NO: 1593 - protein, 551 aa, Homo sapien
MAAPALSWRLPLLILLLPLATSWASAAVNGTSQFTCFYNSRANISCVWSQDGALQDTSCQVHAWPDRRRWNQTCELLPVSQASWACNLILGAPDSQKLTTVDIVTLRVLCREGVRWRVMAIQDFKPFENLRLMAPISLQVVHVETHRCNISWEISQASHYFERHLEFEARTLSPGHTWEEAPLLTLKQKQEWICLETLTPDTQYEFQVRVKPLQGEFTTWSPWSQPLAFRTKPAALGKDTIPWLGHLLVGLSGAFGFIILVYLLINCRNTGPWLKKVLKCNTPDPSKFFSQLSSEHGGDVQKWLSSPFPSSSFSPGGLAPEISPLEVLERDKVTQLLLQQDKVPEPASLSSNHSLTSCFTNQGYFFFHLPDALEIEACQVYFTYDPYSEEDPDEGVAGAPTGSSPQPLQPLSGEDDAYCTFPSRDDLLLFSPSLLGGPSPPSTAPGGSGAGEERMPPSLQERVPRDWDPQPLGPPTPGVPDLVDFQPPPELVLREAGEEVPDAGPREGVSFPWSRPPGQGEFRALNARLPLNTDAYLSLQELQGQDPTHLV

SEQ ID NO: 1594 - DNA, 1270 bp, Homo sapien
caggggacaggctgcagccggtgcagttacacgttttcctccaaggagcctcggacgttgtcacgggtttggggtcggggacagagcagtgaccatggccaggctggcgttgtctcctgtgcccagccactggatggtggcgttgctgctgctgctctcagctgagccagtaccagcagccagatcggaggaccggtaccggaatcccaaaggtagtgcttgttcgcggatctggcagagcccacgtttcatagccaggaaacggggcttcacggtgaaaatgcactgctacatgaacagcgcctccggcaatgtgagctggctctggaagcaggagatggacgagaatccccagcagctgaagctggaaaagggccgcatggaagagtcccagaacgaatctctcgccaccctcaccatccaaggcatccggtttgaggacaatggcatctacttctgtcagcagaagtgcaacaacacctcggaggtctaccagggctgcggcacagagctgcgagtcatgggattcagcaccttggcacagctgaagcagaggaacacgctgaaggatggtatcatcatgatccagacgctgctgatcatcctcttcatcatcgtgcctatcttcctgctgctggacaaggatgacagcaaggctggcatggaggaagatcacacctacgagggcctggacattgaccagacagccacctatgaggacatagtgacgctgcggacaggggaagtgaagtggtctgtaggtgagcacccaggccaggagtgagagccaggtcgccccatgacctgggtgcaggctccctggcctcagtgactgcttcggagctgcctggctcatggcccaacccctttcctggaccccccagctggcctctgaagctggcccaccagagctgccatttgtctccagcccctggtccccagctcttgccaaagggcctggagtagaaggacaacagggcagcaacttggagggagttctctggggatggacgggacccagccttctgggggtgctatgaggtgatccgtccccacacatgggatgggggaggcagagactggtccagagcccgcaaatggactcggagccgagggcctcccagcagagcttgggaagggccatggacccaactgggccccagaagagccacaggaacatcattcctctcccgcaaccactcccaccccagggaggccctggcctccagtgccttcccccgtggaataaacggtgtgtcctgagaaacca

SEQ ID NO: 1595 - protein, 229 aa, Homo sapien
MARLALSPVPSHWMVALLLLLSAEPVPAARSEDRYRNPKGSACSRIWQSPRFIARKRGFTVKMHCYMNSASGNVSWLWKQEMDENPQQLKLEKGRMEESQNESLATLTIQGIRFEDNGIYFCQQKCNNTSEVYQGCGTELRVMGFSTLAQLKQRNTLKDGIIMIQTLLIILFIIVPIFLLLDKDDSKAGMEEDHTYEGLDIDQTATYEDIVTLRTGEVKWSVGEHPGQE

SEQ ID NO: 1596 - DNA, 5198 bp, Homo sapien
ctcacttaaacacgtagttcccgcgaccccaacgtcccagaggcggggccggagtcggcggtggcgctccttggagccggctcccgctcctaccctgcaaacagacctcagctccgcggaagttgcgagacggggtttcaccatgttggtcgggctggtctggaaatcctgacttcaggtgatccacccgcctcggcctcccaaaatgctgggattacaagcgtgagccaccgcccctgacatgagccattgacttttaaagcaggagaataatttggatcagatttatatggaaacactcttctagcagcattatggggacttttccataagtctggatactgaggatttggaattaaagaaatcattcaccagacatcatggagcctatatatccttttgcacggccccagatgaataccaggtttccttcaagcaggatggtacctttccactttcctccatcaaaatgtgcactttggaacccaacgccaactggagatttcatctacttacatctcagttactacagaaatccaaagcttgtggtgactgagaagaccatccgacttgcttatcgtcatgctaacgagaataaaaaaaattcgtcatgctttttacttggttctctgacagcagacgaagatgaagaaggtgtaacattgacagtagatcgctttgatcctggtcgagaagtacctgaatgcctagaaataacccctactgcttctcttcctggggactttttgattccatgcaaagttcatactcaagaactttgttcaagagaaatgatagttcacagtgtagatgacttcagttcagctttaaaggctctacagtgccatatatgtagcaaagattccttggactgtggtaagctgctttccctaagagttcatatcacttccagggagagtttggacagtgtggaatttgacttgcattgggcagcagtaactctagcaaataactttaaatgcacacctgtgaagcccatccccattattccaacagctctggcaagaaacttgagcagtaatctgaatatttctcaagttcaagggacttataaatatggatatcttaccatggatgaaacacgcaaattgttacttttgttggaatctgatcccaaggtttattctctaccattggtgggaatttggctgtctggaattacacatatctatagtcctcaggtatgggcttgctgtttgcgatacatattcaattcttctgttcaagaaagggttttttcagaatctggaaatttcatcatagttctctattctatgacacataaggaacctgagttttatgaatgcttcccttgtgatggcaagatacctgactttcggtttcagttgctaaccagtaaggaaacattacatcttttcaaaaatgttgaacctcctgacaaaaatccaatccgttgtgaactgagcgctgaaagccaaaatgcagaaacagagtttttcagtaaggcttccaagaatttttcaattaagaggtcttcccaaaagttatcttctgggaagatgccaatacatgatcacgactctggtgttgaagatgaagatttttctccaagaccaattcctagtcctcatccagtgagtcagaagatttctaagatccaaccatcagttcctgaactttcacttgtgttggatggcaatttcatagaatcaaaccctctgcctactccattggaaatggtgaataatgaaaatcctcctttgattaaccacttggaacacttgaagccattgcaaccccagctttatgatgagaaacacagtccagaagttgaagctggagagccttccttgagaggaataccaaatcagttaaaccaggataaaccagctcttttgagacactgcaaagtaagacagccacctgcctataagaaagggaacccccataccaggaacagtattaaaccatcttctcataatgggccatctcatgatatatttgaaaagctccaaacagtttctgctggaaatgtacaaaacgaagagtatcctataagaccctccacacttaattctaggcagtcttctcttgccccgcagtcccaaccacacgattttgttttttcaccccataattcaggaagaccaatggaacttcagatacctactcccccactgccatcttactgttccacaaacgtttgcaggtgttgtcagcatcatagtcatattcaatatagtccgctaaattcttggcaaggagcaaacacagttggatccattcaagatgtccagtctgaagcccttcaaaagcattcattatttcacccaagtggatgtccagccctgtactgtaatgcattctgttcttcaagtagtcctatagccttgagacctcagggagatatgggcagttgttctccccacagcaatattgaaccatcgcctgtggcaagaccgccttcacatatggacttatgtaacccacagccttgcacagtgtgcatgcacacacccaagactgagtcagataatggaatgatgggactatctccagatgcatatcggttcctcacagaacaagacagacagctaagactacttcaggcacagattcagcgtttgttggaagcacagtctctgatgccctgttcccctaagacaactgctgttgaagacacagtgcaagctggaagacaaatggagttggtttctgtggaagcacagtcttcccctggcttgcacatgagaaaaggtgtaagcattgctgtgagcacaggtgctagcttgttttggaatgcagcaggtgaggatcaagagcctgactctcaaatgaagcaagatgataccaaaatttccagtgaggacatgaatttttctgtcgatattaataatgaagtcacaagtcttccaggtagtgcatcttcattaaaagcagttgatattcccagttttgaagagagcaacattgctgtggaagaagaatttaaccagccactttctgtatccaactcttctctagttgtgagaaaagaacctgatgtacctgtgttctttccaagtggccagctggcagaaagtgtaagcatgtgtttacagactggaccaacagggggtgccagtaacaattctgaaacatcagaggaaccaaaaattgagcatgtaatgcaacccttgcttcatcaaccatcagataaccagaaaatttaccaggatttattgggtcaagtaaaccacctattaaatagttcctccaaggaaactgagcagccgtctaccaaagcagtaattatcagtcatgaatgcaccagaacccaaaacgtttaccatacaaagaaaaaaacacatcattcaagactggtggacaaagattgtgtccttaatgcaactcttaagcaactaagaagccttggagtaaaaattgattctcccactaaagtgaagaaaaatgcacataacgtggatcacgccagtgtgttggcatgcatcagcccagaagcagtgatctctggattaaactgcatgtcatttgctaatgttggcatgagcggcttaagccccaatggtgtggatttgagcatggaggcaaatgctatagctctgaaatatttaaatgaaaatcagctgtcacaactgtctgtcactcgatcgaaccaaaataattgtgacccattcagccttctccatattaatacagacagaagcacagtggggcttagtttaatttcaccaaacaacatgtcatttgcaaccaaaaaatatatgaagagatatggactcctacaaagcagtgacaatagtgaagatgaagaggaacctcccgacaatgcagatagcaagagtgaatatttattgaatcagaaccttaggtccatacccgaacagcttggtggtcagaaagagccttctaagaatgaccatgaaataattaattgttctaactgtgaatctgtggggaccaacgcagatacgccagtattgagaaatattacaaatgaagttttgcagacaaaagcaaaacagcagttgactgaaaagccagctttcttagtaaagaaccttaaaccaagtcctgcagtgaaccttcgaaccgggaaagcagagttcactcaacatcctgagaaagaaaatgaaggggacattacaatttttcctgaaagtttgcaaccttctgaaacgctaaagcagatgaatagcatgaattcagtaggcaccttcttagatgtaaaacgtctcagacagttaccaaaattattttaaccttttaactccctgcccttttaatacagggacagggtgtctcctgaagatacttagggaaaacaggagcctaccacaaggctcctgatcattctggagtcactgtttcttggtagcagccaattgggaagagtgacttctgtgagatggctggctggtgataggactaagttctcattgttcaaatagagctgttcaacatcactgaaacctttaagaaaagccctgagatcagttattcctacaagtttaagtagtagacagatactatccagctctaagtctcaactgctcttttatactgtacttttttttttgagacggagttttgctcttgtagcccaggctggagtgcaatggcaggatctcagatcactgcaacctctgcctcctgggttcaagcgattttcctgcttcatcttcccaggtagctgggattacaggcatgtgccacaacgcctggctaattttgtatttttagtagagactggtttctccatgttggtcaggctggtctcaaactcccgacctcaggtgatccgcccgcctcggcctcctaaagtgctgggattacaggcgtgagccactgcccagctatactgtatatttaagaaggtccagcatgttgcatctctgcattatcctatatcataaaagaagcataagttatcatggtgttgggtaaattagcgaaatcaaccgcttcctaagtttaagggaaaagttatttttaaaaacaacttaataaaaacttacactcttatacaagagtgtatttccccttaattaggatgcatgttgattaaactcgagatacagctttttgcagtatggtgggttggttttggtgtaacatcttcaacatgtcacactggctatcaaagaataagaaaattattgagtatgagtgtgttttataaactttctgagtttttcagatgtcttaatattttt

SEQ ID NO: 1597 - protein, 1287 aa, Homo sapien
MEPIYPFARPQMNTRFPSSRMVPFHFPPSKCALWNPTPTGDFIYLHLSYYRNPKLVVTEKTIRLAYRHANENKKNSSCFLLGSLTADEDEEGVTLTVDRFDPGREVPECLEITPTASLPGDFLIPCKVHTQELCSREMIVHSVDDFSSALKALQCHICSKDSLDCGKLLSLRVHITSRESLDSVEFDLHWAAVTLANNFKCTPVKPIPIIPTALARNLSSNLNISQVQGTYKYGYLTMDETRKLLLLLESDPKVYSLPLVGIWLSGITHIYSPQVWACCLRYIFNSSVQERVFSESGNFIIVLYSMTHKEPEFYECFPCDGKIPDFRFQLLTSKETLHLFKNVEPPDKNPIRCELSAESQNAETEFFSKASKNFSIKRSSQKLSSGKMPIHDHDSGVEDEDFSPRPIPSPHPVSQKISKIQPSVPELSLVLDGNFIESNPLPTPLEMVNNENPPLINHLEHLKPLQPQLYDEKHSPEVEAGEPSLRGIPNQLNQDKPALLRHCKVRQPPAYKKGNPHTRNSIKPSSHNGPSHDIFEKLQTVSAGNVQNEEYPIRPSTLNSRQSSLAPQSQPHDFVFSPHNSGRPMELQIPTPPLPSYCSTNVCRCCQHHSHIQYSPLNSWQGANTVGSIQDVQSEALQKHSLFHPSGCPALYCNAFCSSSSPIALRPQGDMGSCSPHSNIEPSPVARPPSHMDLCNPQPCTVCMHTPKTESDNGMMGLSPDAYRFLTEQDRQLRLLQAQIQRLLEAQSLMPCSPKTTAVEDTVQAGRQMELVSVEAQSSPGLHMRKGVSIAVSTGASLFWNAAGEDQEPDSQMKQDDTKISSEDMNFSVDINNEVTSLPGSASSLKAVDIPSFEESNIAVEEEFNQPLSVSNSSLVVRKEPDVPVFFPSGQLAESVSMCLQTGPTGGASNNSETSEEPKIEHVMQPLLHQPSDNQKIYQDLLGQVNHLLNSSSKETEQPSTKAVIISHECTRTQNVYHTKKKTHHSRLVDKDCVLNATLKQLRSLGVKIDSPTKVKKNAHNVDHASVLACISPEAVISGLNCMSFANVGMSGLSPNGVDLSMEANAIALKYLNENQLSQLSVTRSNQNNCDPFSLLHINTDRSTVGLSLISPNNMSFATKKYMKRYGLLQSSDNSEDEEEPPDNADSKSEYLLNQNLRSIPEQLGGQKEPSKNDHEIINCSNCESVGTNADTPVLRNITNEVLQTKAKQQLTEKPAFLVKNLKPSPAVNLRTGKAEFTQHPEKENEGDITIFPESLQPSETLKQMNSMNSVGTFLDVKRLRQLPKLF

SEQ ID NO: 1598 - DNA, 2530 bp, Homo sapien
cagcttccctgtggtttcccgaggcttccttgcttcccgctctgcgaggagcctttcatccgaaggcgggacgatgccggataatcggcagccgaggaaccggcagccgaggatccgctccgggaacgagcctcgttccgcgcccgccatggaaccggatggtcgcggtgcctgggcccacagtcgcgccgcgctcgaccgcctggagaagctgctgcgctgctcgcgttgtactaacattctgagagagcctgtgtgtttaggaggatgtgagcacatcttctgtagtaattgtgtaagtgactgcattggaactggatgtccagtgtgttacaccccggcctggatacaagacttgaagataaatagacaactggacagcatgattcaactttgtagtaagcttcgaaatttgctacatgacaatgagctgtcagatttgaaagaagataaacctaggaaaagtttgtttaatgatgcaggaaacaagaagaattcaattaaaatgtggtttagccctcgaagtaagaaagtcagatatgttgtgagtaaagcttcagtgcaaacccagcctgcaataaaaaaagatgcaagtgctcagcaagactcatatgaatttgtttccccaagtcctcctgcagatgtttctgagagggctaaaaaggcttctgcaagatctggaaaaaagcaaaaaaagaaaactttagctgaaatcaaccaaaaatggaatttagaggcagaaaaagaagatggtgaatttgactccaaagaggaatctaagcaaaagctggtatccttctgtagccaaccatctgttatctccagtcctcagataaatggtgaaatagacttactagcaagtggctccttgacagaatctgaatgttttggaagtttaactgaagtctctttaccattggctgagcaaatagagtctccagacactaagagcaggaatgaagtagtgactcctgagaaggtctgcaaaaattatcttacatctaagaaatctttgccattagaaaataatggaaaacgtggccatcacaatagactttccagtcccatttctaagagatgtagaaccagcattctgagcaccagtggagattttgttaagcaaaccgtgccctcagaaaatataccattgcctgaatgttcttcaccaccttcatgcaaacgtaaagttggtggtacatcagggaggaaaaacagtaacatgtccgatgaattcattagtctttcaccaggtacaccaccttctacattaagtagttcaagttacaggcaagtgatgtctagtccctcagcaatgaagctgttgcccaatatggctgtgaaaagaaatcatagaggagagactttgctccatattgcttctattaagggcgacataccttctgttgaataccttttacaaaatggaagtgatccaaatgttaaagaccatgctggatggacaccattgcatgaagcttgcaatcatgggcacctgaaggtagtggaattattgctccagcataaggcattggtgaacaccaccgggtatcaaaatgactcaccacttcacgatgcagccaagaatgggcacgtggatatagtcaagctgttactttcctatggagcctccagaaatgctgttaatatatttggtctgcggcctgtcgattatacagatgatgaaagtatgaaatcgctattgctgctaccagagaagaatgaatcatcctcagctagccactgctcagtaatgaacactgggcagcgtagggatggacctcttgtacttataggcagtgggctgtcttcagaacaacagaaaatgctcagtgagcttgcagtaattcttaaggctaaaaaatatactgagtttgacagtacagtaactcatgttgttgttcctggtgatgcagttcaaagtaccttgaagtgtatgcttgggattctcaatggatgctggattctaaaatttgaatgggtaaaagcatgtctacgaagaaaagtatgtgaacaggaagaaaagtatgaaattcctgaaggtccacgcagaagcaggctcaacagagaacagctgttgccaaagctgtttgatggatgctacttctatttgtggggaaccttcaaacaccatccaaaggacaaccttattaagctcgtcactgcaggtgggggccagatcctcagtagaaagcccaagccagacagtgacgtgactcagaccatcaatacagtcgcataccatgcgagacccgattctgatcagcgcttctgcacacagtatatcatctatgaagatttgtgtaattatcacccagagagggttcggcagggcaaagtctggaaggctccttcgagctggtttatagactgtgtgatgtcctttgagttgcttcctcttgacagctgaatattataccagatgaacatttcaaattgaatttgcacggtttgtgagagcccagtcattgtactgtttttaatgttcacatttttacaaataggtagagtcattcatatttgtctttgaatc

SEQ ID NO: 1599 - protein, 777 aa, Homo sapien
MPDNRQPRNRQPRIRSGNEPRSAPAMEPDGRGAWAHSRAALDRLEKLLRCSRCTNILREPVCLGGCEHIFCSNCVSDCIGTGCPVCYTPAWIQDLKINRQLDSMIQLCSKLRNLLHDNELSDLKEDKPRKSLFNDAGNKKNSIKMWFSPRSKKVRYVVSKASVQTQPAIKKDASAQQDSYEFVSPSPPADVSERAKKASARSGKKQKKKTLAEINQKWNLEAEKEDGEFDSKEESKQKLVSFCSQPSVISSPQINGEIDLLASGSLTESECFGSLTEVSLPLAEQIESPDTKSRNEVVTPEKVCKNYLTSKKSLPLENNGKRGHHNRLSSPISKRCRTSILSTSGDFVKQTVPSENIPLPECSSPPSCKRKVGGTSGRKNSNMSDEFISLSPGTPPSTLSSSSYRQVMSSPSAMKLLPNMAVKRNHRGETLLHIASIKGDIPSVEYLLQNGSDPNVKDHAGWTPLHEACNHGHLKVVELLLQHKALVNTTGYQNDSPLHDAAKNGHVDIVKLLLSYGASRNAVNIFGLRPVDYTDDESMKSLLLLPEKNESSSASHCSVMNTGQRRDGPLVLIGSGLSSEQQKMLSELAVILKAKKYTEFDSTVTHVVVPGDAVQSTLKCMLGILNGCWILKFEWVKACLRRKVCEQEEKYEIPEGPRRSRLNREQLLPKLFDGCYFYLWGTFKHHPKDNLIKLVTAGGGQILSRKPKPDSDVTQTINTVAYHARPDSDQRFCTQYIIYEDLCNYHPERVRQGKVWKAPSSWFIDCVMSFELLPLDS

SEQ ID NO: 1600 - DNA, 2060 bp, Homo sapien
tgttcccagcactcaagccttgccaccgccgagccgggcttcctgggtgtttcaggcaaggaagtctaggtccctggggggtgacccccaaggaaaaggcagcctccctgcgcacccggttgcccggagccctctccagggccggctgggctgggggttgccctggccagcaggggcccgggggcgatgccacccggtgccgactgaggccaccgcaccatggcccgctcgctgacctggcgctgctgcccctggtgcctgacggaggatgagaaggccgccgcccgggtggaccaggagatcaacaggatcctcttggagcagaagaagcaggaccgcggggagctgaagctgctgcttttgggcccaggcgagagcgggaagagcaccttcatcaagcagatgcggatcatccacggcgccggctactcggaggaggagcgcaagggcttccggcccctggtctaccagaacatcttcgtgtccatgcgggccatgatcgaggccatggagcggctgcagattccattcagcaggcccgagagcaagcaccacgctagcctggtcatgagccaggacccctataaagtgaccacgtttgagaagcgctacgctgcggccatgcagtggctgtggagggatgccggcatccgggcctgctatgagcgtcggcgggaattccacctgctcgattcagccgtgtactacctgtcccacctggagcgcatcaccgaggagggctacgtccccacagctcaggacgtgctccgcagccgcatgcccaccactggcatcaacgagtactgcttctccgtgcagaaaaccaacctgcggatcgtggacgtcgggggccagaagtcagagcgtaagaaatggatccattgtttcgagaacgtgatcgccctcatctacctggcctcactgagtgaatacgaccagtgcctggaggagaacaaccaggagaaccgcatgaaggagagcctcgcattgtttgggactatcctggaactaccctggttcaaaagcacatccgtcatcctctttctcaacaaaaccgacatcctggaggagaaaatccccacctcccacctggctacctatttccccagtttccagggccctaagcaggatgctgaggcagccaagaggttcatcctggacatgtacacgaggatgtacaccgggtgcgtggacggccccgagggcagcaagaagggcgcacgatcccgacgccttttcagccactacacatgtgccacagacacacagaacatccgcaaggtcttcaaggacgtgcgggactcggtgctcgcccgctacctggacgagatcaacctgctgtgacccaggccccacctggggcaggcggcaccggcgggcgggtgggaggtgggagtggctgcagggaccctagtgtcctggtctatctctccagcctcggcccacacgcaagggagtcgggggacggcccgctgctggccgctctcttctctgcctctcaccaggacagccgccccccagggtactcctgcccttgcttgactcagtttccctcctttgaaagggaaggagcaaaacggccatttgggatgccagggtggatgaaaaggtgaagaaatcaggggattgagacttgggtgggtgggcatctctcaggagccccatctccgggcgtgtcacctcctgggcagggttctgggaccctctgtgggtgacgcacaccctgggatggggctagtagagccttcaggcgccttcgggcgtggactctggcgcactctagtggacaggagaaggaacgccttccaggaacctgtggactaggggtgcagggacttccctttgcaaggggtaacagaccgctggaaaacactgtcactttcagagctcggtggctcacagcgtgtcctgccccggtttgcggacgagagaaatcgcggcccacaagcatcccccatcccttgcaggctgggggctgggcatgctgcatcttaaccttttgtatttattccctcaccttctgcagggctccgtgcgggctgaaattaaagatttcttag

SEQ ID NO: 1601 - protein, 374 aa, Homo sapien
MARSLTWRCCPWCLTEDEKAAARVDQEINRILLEQKKQDRGELKLLLLGPGESGKSTFIKQMRIIHGAGYSEEERKGFRPLVYQNIFVSMRAMIEAMERLQIPFSRPESKHHASLVMSQDPYKVTTFEKRYAAAMQWLWRDAGIRACYERRREFHLLDSAVYYLSHLERITEEGYVPTAQDVLRSRMPTTGINEYCFSVQKTNLRIVDVGGQKSERKKWIHCFENVIALIYLASLSEYDQCLEENNQENRMKESLALFGTILELPWFKSTSVILFLNKTDILEEKIPTSHLATYFPSFQGPKQDAEAAKRFILDMYTRMYTGCVDGPEGSKKGARSRRLFSHYTCATDTQNIRKVFKDVRDSVLARYLDEINLL

SEQ ID NO: 1602 - DNA, 2042 bp, Homo sapien
ggggccagtcgttcgccggaaagcatttgtctcccacctcatcataacaacaattaatttcctctggggcctgaggagggcagaatttcaaccttcggtgtgcttgggagtggcgattgtgatttacacgacaaaatgccgaggtgctcggtggagtcatggcagtgccctttgtggaagactgggacttggtgcaaaccctgggagaaggtgcctatggagaagttcaacttgctgtgaatagagtaactgaagaagcagtcgcagtgaagattgtagatatgaagcgtgccgtagactgtccagaaaatattaagaaagagatctgtatcaataaaatgctaaatcatgaaaatgtagtaaaattctatggtcacaggagagaaggcaatatccaatatttatttctggagtactgtagtggaggagagctttttgacagaatagagccagacataggcatgcctgaaccagatgctcagagattcttccatcaactcatggcaggggtggtttatctgcatggtattggaataactcacagggatattaaaccagaaaatcttctgttggatgaaagggataacctcaaaatctcagactttggcttggcaacagtatttcggtataataatcgtgagcgtttgttgaacaagatgtgtggtactttaccatatgttgctccagaacttctgaagagaagagaatttcatgcagaaccagttgatgtttggtcctgtggaatagtacttactgcaatgctcgctggagaattgccatgggaccaacccagtgacagctgtcaggagtattctgactggaaagaaaaaaaaacatacctcaacccttggaaaaaaatcgattctgctcctctagctctgctgcataaaatcttagttgagaatccatcagcaagaattaccattccagacatcaaaaaagatagatggtacaacaaacccctcaagaaaggggcaaaaaggccccgagtcacttcaggtggtgtgtcagagtctcccagtggattttctaagcacattcaatccaatttggacttctctccagtaaacagtgcttctagtgaagaaaatgtgaagtactccagttctcagccagaaccccgcacaggtctttccttatgggataccagcccctcatacattgataaattggtacaagggatcagcttttcccagcccacatgtcctgatcatatgcttttgaatagtcagttacttggcaccccaggatcctcacagaacccctggcagcggttggtcaaaagaatgacacgattctttaccaaattggatgcagacaaatcttatcaatgcctgaaagagacttgtgagaagttgggctatcaatggaagaaaagttgtatgaatcaggttactatatcaacaactgataggagaaacaataaactcattttcaaagtgaatttgttagaaatggatgataaaatattggttgacttccggctttctaagggtgatggattggagttcaagagacacttcctgaagattaaagggaagctgattgatattgtgagcagccagaaggtttggcttcctgccacatgatcggaccatcggctctggggaatcctggtgaatatagtgctgctatgttgacattattcttcctagagaagattatcctgtcctgcaaactgcaaatagtagttcctgaagtgttcacttccctgtttatccaaacatcttccaatttattttgtttgttcggcatacaaataatacctatatcttaattgtaagcaaaactttggggaaaggatgaatagaattcatttgattatttcttcatgtgtgtttagtatctgaatttgaaactcatctggtggaaaccaagtttcaggggacatgagttttccagcttttatacacacgtatctcatttttatcaaaacattttgtttaattcaaaaagtacatatttcttccatgttgatttaattctaagatgaaccaataaagacataattcttgcaaaaaaaaaaaaaaaaaaaaaaaaaa

SEQ ID NO: 1603 - protein, 476 aa, Homo sapien
MAVPFVEDWDLVQTLGEGAYGEVQLAVNRVTEEAVAVKIVDMKRAVDCPENIKKEICINKMLNHENVVKFYGHRREGNIQYLFLEYCSGGELFDRIEPDIGMPEPDAQRFFHQLMAGVVYLHGIGITHRDIKPENLLLDERDNLKISDFGLATVFRYNNRERLLNKMCGTLPYVAPELLKRREFHAEPVDVWSCGIVLTAMLAGELPWDQPSDSCQEYSDWKEKKTYLNPWKKIDSAPLALLHKILVENPSARITIPDIKKDRWYNKPLKKGAKRPRVTSGGVSESPSGFSKHIQSNLDFSPVNSASSEENVKYSSSQPEPRTGLSLWDTSPSYIDKLVQGISFSQPTCPDHMLLNSQLLGTPGSSQNPWQRLVKRMTRFFTKLDADKSYQCLKETCEKLGYQWKKSCMNQVTISTTDRRNNKLIFKVNLLEMDDKILVDFRLSKGDGLEFKRHFLKIKGKLIDIVSSQKVWLPAT

SEQ ID NO: 1604 - DNA, 2042 bp, Homo sapien; identical to SEQ ID NO: 1602

SEQ ID NO: 1605 - protein, 476 aa, Homo sapien; identical to SEQ ID NO: 1603

SEQ ID NO: 1606 - DNA, 2537 bp, Homo sapien
ccacgcgtccgggacgccgttctctcccgcggaattcaggtttacggccctgcgggttctcagagaatttctagaatttggaatcgagtgcattttctgacatttgagtacagtacccaggggttcttggagaagaacctggtcccagaggagcttgactgaccataaaaatgagtactgcagatgcacttgatgatgaaaacacatttaaaatattagttgcaacagatattcatcttggatttatggagaaagatgcagtcagaggaaatgatacgtttgtaacactcgatgaaattttaagacttgcccaggaaaatgaagtggattttattttgttaggtggtgatctttttcatgaaaataagccctcaaggaaaacattacatacctgcctcgagttattaagaaaatattgtatgggtgatcggcctgtccagtttgaaattctcagtgatcagtcagtcaactttggttttagtaagtttccatgggtgaactatcaagatggcaacctcaacatttcaattccagtgtttagtattcatggcaatcatgacgatcccacaggggcagatgcactttgtgccttggacattttaagttgtgctggatttgtaaatcactttggacgttcaatgtctgtggagaagatagacattagtccggttttgcttcaaaaaggaagcacaaagattgcgctatatggtttaggatccattccagatgaaaggctctatcgaatgtttgtcaataaaaaagtaacaatgttgagaccaaaggaagatgagaactcttggtttaacttatttgtgattcatcagaacaggagtaaacatggaagtactaacttcattccagaacaatttttggatgacttcattgatcttgttatctggggccatgaacatgagtgtaaaatagctccaaccaaaaatgaacaacagctgttttatatctcacaacctggaagctcagtggttacttctctttccccaggagaagctgtaaagaaacatgttggtttgctgcgtattaaagggaggaagatgaatatgcataaaattcctcttcacacagtgcggcagtttttcatggaggatattgttctagctaatcatccagacatttttaacccagataatcctaaagtaacccaagccatacaaagcttctgtttggagaagattgaagaaatgcttgaaaatgctgaacgggaacgtctgggtaattctcaccagccagagaagcctcttgtacgactgcgagtggactatagtggaggttttgaacctttcagtgttcttcgctttagccagaaatttgtggatcgggtagctaatccaaaagacattatccattttttcaggcatagagaacaaaaggaaaaaacaggagaagagatcaactttgggaaacttatcacaaagccttcagaaggaacaactttaagggtagaagatcttgtaaaacagtactttcaaaccgcagagaagaatgtgcagctctcactgctaacagaaagagggatgggtgaagcagtacaagaatttgtggacaaggaggagaaagatgccattgaggaattagtgaaataccagttggaaaaaacacagcgatttcttaaagaacgtcatattgatgccctcgaagacaaaatcgatgaggaggtacgtcgtttcagagaaaccagacaaaaaaatactaatgaagaagatgatgaagtccgtgaggctatgaccagggccagagcactcagatctcagtcagaggagtctgcttctgcctttagtgctgatgaccttatgagtatagatttagcagaacagatggctaatgactctgatgatagcatctcagcagcaaccaacaaaggaagaggccgaggaagaggtcgaagaggtggaagagggcagaattcagcatcgagaggagggtctcaaagaggaagagcagacactggtctggagacttctacccgtagcaggaactcaaagactgctgtgtcagcatctagaaatatgtctattatagatgcctttaaatctacaagacagcagccttcccgaaatgtcactactaagaattattcagaggtgattgaggtagatgaatcagatgtggaagaagacatttttcctaccacttcaaagacagatcaaaggtggtccagcacatcatccagcaaaatcatgtcccagagtcaagtatcgaaaggggttgattttgaatcaagtgaggatgatgatgatgatccttttatgaacactagttctttaagaagaaatagaagataatatatttaatggcactgagaaacatgcaagatacaggaaaaatgaaaatgttacaagctaagagtttacagtttaagattttaagtattgtttcctgagcataactccataagtaagaaatttctagttcacagacatacaatagcattgattcaccttgtttttttaacctggttgttgtagtaagagctttgtttcaatatcactcttgagtaaagattaaaataaagctaccatttt

SEQ ID NO: 1607 - protein, 708 aa, Homo sapien
MSTADALDDENTFKILVATDIHLGFMEKDAVRGNDTFVTLDEILRLAQENEVDFILLGGDLFHENKPSRKTLHTCLELLRKYCMGDRPVQFEILSDQSVNFGFSKFPWVNYQDGNLNISIPVFSIHGNHDDPTGADALCALDILSCAGFVNHFGRSMSVEKIDISPVLLQKGSTKIALYGLGSIPDERLYRMFVNKKVTMLRPKEDENSWFNLFVIHQNRSKHGSTNFIPEQFLDDFIDLVIWGHEHECKIAPTKNEQQLFYISQPGSSVVTSLSPGEAVKKHVGLLRIKGRKMNMHKIPLHTVRQFFMEDIVLANHPDIFNPDNPKVTQAIQSFCLEKIEEMLENAERERLGNSHQPEKPLVRLRVDYSGGFEPFSVLRFSQKFVDRVANPKDIIHFFRHREQKEKTGEEINFGKLITKPSEGTTLRVEDLVKQYFQTAEKNVQLSLLTERGMGEAVQEFVDKEEKDAIEELVKYQLEKTQRFLKERHIDALEDKIDEEVRRFRETRQKNTNEEDDEVREAMTRARALRSQSEESASAFSADDLMSIDLAEQMANDSDDSISAATNKGRGRGRGRRGGRGQNSASRGGSQRGRADTGLETSTRSRNSKTAVSASRNMSIIDAFKSTRQQPSRNVTTKNYSEVIEVDESDVEEDIFPTTSKTDQRWSSTSSSKIMSQSQVSKGVDFESSEDDDDDPFMNTSSLRRNRR

SEQ ID NO: 1608 - DNA, 1286 bp, Homo sapien
gccacgtgctgctgggtctcagtcctccacttcccgtgtcctctggaagttgtcaggagcaatgttgcgcttgtacgtgttggtaatgggagtttctgccttcacccttcagcctgcggcacacacaggggctgccagaagctgccggtttcgtgggaggcattacaagcgggagttcaggctggaaggggagcctgtagccctgaggtgcccccaggtgccctactggttgtgggcctctgtcagcccccgcatcaacctgacatggcataaaaatgactctgctaggacggtcccaggagaagaagagacacggatgtgggcccaggacggtgctctgtggcttctgccagccttgcaggaggactctggcacctacgtctgcactactagaaatgcttcttactgtgacaaaatgtccattgagctcagagtttttgagaatacagatgctttcctgccgttcatctcatacccgcaaattttaaccttgtcaacctctggggtattagtatgccctgacctgagtgaattcacccgtgacaaaactgacgtgaagattcaatggtacaaggattctcttcttttggataaagacaatgagaaatttctaagtgtgagggggaccactcacttactcgtacacgatgtggccctggaagatgctggctattaccgctgtgtcctgacatttgcccatgaaggccagcaatacaacatcactaggagtattgagctacgcatcaagaaaaaaaaagaagagaccattcctgtgatcatttcccccctcaagaccatatcagcttctctggggtcaagactgacaatcccgtgtaaggtgtttctgggaaccggcacacccttaaccaccatgctgtggtggacggccaatgacacccacatagagagcgcctacccgggaggccgcgtgaccgaggggccacgccaggaatattcagaaaataatgagaactacattgaagtgccattgatttttgatcctgtcacaagagaggatttgcacatggattttaaatgtgttgtccataataccctgagttttcagacactacgcaccacagtcaaggaagcctcctccacgttctcctggggcattgtgctggccccactttcactggccttcttggttttggggggaatatggatgcacagacggtgcaaacacagaactggaaaagcagatggtctgactgtgctatggcctcatcatcaagactttcaatcctatcccaagtgaaataaatggaatgaaataattcaaacac

SEQ ID NO: 1609 - protein, 398 aa, Homo sapien
MLRLYVLVMGVSAFTLQPAAHTGAARSCRFRGRHYKREFRLEGEPVALRCPQVPYWLWASVSPRINLTWHKNDSARTVPGEEETRMWAQDGALWLLPALQEDSGTYVCTTRNASYCDKMSIELRVFENTDAFLPFISYPQILTLSTSGVLVCPDLSEFTRDKTDVKIQWYKDSLLLDKDNEKFLSVRGTTHLLVHDVALEDAGYYRCVLTFAHEGQQYNITRSIELRIKKKKEETIPVIISPLKTISASLGSRLTIPCKVFLGTGTPLTTMLWWTANDTHIESAYPGGRVTEGPRQEYSENNENYIEVPLIFDPVTREDLHMDFKCVVHNTLSFQTLRTTVKEASSTFSWGIVLAPLSLAFLVLGGIWMHRRCKHRTGKADGLTVLWPHHQDFQSYPK

SEQ ID NO: 1610 - DNA, 1638 bp, Homo sapien
ggaattccctgatatacacctggaccaccaccaatggatatacaaatggcaaacaattttactccgccctctgcaactcctcagggaaatgactgtgacctctatgcacatcacagcacggccaggatagtaatgcctctgcattacagcctcgtcttcatcattgggctcgtgggaaacttactagccttggtcgtcattgttcaaaacaggaaaaaaatcaactctaccaccctctattcaacaaatttggtgatttctgatatactttttaccaccgctttgcctacacgaatagcctactatgcaatgggctttgactggagaatcggagatgccttgtgtaggataactgcgctagtgttttacatcaacacatatgcaggtgtgaactttatgacctgcctgagtattgaccgcttcattgctgtggtgcaccctctacgctacaacaagataaaaaggattgaacatgcaaaaggcgtgtgcatatttgtctggattctagtatttgctcagacactcccactcctcatcaaccctatgtcaaagcaggaggctgaaaggattacatgcatggagtatccaaactttgaagaaactaaatctcttccctggattctgcttggggcatgtttcataggatatgtacttccacttataatcattctcatctgctattctcagatctgctgcaaactcttcagaactgccaaacaaaacccactcactgagaaatctggtgtaaacaaaaaggctctcaacacaattattcttattattgttgtgtttgttctctgtttcacaccttaccatgttgcaattattcaacatatgattaagaagcttcgtttctctaatttcctggaatgtagccaaagacattcgttccagatttctctgcactttacagtatgcctgatgaacttcaattgctgcatggacccttttatctacttctttgcatgtaaagggtataagagaaaggttatgaggatgctgaaacggcaagtcagtgtatcgatttctagtgctgtgaagtcagcccctgaagaaaattcacgtgaaatgacagaaacgcagatgatgatacattccaagtcttcaaatggaaagtgaaatggattgtattttggtttatagtgacgtaaactgtatgacaaactttgcaggacttcccttataaagcaaaataattgttcagcttccaattagtattcttttatatttctttcattgggcactttcccatctccaactcggaagtaagcccaagagaacaacataaagcaaacaacataaagcacaataaaaatgcaaataaatattttcatttttatttgtaaacgaatacaccaaaaggaggcgctcttaataactcccaatgtaaaaagttttgttttaataaaaaatttaattattatttcttgccaacaaatggctagaaaggactgaatagattatatattgccagatgttaatactgtaacatactttttaaataacatatttcttaaatccaaatttctctcaatgttagatttaattccctcaataacaccaatgttttgttttgtttcgttctgggtcataaaactttgttaaggaactcttttggaataaagagcaggatgctgc

SEQ ID NO: 1611 - protein, 361 aa, Homo sapien [sequence omitted]

SEQ ID NO: 1612 - DNA, 4506 bp, Homo sapien
gatcagctggcgggcgggcgggagccgagcgcggccccggctctcgctgcagcgccgcctcttctctgcgtcgcaggccggcccggcggccgtgacaatgtcgcggggctggtagcagggcgccggccgccgagccgtctcaagtttaaacttacacgaatcgctttctggaggaggaggggacccgctgcgcgattgacacgcatattcctataggcatcctccctcagcccccacccccacggccggattcgggtggctcctctccgaggtgaaatctgagaagaaatccttggatctcttttcttaaaaaaaaaaaaaaaaaaaaaaaaaaaaaaatctagaaaccatcggtattttgctttgctgctccctattcgcaagatgaagaagtttttcgactcccggcgagagcagggcggctctggcctgggctccggctccagcggaggagggggcagcacctcgggcctgggcagtggctacatcggaagagtcttcggcatcgggcgacagcaggtcacagtggacgaggtgttggcggaaggtggatttgctattgtatttctggtgaggacaagcaatgggatgaaatgtgccttgaaacgcatgtttgtcaacaatgagcatgatctccaggtgtgcaagagagaaatccagataatgagggatctttcagggcacaagaatattgtgggttacattgattctagtatcaacaacgtgagtagcggtgatgtatgggaagtgctcattctgatggacttttgtagaggtggccaggtggtaaacctgatgaaccagcgcctgcaaacaggctttacagagaatgaagtgctccagatattttgtgatacctgtgaagctgttgcccgcctgcatcagtgcaaaactcctattatccaccgggacctgaaggttgaaaacatcctcttgcatgaccgaggccactatgtcctgtgtgactttggaagcgccaccaacaaattccagaatccacaaactgagggagtcaatgcagtagaagatgagattaagaaatacacaacgctgtcctatcgagcaccagaaatggtcaacctgtacagtggcaaaatcatcactacgaaggcagacatttgggctcttggatgtttgttgtataaattatgctacttcactttgccatttggggaaagtcaggtggcaatttgtgatggaaacttcacaattcctgataattctcgatattctcaagacatgcactgcctaattaggtatatgttggaaccagaccctgacaaaaggccggatatttaccaggtgtcctacttctcatttaagctactcaagaaagagtgcccaattccaaatgtacagaactctcccattcctgcaaagcttcctgaaccagtgaaagccagtgaggcagctgcaaaaaagacccagccaaaggccagactgacagatcccattcccaccacagagacttcaattgcaccccgccagaggcctaaagctgggcagactcagccgaacccaggaatccttcccatccagccagcgctgacaccccggaagagggccactgttcagcccccacctcaggctgcaggatccagcaatcagcctggccttttagccagtgttccccaaccaaaaccccaagccccacccagccagcctctgccgcaaactcaggccaagcagccacaggctcctcccactccacagcagacgccttctactcaggcccagggtctgcccgctcaggcccaggccacaccccagcaccagcagcaactcttcctcaagcagcaacagcagcagcaacagccaccgccagcacagcagcagccggcaggcacgttttaccagcagcagcaggcccagactcagcagtttcaggcagtacatccagcaacccagcaaccagcaattgctcagttccctgtggtgtcccaaggaggctctcaacagcagctaatgcagaatttctaccagcagcagcagcagcagcaacaacaacagcaacagcaacagctggccacagccctgcatcaacaacagctgatgactcagcaggctgccttgcagcaaaagcccactatggcagcaggacagcagccccagccacagccagctgcagccccacagccagcccctgcccaggagccagcgattcaagccccagtaagacaacagccaaaggttcagacaaccccacctcctgccgtccaggggcagaaagttggatctctcactccaccctcatcccccaaaacccaacgtgctgggcacaggcgtattctcagtgacgtaacccacagtgcagtctttggggtccctgccagcaaatcaacccagctgctccaggcagctgcagctgaggccagtctcaataagtccaagtctgcaaccaccactccatcaggctctcctcggacctctcaacaaaacgtttataatccttcagaagggtctacgtggaatccctttgatgacgataatttctccaaactcacagctgaagaactgctaaacaaggactttgccaagcttggggaaggcaaacatcccgagaagcttggaggctcagctgagagtttgatcccaggctttcaatcaacccaaggtgatgcttttgctacgacctcattttctgctggaactgctgaaaaaaggaagggtgggcagactgtggactctggcctcccgcttctaagcgtgtctgatcctttcattcctcttcaagtacctgatgcaccagaaaaactaattgagggactcaaatctcctgacacttctcttctgctccctgacctcttgcctatgacagatccttttggtagcacttctgatgctgtaattggtaaagtcatcatctctgtttcttcagtcatgcatgatatgtgtgcctgtttcaagaatgacaagtacctagttaaccaatccctggggaatagccctgccaccccagaagccaaggctatttaatctcacttgtatcactccaaatgaagtgttttccttgcttttcgggggtacaacgtctattttttgcctttcttgatatctggagatttctagagtggatctcttatgaatgaggaggaatgtggaaagtttcacatttagttagaagaactttaaaaaattggtttctaactagactacctttactgaacttaatgaaatttagcagattcttcttttttttttttttgtttgagacagagtttcactcttgttgcctgggctggagtgcagtggcaagatctcggctcactgcagcctccatctcccgggttcaggcaattctcctgcctcagcctcccgagtagctggggttacaggcgtgcaccaccatgcctggctaatttttatatttttagtagagatggggtttctccatgttggtcaggctggtctcgaactcctgacctcaggtgatccgcctgccttggcctcccaaagtgctgggattgcaggggtgagccaccatgcccagcccagattcttctttggaaggcccatgtacatccagctgcagtgggacgagcctgggaagcatgggaagaccccatccctacaaaaaaagtgttgttaattggccaggtgtgggggtgcacgcctgtgctaccagctctttgggaggctgagacggaagatcactttgagccagggggtttgaggctgcagtgagccctgatcatgccactgccctccagcttaggtgacagagacccatcttaaacaaaattaaaaaatttaaaaaggtccatgtatataccaagtatcagtaactgagaaaacattttgcccactggttaagccccataaatagaatccagggcaggggcttggtctgcttcctctctcacattttcctatgttccaacagcaaggcaggcaagatttgcaaaatgtccaaggcccctgtactccaggagggtccaatcatgaggcacctaataatgcctttgggcagaaagtcctagaactcagaagtgccatgaccttgcataggggtaggcctgcagctgaggggtgtcacgtggtgcaaaaggcctcccagctacatcctgggatggggtttgagatggattaatggcctttgcatggcacagaggatgtttgcccccaggtttatcccttaataaaagtgaaattaccagaaaaaattaaggtgcctttcagcccatctcttctgacatggaagaggtttgctgagcggcttatgttctgaatttgtttatgagaactgatcattagtgagactggccacagtatttaaccttgcacatgcatgctcagtgaagcctagacattcagagcagcagaaataaagtaacttatttttctttccaccttgcctgagactggcattttagagacctgttaaaagaaagtcttcacatggctgggtgcagtggctcacacttgtaaccacaggactttgggaggccaaggtgggatagatcgcttgagctcaggagcaagacaccatctcaaaaaatgagaatt

SEQ ID NO: 1613 - protein, 863 aa, Homo sapien [sequence omitted]

SEQ ID NO: 1614 - DNA, 1585 bp, Homo sapien
acagcagttacactgcggcgggcgtctgttctagtgtttgagccgtcgtgcttcaccggtctacctcgctagcatgtcgggccgcggcaagactggcggcaaggcccgcgccaaggccaagtcgcgctcgtcgcgcgccggcctccagttcccagtgggccgtgtacaccggctgctgcggaagggccactacgccgagcgcgttggcgccggcgcgccagtgtacctggcggcagtgctggagtacctcaccgctgagatcctggagctggcgggcaatgcggcccgcgacaacaagaagacgcgaatcatcccccgccacctgcagctggccatccgcaacgacgaggagctcaacaagctgctgggcggcgtgacgatcgcccagggaggcgtcctgcccaacatccaggccgtgctgctgcccaagaagaccagcgccaccgtggggccgaaggcgccctcgggcggcaagaaggccacccaggcctcccaggagtactaagagggcccgcgccgcggccggccgccccagctccccatgccaccacaaaggcccttttaagggccaccaccgccctcatggaaagagctgagccgcttcagactgcggggcaagcgggccgcggctcccttcccctcccctcccctcgcccgccttcgccgcccggcctcgagtccccgcccgcccccgctcccgtcccgcaccgcctgccgcgtcggcctcgggcctgccctgtccgccgtccgccctccggtagggttcgggccttccggatgcggcttgggcgctcttcggggacctccgtggcgcggaagacccgagcctgccggggggaggccggcggcgccgcacctgcccgcctcggcgttcgtgactcagccgccccatcccgagtcgctaaggggctgcggggaggccgcagcaccttctggaagacttggccttccgctctgacgcagggccgaggtgggcagtccaggccgagagccggcggccctgaaggtgagtgaggccctcggcagctgcagccggggtgtctggtacccccccggcgtggtgcttagcccaggactttcagacggccgctggccgggaggctttggtgggagagacgcgatcgccgatttcggtctggcgccccttctgcggccgggacccaggcctttcacatcagctctccctccatcttcattcataggtctgcgctggggccgggacgaagcacttggtaacaggcacatcttcctcccgagtgactgcctcctaggaggacatttaggggagggcagaggcctgcagtttggcttcacggctggctatgtggacagcaagagtcgttttgcggaacgcgactggcagccaggcctgtcgggcccccgacgccgccccatttcccttccagcaaactcaactcggcaatccaagcacctagataccagcacaagtcggttaatccctgtctggactgagcctccgttggcttctgaactggaattctgcagctaacccttccacgactagaaccttaggcattggggagttttagatggactaattttattaaaggattgtttttttttt

SEQ ID NO: 1615 - protein, 143 aa, Homo sapien
MSGRGKTGGKARAKAKSRSSRAGLQFPVGRVHRLLRKGHYAERVGAGAPVYLAAVLEYLTAEILELAGNAARDNKKTRIIPRHLQLAIRNDEELNKLLGGVTIAQGGVLPNIQAVLLPKKTSATVGPKAPSGGKKATQASQEY

SEQ ID NO: 1616 - DNA, 2594 bp, Homo sapien
gcttcgggtgccatggggactcctcccggcctgcagaccgactgcgaggcgctgctcagccgcttccaggagacggacagtgtacgcttcgaggacttcacggagctctggagaaacatgaagttcgggactatcttctgtggcagaatgagaaatttagaaaagaacatgtttacaaaagaagctttagctttggcttggcgatattttttacctccatacaccttccagatcagagttggtgctttgtatctgctatatggattatataatacccaactgtgtcaaccaaaacaaaagatcagagttgccctgaaggattgggatgaagttttaaaatttcagcaagatttagtaaatgcacagcattttgatgcagcttatatttttaggaagctacgactagacagagcatttcactttacagcaatgcccaaattgctgtcatataggatgaagaaaaaaattcaccgagctgaagttacagaagaatttaaggacccaagtgatcgtgtgatgaaacttatcacttctgatgtattagaggaaatgctgaatgttcatgatcattatcagaacatgaaacatgtaatttcagttgataagtccaagccagataaagccctcagcttgataaaggatgatttttttgacaatattaagaacatagttttggagcatcagcagtggcacaaagacagaaagaatccatccttaaagtcaaaaactaatgatggagaagaaaaaatggaaggaaattcacaagaaacggagagatgtgaaagggcagaatcattagcgaaaataaaatcaaaggccttttcagttgtcatacaggcatccaaatcaagaaggcatcgtcaagtcaaactcgactcttctgactctgattctgcatctggtcaagggcaagtcaaagcaactaggaaaaaagagaagaaagaaagattgaaaccagcaggaaggaagatgtctctcagaaacaaaggcaatgtgcagaatatacacaaggaagataaacctttaagtctgagtatgcctgtaattacagaagaagaagagaatgaaagtttgagtggaacagagttcactgcatccaagaagaggagaaaacactgaacaaagagcctggtgtagtttttaattttgagttttctgacagaagaaaagattgatattttgtgtattgaacaggaagactgccagtattaaaaaaatccttctgggaatctgtaggttatttcttggaaattgcaatacgtagttctagaataaaagtacaaaaaattagaataagaattctttaacattttctttaatgatttgcataaatggagataaaacttgtatttagtatgtaatagaaaaaattctgttattcgcagattgttactatttcctataaggttttgtgatactatactgtcctaatacagtctggtaatactattctattttatttaaaatattttttattgaaatattaatgtttattacatgcaaataactattttgtatctacagtcggataatggattttttattttgtatatttattctattttgtatattgttaagtgcaataaagtttttgccttgctttattttttaatacataaaacttacattctcataacgtgattgataacttaggaagttcacaatgtattttctacttctgcaattaaatattctttagtgcttgtttattattactaaatactaattaagtactaacaagtacttaaatactaatgtattaagtatttaagtactttctaataaaatctttaacaataataatgtaaatttcagaatgtgtctctggtacagaatagttgatattaacagaaaaaaaaaaatctgtagcttcatgaatatgccactctgttaatttcttgttccagacattttaatagagattgcttgagccatgttgtttgaattgctgccaatagcagaccatatccctatcatgttgttggctcaactgttttttttttttccctaatagagatggagtatcgctatgttgctcaggctggtcttgaactcctgggctcaagctatcctcctgcctcagcctcccaaagtactgggattataggtgtgagctactgtacccagccttaacctgtttcacagttgattatacttcatgctgttttccagcatggtattattaagggatttaaagtttgggttgcatgcctgtaatcccagcattttgggaggccgaggtgggcggatcacgaggtcaggagatcgagaccatcgtgactaacacagtgaaaccccgtctctaataaaaatacgaaaaattagccaggcgtggtggcgggcgcctgtaatcccagctactcgggaagctgaggcaggagaatggtgtgaacccagtgagccgagatcgtgccactgcactccagcctgggcaacagagtgagacttcgtctcaaaaaaaaaaaaaaaagtttgggttgaagatcaaattcgtgatatctctatatctaatctttaaaaatcagaatgctaatgctgacgcaaataaaattttcatttattagcaaaaaaaaaaaaaaaaaaaaaaaaaaaaa

SEQ ID NO: 1617 - protein, 368 aa, Homo sapien
MGTPPGLQTDCEALLSRFQETDSVRFEDFTELWRNMKFGTIFCGRMRNLEKNMFTKEALALAWRYFLPPYTFQIRVGALYLLYGLYNTQLCQPKQKIRVALKDWDEVLKFQQDLVNAQHFDAAYIFRKLRLDRAFHFTAMPKLLSYRMKKKIHRAEVTEEFKDPSDRVMKLITSDVLEEMLNVHDHYQNMKHVISVDKSKPDKALSLIKDDFFDNIKNIVLEHQQWHKDRKNPSLKSKTNDGEEKMEGNSQETERCERAESLAKIKSKAFSVVIQASKSRRHRQVKLDSSDSDSASGQGQVKATRKKEKKERLKPAGRKMSLRNKGNVQNIHKEDKPLSLSMPVITEEEENESLSGTEFTASKKRRKH

SEQ ID NO: 1618 - DNA, 1579 bp, Homo sapien
aaaacactaaggggagcgcgcgaagctgaacttggcgctcgatgggggccgttagccgccctagagcgcgcggagccgcagaggcgtagctggactacaacgcagtgcatctcgggaggccaactcgactggactgggtgagaggacagaggtggctcgatgggcggcccgaaggccggggatcatggcgggaaggcgggcccagccaggttcagccccgccccgacccgccgctccccacccccggccggcctcgcgtgccttcccgcagcactgccgtccccgggatgctgagcgcccaccgtctccccgcagccccctcatgcccggctgcgagctgcccgtgggcacctgcccggacatgtgcccggccgccgagcgcgcccagcgcgaaagggagcaccgcctgcaccgcttggaggtggtgccgggttgccgccaggacccgccccgcgcggatccgcagcgcgcggtgaaggagtacagccgacccgccgccggcaagccccggcccccgcccagccagttgcgtccgccctccgtgctgctggccaccgtgcgctacctggccggtgaggtggcggagagcgccgacatcgcccgcgccgaggtggccagcttcgtggcagaccgcttgcgagctgtgcgcctggacctggcgctgcagggagcgggcgacgccgaggcagcggtggtgctggaggcggcgctggccacgctgctggccgtagtggcgcggctcgggcccgacgcggcgcggggacccgcggacccggtgctgctgcaggcccaggtgcaggagggcttcggctcgctgcggcgctgctacgcgcggggcgccgggccgcacccccgccaacccgccttccagggcctctttctgctctataacctgggtgagtcgggatcctggcggctgggcagagcgtggggacaggagcccaccatgacagtggaggctcggtggaagccctgcatgaggttctacagctgcctgctgccctgcgcgcctgcccgcccctccgcaaggccttggcggtagatgctgccttccgagagggcaatgctgcccgcctgttccgtctgctccagaccctgccctacctgccaagttgcgctgtgcagtgccatgtgggccatgcccgccgggaagccctggcccgcttcgctcgtgcctttagcacccccaagggccagaccttgcctctgggcttcatggtcaacctcttggccctggatggactcagggaagcacgggacctgtgccaggcccacgggctgcccttggacggagaggagagagttgtgttcctgaggggtcgctacgtggaggaagggctaccgcctgccagtacgtgcaaggtgttagtggagagcaaacttcgaggacgtaccctggaggaggtggtcatggcagaggaggaagatgagggcacggacagacctgggtccccagcctgaggagggagcgtgagcctcccagagccccaggactgggccagagcacttaggtttctttttccatggtttccaggtaataaaaggaacttgttttgttggtaaaaaaaaaaaaaaaaaa

SEQ ID NO: 1619 - protein, 285 aa, Homo sapien
MAGRRAQPGSAPPRPAAPHPRPASRAFPQHCRPRDAERPPSPRSPLMPGCELPVGTCPDMCPAAERAQREREHRLHRLEVVPGCRQDPPRADPQRAVKEYSRPAAGKPRPPPSQLRPPSVLLATVRYLAGEVAESADIARAEVASFVADRLRAVRLDLALQGAGDAEAAVVLEAALATLLAVVARLGPDAARGPADPVLLQAQVQEGFGSLRRCYARGAGPHPRQPAFQGLFLLYNLGESGSWRLGRAWGQEPTMTVEARWKPCMRFYSCLLPCAPARPSARPWR

SEQ ID NO: 1620 - DNA, 1311 bp, Homo sapien
gtaagtctgctggcctccgccatcttagtaaagtaacagtcccatgaaacaaagatgcagtcgggcactcactggagagttctgggcctctgcctcttatcagttggcgtttgggggcaagatggtaatgaagaaatgggtggtattacacagacaccatataaagtctccatctctggaaccacagtaatattgacatgccctcagtatcctggatctgaaatactatggcaacacaatgataaaaacataggcggtgatgaggatgataaaaacataggcagtgatgaggatcacctgtcactgaaggaattttcagaattggagcaaagtggttattatgtctgctaccccagaggaagcaaaccagaagatgcgaacttttatctctacctgagggcaagagtgtgtgagaactgcatggagatggatgtgatgtcggtggccacaattgtcatagtggacatctgcatcactgggggcttgctgctgctggtttactactggagcaagaatagaaaggccaaggccaagcctgtgacacgaggagcgggtgctggcggcaggcaaaggggacaaaacaaggagaggccaccacctgttcccaacccagactatgagcccatccggaaaggccagcgggacctgtattctggcctgaatcagagacgcatctgaccctctggagaacactgcctcccgctggcccaggtctcctctccagtccccctgcgactccctgtttcctgggctagtcttggaccccacgagagagaatcgttcctcagcctcatggtgaactcgcgccctccagcctgatcccccgctccctcctccctgccttctctgctggtacccagtcctaaaatattgctgcttcctcttcctttgaagcatcatcagtagtcacaccctcacagctggcctgccctcttgccaggatatttatttgtgctattcactcccttccctttggatgtaacttctccgttcagttccctccttttcttgcatgtaagttgtcccccatcccaaagtattccatctacttttctatcgccgtccccttttgcagccctctctggggatggactgggtaaatgttgacagaggccctgccccgttcacagatcctggccctgagccagccctgtgctcctccctcccccaacactccctaccaaccccctaatcccctactccctccaaccccccctcccactgtaggccactggatggtcatttggcatctccgtatatgtgctctggctcctcagctgagagagaaaaaaataaactgtatttggctgc

SEQ ID NO: 1621 - protein, 207 aa, Homo sapien
MQSGTHWRVLGLCLLSVGVWGQDGNEEMGGITQTPYKVSISGTTVILTCPQYPGSEILWQHNDKNIGGDEDDKNIGSDEDHLSLKEFSELEQSGYYVCYPRGSKPEDANFYLYLRARVCENCMEMDVMSVATIVIVDICITGGLLLLVYYWSKNRKAKAKPVTRGAGAGGRQRGQNKERPPPVPNPDYEPIRKGQRDLYSGLNQRRI

SEQ ID NO: 1622 - DNA, 799 bp, Homo sapien
cactcccaaagaactgggtactcaacactgagcagatctgttctttgagctaaaaaccatgtgctgtaccaagagtttgctcctggctgctttgatgtcagtgctgctactccacctctgcggcgaatcagaagcagcaagcaactttgactgctgtcttggatacacagaccgtattcttcatcctaaatttattgtgggcttcacacggcagctggccaatgaaggctgtgacatcaatgctatcatctttcacacaaagaaaaagttgtctgtgtgcgcaaatccaaaacagacttgggtgaaatatattgtgcgtctcctcagtaaaaaagtcaagaacatgtaaaaactgtggcttttctggaatggaattggacatagcccaagaacagaaagaaccttgctggggttggaggtttcacttgcacatcatggagggtttagtgcttatctaatttgtgcctcactggacttgtccaattaatgaagttgattcatattgcatcatagtttgctttgtttaagcatcacattaaagttaaactgtattttatgttatttatagctgtaggttttctgtgtttagctatttaatactaattttccataagctattttggtttagtgcaaagtataaaattatatttgggggggaataagattatatggactttcttgcaagcaacaagctattttttaaaaaaactatttaacattcttttgtttatattgttttgtctcctaaattgttgtaattgcattataaaataagaaaaacattaataagacaaatatt

SEQ ID NO: 1623 - protein, 96 aa, Homo sapien
MCCTKSLLLAALMSVLLLHLCGESEAASNFDCCLGYTDRILHPKFIVGFTRQLANEGCDINAIIFHTKKKLSVCANPKQTWVKYIVRLLSKKVKNM

SEQ ID NO: 1624 - DNA, 634 bp, Homo sapien
cggctgagaggcagcgaactcatctttgccagtacaggagcttgtgccgtggcccacagcccacagcccacagccatgggctgggacctgacggtgaagatgctggcgggcaacgaattccaggtgtccctgagcagctccatgtcggtgtcagagctgaaggcgcagatcacccagaagattggcgtgcacgccttccagcagcgtctggctgtccacccgagcggtgtggcgctgcaggacagggtcccccttgccagccagggcctgggccctggcagcacggtcctgctggtggtggacaaatgcgacgaacctctgagcatcctggtgaggaataacaagggccgcagcagcacctacgaggtccggctgacgcagaccgtggcccacctgaagcagcaagtgagcgggctggagggtgtgcaggacgacctgttctggctgaccttcgaggggaagcccctggaggaccagctcccgctgggggagtacggcctcaagcccctgagcaccgtgttcatgaatctgcgcctgcggggaggcggcacagagcctggcgggcggagctaagggcctccaccagcatccgagcaggatcaagggccggaaataaaggctgttgtaagagaat

SEQ ID NO: 1625 - protein, 165 aa, Homo sapien
MGWDLTVKMLAGNEFQVSLSSSMSVSELKAQITQKIGVHAFQQRLAVHPSGVALQDRVPLASQGLGPGSTVLLVVDKCDEPLSILVRNNKGRSSTYEVRLTQTVAHLKQQVSGLEGVQDDLFWLTFEGKPLEDQLPLGEYGLKPLSTVFMNLRLRGGGTEPGGRS

SEQ ID NO: 1626 - DNA, 1232 bp, Homo sapien
gccaccaccagtattggggatgctgagctgcggggtacgggcctgaggagggatgggagtaagaagtgctgtggaaaccgtcaggccatgaaccaggctgaccctcggctcagagcagtgtgcttgtggactctcacatctgcagccatgagcagaggcgacaactgcacggatctactcgcactgggaatcccctccataacccaggcctggggactgtgggtcctcttaggggctgtgacgctgctatttctcatctcgctggctgcacacttgtcccagtggaccaggggccggagcaggagccatccggggcagggacgctctggagagtctgtggaagaggtcccgctgtatgggaacctgcattatctacagacaggacggctgtctcaagacccagagccagaccagcaggatccaactcttggaggccctgccagggctgcagaggaggtgatgtgctataccagcctgcagctgcggcctcctcagggtcggatccccggtcctggaacccccgtcaagtactcggaggtggtgctggactctgagccaaagtcccaggcctcgggccccgagccggagctctatgcctcagtatgtgcccagacccgcagggcccgggcctccttcccggatcaggcctatgccaacagccagcctgcagccagctgagatggagggcctggcacagcggggcgtgcactgccccagccccccgtagcaggggcatgactgtttcccaaccagcacccaaagacgggctgccattgccaagtcacaggatgtgatctaccccggacttcctatctgagcttcaagggagacatctcagggcaaagctttcgtgatggaggaggcaaagacagtagccccctccttatttcttttttctatctgttcctcttagcccccaaactcccaggttctcacttccttcttctggagtttaaccagatcctccccacccccgctccctcatagtctacccccacgcctcagtgtctcctcaggcacaggaagtgggcggtgggggaggggtaagggcctgacagtgggtgggtgggtatattcctcaggagtccacagactggagtggacctggaacttagagacgggagggacccgagcctggcttttgacctaagaaccctagcaggagaatacagtctccatcctgctgtctctgtcctgtcccaagttttcaaataaaactttccaaaaaagtg

SEQ ID NO: 1627 - protein, 196 aa, Homo sapien
MNQADPRLRAVCLWTLTSAAMSRGDNCTDLLALGIPSITQAWGLWVLLGAVTLLFLISLAAHLSQWTRGRSRSHPGQGRSGESVEEVPLYGNLHYLQTGRLSQDPEPDQQDPTLGGPARAAEEVMCYTSLQLRPPQGRIPGPGTPVKYSEVVLDSEPKSQASGPEPELYASVCAQTRRARASFPDQAYANSQPAAS

SEQ ID NO: 1628 - DNA, 878 bp, Homo sapien
cagattttcaggttgattgatgtgggacagcagccacaatgaggaactcctatagatttctggcatcctctctctcagttgtcgtttctctcctgctaattcctgaagatgtctgtgaaaaaattattggaggaaatgaagtaactcctcattcaagaccctacatggtcctacttagtcttgacagaaaaaccatctgtgctggggctttgattgcaaaagactgggtgttgactgcagctcactgtaacttgaacaaaaggtcccaggtcattcttggggctcactcaataaccagggaagagccaacaaaacagataatgcttgttaagaaagagtttccctatccatgctatgacccagccacacgcgaaggtgaccttaaacttttacagctgacggaaaaagcaaaaattaacaaatatgtgactatccttcatctacctaaaaagggggatgatgtgaaaccaggaaccatgtgccaagttgcagggtgggggaggactcacaatagtgcatcttggtccgatactctgagagaagtcaatatcaccatcatagacagaaaagtctgcaatgatcgaaatcactataattttaaccctgtgattggaatgaatatggtttgtgctggaagcctccgaggtggaagagactcgtgcaatggagattctggaagccctttgttgtgcgagggtgttttccgaggggtcacttcctttggccttgaaaataaatgcggagaccctcgtgggcctggtgtctatattcttctctcaaagaaacacctcaactggataattatgactatcaagggagcagtttaaataaccgtttcctttcatttactgtggcttcttaatcttttcacaaataaa

SEQ ID NO: 1629 - protein, 262 aa, Homo sapien
MRNSYRFLASSLSVVVSLLLIPEDVCEKIIGGNEVTPHSRPYMVLLSLDRKTICAGALIAKDWVLTAAHCNLNKRSQVILGAHSITREEPTKQIMLVKKEFPYPCYDPATREGDLKLLQLTEKAKINKYVTILHLPKKGDDVKPGTMCQVAGWGRTHNSASWSDTLREVNITIIDRKVCNDRNHYNFNPVIGMNMVCAGSLRGGRDSCNGDSGSPLLCEGVFRGVTSFGLENKCGDPRGPGVYILLSKKHLNWIIMTIKGAV

SEQ ID NO: 1630 - DNA, 853 bp, Homo sapien
cctgggccctcctgctccttgcagccatgctcctgggcaacccagcccctgcctccgcatctgcgtggtgaaggccattggcctcatcggtggatctgcgtttcctcgggcccacactgtctaggattgtgcggggctggtgagagaacaagatctcttccgtgttcaaggcagacttcctgccccctgcaccctgctctctcccgggccttgaggtcagtgtgagccccaagggcaagaacacttctggaagggagagtggatttggctgggcctctggatggaaggtctggtcttctctcgtctgagccctgagtactacgacccggcaagagcccacctgcgtgatggggagaaatcctgcccgtgcgggcaggagggcccccagggtgacctgttgaccaaaacacaggagctgggccgtgactacaggacctgtctgacgatagtccaaaaactgaagaagatggtggataagcccacccagagaagtgtttccaatgctgcgacccgggtgtgtaggacggggaggtcacgatggcgcgacgtctgcagaaatttcatgaggaggtatcagtctagagttatccaaggcctcgtggccggagaaactgcccagcagatctgtgaggacctcaggttgtgtataccttctacaggtcccctctgagccctctcaccttgtcctgtggaagaagcacaggctcctgtcctcagatcccgggaacgtcagcaacctctgccggctcctcgcttcctcgatccagaatccactctccagtctccctcccctgactccctctgctgtcctcccctctcaggggaataaagtgtcaagcaagattttagccgc

SEQ ID NO: 1631 - protein, 129 aa, Homo sapien
MEGLVFSRLSPEYYDPARAHLRDGEKSCPCGQEGPQGDLLTKTQELGRDYRTCLTIVQKLKKMVDKPTQRSVSNAATRVCRTGRSRWRDVCRNFMRRYQSRVIQGLVAGETAQQICEDLRLCIPSTGPL

SEQ ID NO: 1632 - DNA, 1461 bp, Homo sapien
tttaaggcgccgggtttccggggctcctggccccgcttattccgcgggggtcggcggggtcggcctgggcgcccgcgccgccgctgcgctttgtccgctgggcacactgcttctgggaggggcgggcagacatggtggcggccgccgccccctcctcggccctagcatgccgcggccgcctcgcggctacccggcttgccggtcccgagcggcagccccggggtggcgatggggtcgcgccgaggcagcggaggttctgcgggcgactggaggttggcagtgggcgggagaaagaggaaggcaggcgcggctgggcctcggcctctggcgccgcggtaccctttgtctcggcagcctgacggccccgccgggctctccggagaggggaacgggcggcgagggtggcgggtcctgggcgccctgtgctgcggggccgagaggcgctcgggtcgcggcgggaccggccggaccagacagggttaatggaagagcctggccagtcccgcgcggggcccccgcagcgacagccttggccgcggggactggagtcctgagggggagaagcctgccgttctgaaggctcgggacttctgccccaaagacttcgccgccgagaactgcgggtgcactgcctcagggaagaagttgagaattttgccaggtcatctctgccagggcacagttcatcactgtgtgtttagtgtgtttcggtgaagctctccaagtgtgttgaatcagcgtgcctagcctcaagggtgcatcgtgaaaactgaaaccaaaggaatgatacaggcctgctttgtgtgtgtcttcccactttaagcttgttttcagtacaaatactcttgctttaaacctgattggactgtggcgagcggacatctgttcaaaggaggggccgagaccacagtacttctgaagggggcttgataatgtggaaacattttaagttttctctccggactgttttgctctctcaattcaggcaagttactgaagtacgttttttatctagaaaaaggtttgatgtagtctgtaaatggtccttgtaaagtacattgccatctcagaattaaaagatccactctcatttattatgcagaagttagtggtcattctttcctgtagatagtttatctcatgtaaagacccacccagcttggtttaaatttttttctcactgacgtataaccatcagctttgatacttccattttcaggctcagactttgaatttaaggaaactaaagatgactttattttcttttctcttggtttttttttccaaaaacaaaaaataaatccattacatgttaacatagatgataagagtgacatcttgcatttttgcaaatctttttaatgcctggtttaatagaagattctcagatctacgtcagactgttgtggttagcacaccatgtaacctctggaacactccactgtacactcatactttttt

SEQ ID NO: 1633 - protein, 136 aa, Homo sapien
MPRPPRGYPACRSRAAAPGWRWGRAEAAEVLRATGGWQWAGERGRQARLGLGLWRRGTLCLGSLTAPPGSPERGTGGEGGGSWAPCAAGPRGARVAAGPAGPDRVNGRAWPVPRGAPAATALAAGTGVLRGRSLPF

SEQ ID NO: 1634 - DNA, 1543 bp, Homo sapien
gctctcattaccttctgcccatcacttaataaatagccagccaattcatcaacattctggtacactgttggagagatgagacagtcacaccagctgcccctagtggggctcttactgttttcttttattccaagccaactatgcgagatttgtgaggtaagtgaagaaaactacatccgcctaaaacctctgttgaatacaatgatccagtcaaactataacaggggaaccagcgctgtcaatgttgtgttgtccctcaaacttgttggaatccagatccaaaccctgatgcaaaagatgatccaacaaatcaaatacaatgtgaaaagcagattgtcagatgtaagctcgggagagcttgccttgattatactggctttgggagtatgtcgtaacgctgaggaaaacttaatatatgattaccacctgatcgacaagctagaaaataaattccaagcagaaattgaaaatatggaagcacacaatggcactcccctgactaactactaccagctcagcctggacgttttggccttgtgtctgttcaatgggaactactcaaccgccgaagttgtcaaccacttcactcctgaaaataaaaactattattttggtagccagttctcagtagatactggtgcaatggctgtcctggctctgacctgtgtgaagaagagtctaataaatgggcagatcaaagcagatgaaggcagtttaaagaacatcagtatttatacaaagtcactggtagaaaagattctgtctgagaaaaaagaaaatggtctcattggaaacacatttagcacaggagaagccatgcaggccctctttgtatcatcagactattataatgaaaatgactggaattgccaacaaactctgaatacagtgctcacggaaatttctcaaggagcattcagcaatccaaacgctgcagcccaggtcttacctgccctgatgggaaagaccttcttggatattaacaaagactcttcttgcgtctctgcttcaggtaacttcaacatctccgctgatgagcctataactgtgacacctcctgactcacaatcatatatctccgtcaattactctgtgagaatcaatgaaacatatttcaccaatgtcactgtgctaaatggttctgtcttcctcagtgtgatggagaaagcccagaaaatgaatgatactatatttggtttcacaatggaggagcgctcatgggggccctatatcacctgtattcagggcctatgtgccaacaataatgacagaacctactgggaacttctgagtggaggcgaaccactgagccaaggagctggtagttacgttgtccgcaatggagaaaacttggaggttcgctggagcaaatactaataagcccaaactttcctcagctgcataaaatccatttgcagtggagttccatgtttattgtccttatgccttcttcttcatttatcccagtacgagcaggagagttaataacctccccttctctctctacatgttcaataaaagttgttgaaagattaacaactgt

SEQ ID NO: 1635 - protein, 433 aa, Homo sapien
MRQSHQLPLVGLLLFSFIPSQLCEICEVSEENYIRLKPLLNTMIQSNYNRGTSAVNVVLSLKLVGIQIQTLMQKMIQQIKYNVKSRLSDVSSGELALIILALGVCRNAEENLIYDYHLIDKLENKFQAEIENMEAHNGTPLTNYYQLSLDVLALCLFNGNYSTAEVVNHFTPENKNYYFGSQFSVDTGAMAVLALTCVKKSLINGQIKADEGSLKNISIYTKSLVEKILSEKKENGLIGNTFSTGEAMQALFVSSDYYNENDWNCQQTLNTVLTEISQGAFSNPNAAAQVLPALMGKTFLDINKDSSCVSASGNFNISADEPITVTPPDSQSYISVNYSVRINETYFTNVTVLNGSVFLSVMEKAQKMNDTIFGFTMEERSWGPYITCIQGLCANNNDRTYWELLSGGEPLSQGAGSYVVRNGENLEVRWSKY

SEQ ID NO: 1636 - DNA, 2201 bp, Homo sapien
atcctgttgtgcctatcacctgttgaagttgccagtcttaaggaagggatcaatttctttcgcaataagagcactggcaaagactacgtcttgtacaagaataagagccgactgagggcatgcaagaatatgtgcaagcaccaaggaggcctgttcataaaagatatcgaggatttagccggaagttgttgaaatggatgaaaacaacggacttttgcttttagaactgaatcctcctaacccttgggacttacagcccagatctcctgaagagttggcttttggagaagtacagataacatatctcactcatgcctgcatggacctcaagttaggagacaagagaatggtgtttgacccttggttaatcggtcctgcttttgcccgtggatggtggttgctccatgagcctccatctgattggctggagaggctgtgccaggcagacctcgtttacatcagtcatctgcactcagaccacctgagttaccccacactgaaaaagcttgctgggagaagaccagatattcccatttatgttggaaacacagaaaggcctgtattttggaatctgaatcagagcggtgtccagttgactaatatcaatgtcgtgccatttggaatatggcagcaggtggacaaaaatcttcgattcatgatcttgatggatggtgttcatcctgagatggacacttgcattattgtggagtacaaaggtcataaaatactcaatacagtagactgcaccagacccaatgggggaaggctgcctatgaaggttgctctaatgatgagtgattttgctggaggagcatcaggctttccaatgactttcagtggtggaaaatttacggaggaatggaaagcccaattcattaaaacagaaaggaagaagctcctgaactacaaggcttggctggtgaagaacctgcaaccccgaatttattgtccctttgctgggtattttgtggaatctcacccatcagacaagtacatcaaggaaacaaacaccaaaaatgacccaaatgaactcaacaatcttatcaagaaaaactctgatgtgataacatggacccctcgaccgggagccacccttgatctgggaagaatgctgaaggatccaacagacagcaagggcatcatagagcctccagaggggacaaaaatttacaaggattcctgggattttgaaccttatttggaaatcttgaatgctgctctaggagatgaaatatttcttcactcatcctggataaaagaatacttcacttgggctggatttaaagattacaaccttgtggtcaggatgattgagacagatgaggacttcaatccttttcctggaggatatgactatttggttgactttttagatttatccttcccaaaagaaagaccacaacgagaacatccctatgaggaaatccatagccgggtggatgtcatcagacacgtggtgaagaatggtctactctgggatgagttgtatataggattccaaacacggctccagcgggatcctgacatataccatcacctgttttggaatcattttcaaataaaactccccctcacaccacccaactggaagtcattcctgatgtgctgtgagcagaatgggcctgcgattttgcaagaatgcaaaaccacatgaaaatttcaagaattcactgatctgatgcaaaataaaaatttatcattacatcttgaacccaggaagcttacagcaaagagactatgctttatgacgtcagcaatagataattccacgttgcctttgtgatttgtatatatagcttacatttgtggaccactacatagccagattcaaaaatattttacttgttccatccacagttctctacagaaagaaccaatgaacccaataggaacaaattctctgtggaaaacaaagcatagctgtagtagatacgaatccaatcacagaggaaacaggaagagaaaaacatccaagactacagtgaaaactggaaatggtctgttttcgtgatattcgtatgattaagatgcaaattttttcttaggaaaatgtgattgttaactagcattctgttttacatgttgacatttctaacacacacaccactgatttgaacttcaaaatttattttctgattatatatgctaggtctgattctgaagatacaagaattcaatggtggaatttgtctcctgaaatt

SEQ ID NO: 1637 - protein, 486 aa, Homo sapien
MDENNGLLLLELNPPNPWDLQPRSPEELAFGEVQITYLTHACMDLKLGDKRMVFDPWLIGPAFARGWWLLHEPPSDWLERLCQADLVYISHLHSDHLSYPTLKKLAGRRPDIPIYVGNTERPVFWNLNQSGVQLTNINVVPFGIWQQVDKNLRFMILMDGVHPEMDTCIIVEYKGHKILNTVDCTRPNGGRLPMKVALMMSDFAGGASGFPMTFSGGKFTEEWKAQFIKTERKKLLNYKAWLVKNLQPRIYCPFAGYFVESHPSDKYIKETNTKNDPNELNNLIKKNSDVITWTPRPGATLDLGRMLKDPTDSKGIIEPPEGTKIYKDSWDFEPYLEILNAALGDEIFLHSSWIKEYFTWAGFKDYNLVVRMIETDEDFNPFPGGYDYLVDFLDLSFPKERPQREHPYEEIHSRVDVIRHVVKNGLLWDELYIGFQTRLQRDPDIYHHLFWNHFQIKLPLTPPNWKSFLMCCEQNGPAILQECKTT

SEQ ID NO: 1638 - DNA, 2525 bp, Homo sapien
agccggccgctaagaagccgaaagatgtccaggtcgggcgcggcggctgagaaggcggactccagacagcgaccccagatgaaggtaaatgaatataaagaaaatcaaaacatcgcttatgtgtctctgagaccagcacagactacagttttaataaaaacagctaaggtctatcttgcccccttttcactcagtaattaccagctagaccagcttatgtgccccaaatccctatcagaaaagaattctaacaatgaagtggcgtgtaagaagactaaaataaagaaaacttgcagaaggattatacctccaaagatgaaaaacacatcttccaaggcagaatccacgctgcaaaattcatcctcagctgttcatactgaaagtaacaagctacaacccaagagaacggcagatgcgatgaatctcagtgttgatgtggaaagtagtcaggatggagacagtgatgaagataccacaccagccctggatttttcgggattgtcaccctacgaaaggaagagactgaagaacatatcagaaaacgcagacttttttgcttctcttcagttgtctgagtctgctgcaagactccgtgaaatgatagagaagagacagcctcctaaatccaaaagaaagaagcctaagagagaaaatgggattggatgtagaaggtcaatgcgattactaaaagttgatccttcgggagtttcattaccagcagctccaacaccgccgacattagtagcagatgaaactcctttgttacctcctgggcctttagaaatgacttctgaaaatcaagaagacaacaatgaacgatttaaaggatttctgcacacatgggcaggaatgagcaagccaagtagtaagaacactgagaagggattatctagcattaaaagctacaaagccaatttaaatggcatggtcattagtgaagataccgtttacaaagttaccacaggcccaatattctctatggctctccatccatcagaaactagaactttggtagcagttggggccaaatttgggcaagttggactttgtgatttgacccagcaacctaaagaagatggagtttatgtttttcacccccatagtcagccagttagctgtctttacttctcacccgccaatccggcccacatactgtcactgagctatgatggcacgttacgctgtggggatttttccagggctatttttgaagaggtgtatagaaatgaaagaagtagcttttcctccttcgacttcttggcagaagatgcctccactttaatagtaggacactgggatggaaatatgtcactggtggatagacggacacctggaacttcttatgagaaacttaccagttcttctatgggaaaaataagaactgttcatgtccacccagtgcatagacagtattttatcactgccggattgagggatactcatatttatgatgcaaggcgattgaattccaggagaagtcagcctttgatttctttgactgaacatacaaagagcattgcttccgcctatttttcacctcttactggtaacagagtggtgaccacatgtgctgattgtaatctgagaatttttgacagcagctgtatatcttctaagattccgctcctcaccaccatcaggcacaacactttcactgggcgatggctgaccaggttccaagccatgtgggatcctaaacaagaagactgtgtcatagttggcagcatggcccatccacgacgggtagaaatcttccatgagacaggaaagagggtgcattcgtttggtggagaataccttgtctctgtgtgttccatcaatgccatgcacccaactcggtatattttggctggaggtaattccagcgggaagatacatgtttttatgaatgaaaaaagctgctgagtttttggtttaggaacatcaatttgttcaaattgaccactgtctaaggagcctagtaatcggcgtgccttagtgtgtttatgtggtaatgtgttacatttagcaattataacattgttttattaataagactataagaagagtgtacttttagtaagggagaagtcttggagggttgcttctgcaggacggggagggaatttgaggggaggctgaggtgccgtcaggactttttttttttttttttttttgagatggagttttgctcttgttgcccaggctggagtgcaatagcgcgatcttggctcaccgcaacctccgcctcccaggttcaagcgattctcctgcctcagactcctaagtagctgggattacaggcacctgccaccacgcctggctatttttttgtatttttagtagagatggggtttcatcatgttggccaggctggtctcgagctcctgacctcaggtgatctgcccgcctcggcctccaaaagtgctggaattacaggcgtgagccaccatgcctggccatcagaacttgtaatcaagacagtatgttgagaaattctaacattataaattacaaagctttgactattaaagtttttgtgatct

SEQ ID NO: 1639 - protein, 626 aa, Homo sapien
MSRSGAAAEKADSRQRPQMKVNEYKENQNIAYVSLRPAQTTVLIKTAKVYLAPFSLSNYQLDQLMCPKSLSEKNSNNEVACKKTKIKKTCRRIIPPKMKNTSSKAESTLQNSSSAVHTESNKLQPKRTADAMNLSVDVESSQDGDSDEDTTPALDFSGLSPYERKRLKNISENADFFASLQLSESAARLREMIEKRQPPKSKRKKPKRENGIGCRRSMRLLKVDPSGVSLPAAPTPPTLVADETPLLPPGPLEMTSENQEDNNERFKGFLHTWAGMSKPSSKNTEKGLSSIKSYKANLNGMVISEDTVYKVTTGPIFSMALHPSETRTLVAVGAKFGQVGLCDLTQQPKEDGVYVFHPHSQPVSCLYFSPANPAHILSLSYDGTLRCGDFSRAIFEEVYRNERSSFSSFDFLAEDASTLIVGHWDGNMSLVDRRTPGTSYEKLTSSSMGKIRTVHVHPVHRQYFITAGLRDTHIYDARRLNSRRSQPLISLTEHTKSIASAYFSPLTGNRVVTTCADCNLRIFDSSCISSKIPLLTTIRHNTFTGRWLTRFQAMWDPKQEDCVIVGSMAHPRRVEIFHETGKRVHSFGGEYLVSVCSINAMHPTRYILAGGNSSGKIHVFMNEKSC

SEQ ID NO: 1640 - DNA, 3472 bp, Homo sapien
tggcggccgccggcgtcgccgccatggacctaggacccttgaacatctgtgaagaaatgactattctgcatggaggcttcttgctggccgagcagctgttccaccctaaggcactggcagaattaacaaagtctgactgggaacgtgttggacggcccatcgtggaggccttaagggagatctcctcggctgcagcacactcccagccctttgcctggaagaagaaagccctgatcatcatctgggccaaggttctgcagccgcaccccgtgaccccgtccgacacagagacacggtggcaggaagacctgttcttctcggtgggcaacatgatccccaccatcaaccacaccatcctcttcgagctgctcaaatccctggaagcttctggactctttatccagctcctgatggccctgcccaccaccatctgccatgcagaactagagcgctttctggaacatgtgaccgttgacacttctgccgaagacgtggccttcttcctggacatctggtgggaggtgatgaagcacaagggtcacccgcaggaccccctgctctcccagtttagtgcaatggcccataagtacctgcctgccttagatgagttcccccatcctccaaagaggcttaggtcagacccagacgcgtgccccaccatgcccctgttggccatgctgctccgcgggctgacacagatccagagtcggatcctgggcccggggaggaagtgctgtgcgctggccaacctggctgacatgctgactgtgtttgcgctgacagaggacgacccccaggaggtgtctgcaaccgtgtatctggacaaactggccacggtgatctctgtgtggaactcggacacccagaatccctaccaccagcaggcgctggcagagaaggtgaaggaggcagaacgggatgtcagcctgacctcgctggccaaactccccagtgagaccattttcgtgggctgcgagttcctgcaccacctgctgcgggagtggggggaggagttgcaggccgtgctccgcagcagccaggggacaagttacgacagctaccggctgtgcgacagtctgacttccttcagccagaacgcgacgctctacctgaaccgcaccagcctgtccaaggaggacaggcaggtggtctctgagctggcggagtgtgtcagggacttcctgaggaaaacgagcacggtgctgaagaacagggccttggaggatatcacagcttccattgccatggccgtcatccagcagaagatggaccgccatatggaagtgtgctacatttttgcctctgagaagaagtgggccttctcggacgagtgggtagcctgcctggggagtaacagggccctcttccgagagccagacttggtgttgaggctgctggaaacagtgatagacgtcagcacagctgacagagccatccctgagtctcagatccggcaggtgatccacctgatcctggaatgttacgcagacctctccctgccaggtaaaaataaagtccttgcaggtatcctgcgttcctgggggcgaaagggcctctctgaaaagttgctggcttatgtggagggttttcaggaagacctcaatacaacttttaaccagctcactcagagtgcctccgaacagggcttggcaaaagctgtggcctccgtggcccgcctggtcatagtgcacccggaagtcacggtgaagaaaatgtgcagcctggctgtggtcaatctcggcacccacaagttcctggcccagattctcactgccttccctgcccttaggtttgtggaagtgcagggtcccaattcatctgccactttcatggtgtcatgcctcaaagaaaccgtctggatgaagttctctacacccaaggaagaaaagcaatttttagagctcctgaactgcctgatgagtcccgtgaaaccccaagggattccagtggctgctcttcttgagccagacgaggtgctgaaggaatttgtcctgcctttcttgaggttagatgttgaagaggtagacctcagtctgaggatcttcatccagactctagaggcaaacgcgtgccgagaggaatactggctccagacctgctccccgtttccactcctcttcagcttgtgccagctcttggaccgctttagcaaatactggccgcttcccaaggagaagcggtgcctctctttggataggaaggatctagcgatccatatcctggagctcctgtgtgagattgtatcagccaatgctgagaccttctccccggatgtctggatcaagtccctgtcctggctccaccgcaagttagaacagctagactggactgtgggcctgaggctgaagagcttcttcgaggggcacttcaagtgtgaagtgccagccacactttttgagatctgtaagctttcagaagacgagtggacctcccaggcccacccagggtacggggctggcacggggctcctggcctggatggagtgctgctgcgtctccagcggcatctcggagaggatgctgtctctcttggtggtggacgtgggcaatcctgaggaggtcagactgttcagcaaaggctttctggtggccctggtgcaagtcatgccttggtgcagccctcaggagtggcagcgccttcaccagctgaccaggagactgctggagaagcagctcctccatgtcccttatagcctggaatatattcagtttgttcccctgctcaacctgaagccctttgcccaggagttgcaactctccgtcctcttcctgaggactttccagtttctctgcagccatagctgtcgtaattggcttcctctggaaggctggaaccacgtggtcaaactcctctgtggcagtctgacccgcctcctggactcagtcagggcgatacaggcagctggcccttgggttcaaggaccagagcaggacctgacccaggaagccctgtttgtttacacccaggtgttctgccatgctctgcacatcatggccatgctccacccggaggtctgtgagccactctacgttttagccttggaaaccctcacctgctatgagactttgagcaagaccaacccttctgtcagctccttgctccagagggcacacgagcagcgcttcttaaagtccattgctgagggcattggccctgaagaacggcgccaaaccctgttgcagaagatgagcagcttctgacttggcgtggggagctgggccccaacatggcgggtctgcagaagatcagcagcttcttacctgtgcgggagcgaaaaagctgggcttcaacatggcaggtctgtaggggtcagacccgagcagcctggactttacagttatgtgaaactgtccacaaaaagtcatggcaataatggtgtaaagaaaatagtttcttgggtatttgtaacgtacaaactatcataaaaattctcctctttcgcatctcaaaaaaaaaaaaaaaaaaaaaaaaa

SEQ ID NO: 1641 - protein, 1058 aa, Homo sapien
MDLGPLNICEEMTILHGGFLLAEQLFHPKALAELTKSDWERVGRPIVEALREISSAAAHSQPFAWKKKALIIIWAKVLQPHPVTPSDTETRWQEDLFFSVGNMIPTINHTILFELLKSLEASGLFIQLLMALPTTICHAELERFLEHVTVDTSAEDVAFFLDIWWEVMKHKGHPQDPLLSQFSAMAHKYLPALDEFPHPPKRLRSDPDACPTMPLLAMLLRGLTQIQSRILGPGRKCCALANLADMLTVFALTEDDPQEVSATVYLDKLATVISVWNSDTQNPYHQQALAEKVKEAERDVSLTSLAKLPSETIFVGCEFLHHLLREWGEELQAVLRSSQGTSYDSYRLCDSLTSFSQNATLYLNRTSLSKEDRQVVSELAECVRDFLRKTSTVLKNRALEDITASIAMAVIQQKMDRHMEVCYIFASEKKWAFSDEWVACLGSNRALFREPDLVLRLLETVIDVSTADRAIPESQIRQVIHLILECYADLSLPGKNKVLAGILRSWGRKGLSEKLLAYVEGFQEDLNTTFNQLTQSASEQGLAKAVASVARLVIVHPEVTVKKMCSLAVVNLGTHKFLAQILTAFPALRFVEVQGPNSSATFMVSCLKETVWMKFSTPKEEKQFLELLNCLMSPVKPQGIPVAALLEPDEVLKEFVLPFLRLDVEEVDLSLRIFIQTLEANACREEYWLQTCSPFPLLFSLCQLLDRFSKYWPLPKEKRCLSLDRKDLAIHILELLCEIVSANAETFSPDVWIKSLSWLHRKLEQLDWTVGLRLKSFFEGHFKCEVPATLFEICKLSEDEWTSQAHPGYGAGTGLLAWMECCCVSSGISERMLSLLVVDVGNPEEVRLFSKGFLVALVQVMPWCSPQEWQRLHQLTRRLLEKQLLHVPYSLEYIQFVPLLNLKPFAQELQLSVLFLRTFQFLCSHSCRNWLPLEGWNHVVKLLCGSLTRLLDSVRAIQAAGPWVQGPEQDLTQEALFVYTQVFCHALHIMAMLHPEVCEPLYVLALETLTCYETLSKTNPSVSSLLQRAHEQRFLKSIAEGIGPEERRQTLLQKMSSF

SEQ ID NO: 1642 - DNA, 1377 bp, Homo sapien
aacgaaaccaacagcagtccaagctcagtcagcagaagagataaaagcaaacaggtctgggaggcagttctgttgccactctctctcctgtcaatgatggatctcagaaataccccagccaaatctctggacaagttcattgaagactatctcttgccagacacgtgtttccgcatgcaaatcaaccatgccattgacatcatctgtgggttcctgaaggaaaggtgcttccgaggtagctcctaccctgtgtgtgtgtccaaggtggtaaagggtggctcctcaggcaagggcaccaccctcagaggccgatctgacgctgacctggttgtcttcctcagtcctctcaccacttttcaggatcagttaaatcgccggggagagttcatccaggaaattaggagacagctggaagcctgtcaaagagagagagcattttccgtgaagtttgaggtccaggctccacgctggggcaacccccgtgcgctcagcttcgtactgagttcgctccagctcggggagggggtggagttcgatgtgctgcctgcctttgatgccctgggtcagttgactggcagctataaacctaacccccaaatctatgtcaagctcatcgaggagtgcaccgacctgcagaaagagggcgagttctccacctgcttcacagaactacagagagacttcctgaagcagcgccccaccaagctcaagagcctcatccgcctagtcaagcactggtaccaaaattgtaagaagaagcttgggaagctgccacctcagtatgccctggagctcctgacggtctatgcttgggagcgagggagcatgaaaacacatttcaacacagcccagggatttcggacggtcttggaattagtcataaactaccagcaactctgcatctactggacaaagtattatgactttaaaaaccccattattgaaaagtacctgagaaggcagctcacgaaacccacgcctgtgatcctggacccggcggaccctacaggaaacttgggtggtggagacccaaagcgttggaggcagctggcacaagaggctgaggcctggctgaattacccatgctttaagaattgggatgggtccccagtgagctcctggattctgctggtgagacctcctgcttcctccctgccattcatccctgcccctctccatgaagcttgagacatatagctggagaccattctttccaaagaacttacctcttgccaaaggccatttatattcatatagtgacaggctgtgctccatattttacagtcattttggtcacaatcgagggtttctggaattttcacatcccttgtccagaattcattcccctaagagtaataataaataatctctaacacc

SEQ ID NO: 1643 - protein, 400 aa, Homo sapien; identical to SEQ ID NO: 929

SEQ ID NO: 1644 - DNA, 3299 bp, Homo sapien
cggagggagcgctgggagcgagcaagcgagcgtttggagcccgggccagcagagggggcgcccggtcgctgcctgtaccgctcccgctggtcatctccgccgcgctcgggggccccgggaggagcgagaccgagtcggagagtccgggagccaagccgggcgaaacccaactgcggaggacgcccgccccactcagcctcctcctgcgtccgagccggggagcatcgccgagcgccccacgggccggagagctgggagcacaggtcccggcagccccagggatggtctaggagccggcgtaaggctcgctgctctgctccctgccggggctagccgcctcctgccgatcgcccggggctgcgagctgcggcggcccggggctgctcgccgggcggcgcaggccggagaagttagttgtgcgcgcccttagtgcgcggaaccagccagcgagcgagggagcagcgaggcgccgggaccatgggctgggggagccgctgctgctgcccgggacgtttggacctgctgtgcgtgctggcgctgctcgggggctgcctgctccccgtgtgtcggacgcgcgtctacaccaaccactgggcagtcaaaatcgccgggggcttcccggaggccaaccgtatcgccagcaagtacggattcatcaacataggacagataggggccctgaaggactactaccacttctaccatagcaggacgattaaaaggtcagttatctcgagcagagggacccacagtttcatttcaatggaaccaaaggtggaatggatccaacagcaagtggtaaaaaagcggacaaagagggattatgacttcagtcgtgcccagtctacctatttcaatgatcccaagtggcccagcatgtggtatatgcactgcagtgacaatacacatccctgccagtctgacatgaatatcgaaggagcctggaagagaggctacacgggaaagaacattgtggtcactatcctggatgacggaattgagagaacccatccagatctgatgcaaaactacgatgctctggcaagttgcgacgtgaatgggaatgacttggacccaatgcctcgttatgatgcaagcaacgagaacaagcatgggactcgctgtgctggagaagtggcagccgctgcaaacaattcgcactgcacagtcggaattgctttcaacgccaagatcggaggagtgcgaatgctggacggagatgtcacggacatggttgaagcaaaatcagttagcttcaacccccagcacgtgcacatttacagcgccagctggggcccggatgatgatggcaagactgtggacggaccagcccccctcacccggcaagcctttgaaaacggcgttagaatggggcggagaggcctcggctctgtgtttgtttgggcatctggaaatggtggaaggagcaaagaccactgctcctgtgatggctacaccaacagcatctacaccatctccatcagcagcactgcagaaagcggaaagaaaccttggtacctggaagagtgttcatccacgctggccacaacctacagcagcggggagtcctacgataagaaaatcatcactacagatctgaggcagcgttgcacggacaaccacactgggacgtcagcctcagcccccatggctgcaggcatcattgcgctggccctggaagccaatccgtttctgacctggagagacgtacagcatgttattgtcaggacttcccgtgcgggacatttgaacgctaatgactggaaaaccaatgctgctggttttaaggtgagccatctttatggatttggactgatggacgcagaagccatggtgatggaggcagagaagtggaccaccgttccccggcagcacgtgtgtgtggagagcacagaccgacaaatcaagacaatccgccctaacagtgcagtgcgctccatctacaaagcttcaggctgctcggataaccccaaccgccatgtcaactacctggagcacgtcgttgtgcgcatcaccatcacccaccccaggagaggagacctggccatctacctgacctcgccctctggaactaggtctcagcttttggccaacaggctatttgatcactccatggaaggattcaaaaactgggagttcatgaccattcattgctggggagaaagagctgctggtgactgggtccttgaagtttatgatactccctctcagctaaggaactttaagactccaggtaaattgaaagaatggtctttggtcctctacggcacctccgtgcagccatattcaccaaccaatgaatttccgaaagtggaacggttccgctatagccgagttgaagaccccacagacgactatggcacagaggattatgcaggtccctgcgaccctgagtgcagtgaggttggctgtgacgggccaggaccagaccactgcaatgactgtttgcactactactacaagctgaaaaacaataccaggatctgtgtctccagctgcccccctggccactaccacgccgacaagaagcgctgcaggaagtgtgcccccaactgtgagtcctgctttgggagccatggtgaccaatgcatgtcctgcaaatatggatactttctgaatgaagaaaccaacagctgtgttactcactgccctgatgggtcatatcaggataccaagaaaaatctttgccggaaatgcagtgaaaactgcaagacatgtactgaattccataactgtacagaatgtagggatgggttaagcctgcagggatcccggtgctctgtctcctgtgaagatggacggtatttcaacggccaggactgccagccctgccaccgcttctgcgccacttgtgctggggcaggagctgatgggtgcattaactgcacagagggctacttcatggaggatgggagatgcgtgcagagctgtagtatcagctattactttgaccactcttcagagaatggatacaaatcctgcaaaaaatgtgatatcagttgtttgacgtgcaatggcccaggattcaagaactgtacaagctgccctagtgggtatctcttagacttaggaatgtgtcaaatgggagccatttgcaaggatgcaacggaagagtcctgggcggaaggaggcttctgtatgcttgtgaaaaagaacaatctgtgccaacggaaggttcttcaacaactttgctgcaaaacatgtacatttcaaggctgagcagccatcttagatttctttgttcctgtagacttatagattattccatattattaaaaagaaaaaaaaaagccaaaaag

SEQ ID NO: 1645 - protein, 913 aa, Homo sapien
MGWGSRCCCPGRLDLLCVLALLGGCLLPVCRTRVYTNHWAVKIAGGFPEANRIASKYGFINIGQIGALKDYYHFYHSRTIKRSVISSRGTHSFISMEPKVEWIQQQVVKKRTKRDYDFSRAQSTYFNDPKWPSMWYMHCSDNTHPCQSDMNIEGAWKRGYTGKNIVVTILDDGIERTHPDLMQNYDALASCDVNGNDLDPMPRYDASNENKHGTRCAGEVAAAANNSHCTVGIAFNAKIGGVRMLDGDVTDMVEAKSVSFNPQHVHIYSASWGPDDDGKTVDGPAPLTRQAFENGVRMGRRGLGSVFVWASGNGGRSKDHCSCDGYTNSIYTISISSTAESGKKPWYLEECSSTLATTYSSGESYDKKIITTDLRQRCTDNHTGTSASAPMAAGIIALALEANPFLTWRDVQHVIVRTSRAGHLNANDWKTNAAGFKVSHLYGFGLMDAEAMVMEAEKWTTVPRQHVCVESTDRQIKTIRPNSAVRSIYKASGCSDNPNRHVNYLEHVVVRITITHPRRGDLAIYLTSPSGTRSQLLANRLFDHSMEGFKNWEFMTIHCWGERAAGDWVLEVYDTPSQLRNFKTPGKLKEWSLVLYGTSVQPYSPTNEFPKVERFRYSRVEDPTDDYGTEDYAGPCDPECSEVGCDGPGPDHCNDCLHYYYKLKNNTRICVSSCPPGHYHADKKRCRKCAPNCESCFGSHGDQCMSCKYGYFLNEETNSCVTHCPDGSYQDTKKNLCRKCSENCKTCTEFHNCTECRDGLSLQGSRCSVSCEDGRYFNGQDCQPCHRFCATCAGAGADGCINCTEGYFMEDGRCVQSCSISYYFDHSSENGYKSCKKCDISCLTCNGPGFKNCTSCPSGYLLDLGMCQMGAICKDATEESWAEGGFCMLVKKNNLCQRKVLQQLCCKTCTFQG

SEQ ID NO: 1646 - DNA, 3178 bp, Homo sapien
ggcaccgattcggggcctgcccggacttcgccgcacgctgcagaacctcgcccagcgcccaccatgccccggcagctcagcgcggcggccgcgctcttcgcgtccctggccgtaattttgcacgatggcagtcaaatgagagcaaaagcatttccagaaaccagagattattctcaacctactgcagcagcaacagtacaggacataaaaaaacctgtccagcaaccagctaagcaagcacctcaccaaactttagcagcaagattcatggatggtcatatcacctttcaaacagcggccacagtaaaaattccaacaactaccccagcaactacaaaaaacactgcaaccaccagcccaattacctacaccctggtcacaacccaggccacacccaacaactcacacacagctcctccagttactgaagttacagtcggccctagcttagccccttattcactgccacccaccatcaccccaccagctcatacagctggaaccagttcatcaaccgtcagccacacaactgggaacaccactcaacccagtaaccagaccacccttccagcaactttatcgatagcactgcacaaaagcacaaccggtcagaagcctgatcaacccacccatgccccaggaacaacggcagctgcccacaataccacccgcacagctgcacctgcctccacggttcctgggcccacccttgcacctcagccatcgtcagtcaagactggaatttatcaggttctaaacggaagcagactctgtataaaagcagagatggggatacagctgattgttcaagacaaggagtcggttttttcacctcggagatacttcaacatcgaccccaacgcaacgcaagcctctgggaactgtggcacccgaaaatccaaccttctgttgaattttcagggcggatttgtgaatctcacatttaccaaggatgaagaatcatattatatcagtgaagtgggagcctatttgaccgtctcagatccagagacagtttaccaaggaatcaaacatgcggtggtgatgttccagacagcagtcgggcattccttcaagtgcgtgagtgaacagagcctccagttgtcagcccacctgcaggtgaaaacaaccgatgtccaacttcaagcctttgattttgaagatgaccactttggaaatgtggatgagtgctcgtctgactacacaattgtgcttcctgtgattggggccatcgtggttggtctctgccttatgggtatgggtgtctataaaatccgcctaaggtgtcaatcatctggataccagagaatctaattgttgcccggggggaatgaaaataatggaatttagagaactctttcatcccttccaggatggatgttgggaaattccctcagagtgtgggtccttcaaacaatgtaaaccaccatcttctattcaaatgaagtgagtcatgtgtgatttaagttcaggcagcacatcaatttctaaatactttttgtttattttatgaaagatatagtgagctgtttattttctagtttcctttagaatattttagccactcaaagtcaacatttgagatatgttgaattaacataatatatgtaaagtagaataagccttcaaattataaaccaagggtcaattgtaactaatactactgtgtgtgcattgaagattttattttacccttgatcttaacaaagcctttgctttgttatcaaatggactttcagtgcttttactatctgtgttttatggtttcatgtaacatacatattcctggtgtagcacttaactccttttccactttaaatttgtttttgttttttgagacggagtttcactcttgtcacccaggctggagtacagtggcacgatctcggcttatggcaacctccgcctcccgggttcaagtgattctcctgcttcagcttcccgagtagctgggattacaggcacacactaccacgcctggctaatttttgtatttttattatagacgggtttcaccatgttggccagactggtcttgaactcttgacctcaggtgatccacccacctcagcctcccaaagtgctgggattacaggcatgagccattgcgcccggccttaaatgttttttttaatcatcaaaaagaacaacatatctcaggttgtctaagtgtttttatgtaaaaccaacaaaaagaacaaatcagcttatattttttatcttgatgactcctgctccagaattgctagactaagaattaggtggctacagatggtagaactaaacaataagcaagagacaataataatggcccttaattattaacaaagtgccagagtctaggctaagcactttatctatatctcatttcattctcacaacttataagtgaatgagtaaactgagacttaagggaactgaatcacttaaatgtcacctggctaactgatggcagagccagagcttgaattcatgttggtctgacatcaaggtctttggtcttctccctacaccaagttacctacaagaacaatgacaccacactctgcctgaaggctcacacctcataccagcatacgctcaccttacagggaaatgggtttatccaggatcatgagacattagggtagatgaaaggagagctttgcagataacaaaatagcctatccttaataaatcctccactctctggaaggagactgaggggctttgtaaaacattagtcagttgctcatttttatgggattgcttagctgggctgtaaagatgaaggcatcaaataaactcaaagtatttttaaatttttttgataatagagaaacttcgctaaccaactgttctttcttgagtgtatagccccatcttgtggtaacttgctgcttctgcacttcatatccatatttcctattgttcactttattctgtagagcagcctgccaagaattttatttctgctgttttttttgctgctaaagaaaggaactaagtcaggatgttaacagaaaagtccacataaccctagaattcttagtcaaggaataattcaagtcagcctagagaccatgttgactttcctcatgtgtttccttatgactcagtaagttggcaaggtcctgactttagtcttaataaaacattgaattgtagtaaaggtttttgcaataaaaacttactttgg

SEQ ID NO: 1647 - protein, 416 aa, Homo sapien
MPRQLSAAAALFASLAVILHDGSQMRAKAFPETRDYSQPTAAATVQDIKKPVQQPAKQAPHQTLAARFMDGHITFQTAATVKIPTTTPATTKNTATTSPITYTLVTTQATPNNSHTAPPVTEVTVGPSLAPYSLPPTITPPAHTAGTSSSTVSHTTGNTTQPSNQTTLPATLSIALHKSTTGQKPDQPTHAPGTTAAAHNTTRTAAPASTVPGPTLAPQPSSVKTGIYQVLNGSRLCIKAEMGIQLIVQDKESVFSPRRYFNIDPNATQASGNCGTRKSNLLLNFQGGFVNLTFTKDEESYYISEVGAYLTVSDPETVYQGIKHAVVMFQTAVGHSFKCVSEQSLQLSAHLQVKTTDVQLQAFDFEDDHFGNVDECSSDYTIVLPVIGAIVVGLCLMGMGVYKIRLRCQSSGYQRI

SEQ ID NO: 1648 - DNA, 5428 bp, Homo sapien
gcggggagccggcggttatctgggcggcggagcgctcacaatgtggcaggagacagaaaagataagatgctcccaagtcccttgcagctctcttcagaagaaaaatcactagtgctctgctcttgccataataccaaacctttttgactcatgctttggtgctgcaacactggaagaattgcacacagtttccaggaatatctttttttcatttgagtgattctttgtggatgagaaaagatttgagtcttaataattaccttgttttaaagctatttctttatagtctgaactgtttaataaattgggccacttaccaatgagccacacagccagttcttgtcaggagctggttgaaaactgtgctgtgcatgtagcaggaatggcacaagaagatagccgtcgtggtcaagtgccatcttccttttatcatggtgccaaccaagaacttgacctgtccaccaaagtgtacaaaagggaatcaggaagtccttattctgtgttagtggacaccaagatgagcaaaccgcatctccatgaaacagaagaacagccatatttcagggagacaagagcagtgtctgacgtgcatgctgttaaggaagaccgggagaattctgatgacacagaggaggaagaggaagaagtctcttacaaaagggagcagatcatagtggaggtaaaccttaataatcaaacattaaatgtatctaaaggggaaaagggtgtctcttctcagtccaaagagactcctgttcttaagacaagcagtgaggaggaagaggaagagagtgaggaagaggccacagatgacagcaatgactatggagagaatgaaaagcagaagaaaaaggagaagatagtagagaaagtcagcgttacacaaaggagaaccaggagagctgcctctgttgccgcagctaccacttcccctactcccagaactacaagaggtcgtaggaagagtgtagagccacctaagcgtaagaagcgggccacaaaggagcccaaagcaccagtccagaaagctaagtgtgaagagaaagagactctgacctgtgagaagtgccccagggtatttaacactcgctggtacctggagaagcacatgaacgttactcataggcgcatgcagatttgtgataaatgtggcaagaagtttgtcctggaaagtgagctgtcccttcaccagcaaacagactgtgaaaaaaacattcagtgtgtttcctgtaacaaatcgttcaagaaactctggtcccttcatgaacatatcaagatcgtccatggatatgcagaaaagaaattttcctgtgaaatttgtgagaagaaattctataccatggctcatgtgcggaaacacatggttgcacacacaaaagacatgccatttacatgcgaaacctgtggaaaatcattcaaacgcagtatgtcactcaaggtgcactccttgcagcattctggagagaagccctttagatgcgagaactgtgacgaaaggtttcagtacaagtaccagctacgctcccacatgagcattcatattgggcacaaacagttcatgtgccagtggtgtggcaaggatttcaacatgaagcagtacttcgacgaacacatgaaaacacacactggagagaaaccctttatctgtgaaatctgtggcaaaagcttcaccagccgccccaacatgaagagacaccgcagaactcacacaggcgagaagccctatccatgtgatgtgtgtggccagcggttccgcttctcgaacatgcttaaggcccacaaggagaagtgctttcgggtgaccagccccgtgaatgtgccacctgctgtccagatcccacttacaacttccccagccaccccagttccttctgtggtgaacacagccacaaccccaacccctccaatcaatatgaatcctgtaagcactcttccccctcggcccatcccccaccccttctcacacctgcacatccacccacaccctcaccacccacaccaccttcccatccctccagtccctcacctcccgccacctccagctctctttaagagtgagcctttaaatcatagaggccagagtgaggacaactttctgcggcacctggcagagaagaacagttcagcacagcatcattaacatccgtctccttagtgtgttctccaggagacacgtccccatgtgtgagcgtgcacagagggagtcggtgagcatttccttagttctcagactctcctccgcctctaccaagagcttcgccagtgtcactgaatcaacagatccaagggaatgaacaagaagactaccttgagctcacagagggactgtcatctaaaccaggggaaccactgaactaaagcccaatttgcttgcattttctgatgacttttataagtttcaaatactcagacttgtggaattttataatttcatatcagctgatgaggtatgcttgcttttatatcccagacttctcctcaaagaggggataggcctggtttcctttgtactaatcgggaaggctgtgagattaatccagagcattaattgtatcactgtgtatggtaaggaattcttttcagcttttggtgccagctacagagttgagctggccatgtttcacagtatatcaagcattatagagaaagacagaaattttcttctttgtgtagctctcctaacgcactctttattttactacagaaattattttagagtttttgtatagacttctttggtagtctgtttctaaaatgaaatgtatttcaataagcagtgtaattttttcagtgtagctgaacctatgttgtaaaatagaaaaaaatttttataatcatcaaaatgtgattcttaaagatgcatataacttctataattcaaagctattcttacatccgtacaactcaaaaggtgcttcagagactagatgtatctgagagggtctccagaccaggttactgcaaaaatgaggttttgctttcaggatttggcgtaaatacttggtagttttgacatctctgcttaacactcaagagaggctccctaatgtgctcctgtcctccatgttctgcttggcttcgttagtgcattacatgaaatgatttgcaggggatggggccttttccagggaagtcacctaaagcttgcatgttttgaaaatttgaataaggctgtttgctgacaggaggaggaagtagtggagatcatttcatctcagtcacgtctgtttctcacttcccttaggaattgtgttgatgtttaacttttatgggatgacaaattgaaatcgctcattttgaggttgctttatttttctagaattgttataagaagctaaaatagtaaacttaaaatcacaaacatgacattgctgatagtggctgagaaattcagatgagaagacaaattggttatgaattttgaaatatctattatatgtaaaatgtggatatgttcacaaccttgagctattttaacacagtttaaatatagtgagggaaaactcctaagttttactgccctgtcctctgcaaattatgtaataccagcattcttaggcgataaagagagcagcacctctagtacctttaggcagattactttttcaagtttggggaacttcaaaagaccataatcaaccaggagcttattataggaaaggctgaacagaagggctagtgtattgattacacttaacagatcatatttatccagactcagtatagcttaaaattttgtatttctttatctgagagaactgagttcccaggctaaatcacttacctcccaccccctctccaattttttttttaagagacaaggtcttgctatgttgcccaggctagagtgcagtggctattcacaggtgcagttatagcacactacagcctccaactcttgggttcaagcaaccctgcctcagctaaccaagtagctgggactacaggtgcatgctaccatgcccagtccattttttaatcttgaaatttcttcatttttctttcttcggtttcttaaaatctttgcctgaatcagaacgctggcttttatttatttttttatttttaatattaaatgtgcagatatgcttcgagcacttttctaactaatgagctctgtggtaagaaaaaatgaactctttcaattgagattaagtccatatttttcaaacatcacgttctctattggctttttggtttagtgtttctaaattttctccttctgattttgcctgtcttatataatgagcataggaaaattttggaatgaggcagaaaagtatatcaagacatacttcctggttttggatgtaagttttaaagaatggtatttttaatatttgtacacattctttgagcacccaggtacccaagccaataaggaaagttaattccttgcatatgactgttatatctttagtggttgtctccctctccctccacagtctccttggcattccatgacaagtttgtcaacctacacttttatatagacatgtcattatttcatggtcaagcctgtagtattaaaatgatttttttaaaagatgtaaactgtgcttagttaattggttatattttgttctgtttttttttttttttttttttttttttgaggcagagtcttgttctgttgcctgggctggagtgcagtggcgtgatcttggctcactgcaacccccgccccccgggttcaagtgattctcctgcctcagcctcccgagtagctggaattacaggcatgcgccagcacgcccggctaagttttgtatttttggcagagatggggtttcaccatattggccaggctggtctcaaactcctgaccttgtgatccgcccacctcagcctccgaaagtgctgggattacaggcgtgagccaccacgtccaactgccttattttgttctgaataaatttacagtattgggcagcaattctggattctagacttgagaccacagaatcaaccatttcatgaggttgtactgtaattatacactggaatattcaggtagtcatctttgatttttcattcaagtaaatatagccataagaaaatatctgctatacaggaaaaccagtattaagcaaataccaccatccttaacagaaacaaaaatatatatatatattatttttaaaaattagcattgtcatacagtacaattcttagtgaagtgtattgtggaacaatttagaaacttcctttttttcccctagattaaggatactttccttgacttgagacttgtggtcttcaggaaaactactcagaatataatgactcctcatcagtatcatattgtatataaataatgaaatgcattaagaatattcacaacattgaacccaggaggcggagcttgcagtgagccgagattgcgccactgcgctccagcctgggcaacagagcgagactccatctc

SEQ ID NO: 1649 - protein, 606 aa, Homo sapien
MSHTASSCQELVENCAVHVAGMAQEDSRRGQVPSSFYHGANQELDLSTKVYKRESGSPYSVLVDTKMSKPHLHETEEQPYFRETRAVSDVHAVKEDRENSDDTEEEEEEVSYKREQIIVEVNLNNQTLNVSKGEKGVSSQSKETPVLKTSSEEEEEESEEEATDDSNDYGENEKQKKKEKIVEKVSVTQRRTRRAASVAAATTSPTPRTTRGRRKSVEPPKRKKRATKEPKAPVQKAKCEEKETLTCEKCPRVFNTRWYLEKHMNVTHRRMQICDKCGKKFVLESELSLHQQTDCEKNIQCVSCNKSFKKLWSLHEHIKIVHGYAEKKFSCEICEKKFYTMAHVRKHMVAHTKDMPFTCETCGKSFKRSMSLKVHSLQHSGEKPFRCENCDERFQYKYQLRSHMSIHIGHKQFMCQWCGKDFNMKQYFDEHMKTHTGEKPFICEICGKSFTSRPNMKRHRRTHTGEKPYPCDVCGQRFRFSNMLKAHKEKCFRVTSPVNVPPAVQIPLTTSPATPVPSVVNTATTPTPPINMNPVSTLPPRPIPHPFSHLHIHPHPHHPHHLPIPPVPHLPPPPALFKSEPLNHRGQSEDNFLRHLAEKNSSAQHH

SEQ ID NO: 1650 - DNA, 2412 bp, Homo sapien
caggccaggactccacaaggctggtcccctgccctggagcaacttaaacaggccctctggccagcctggaaccctgagatggcctccagctcaggcagcagtcctcgcccggcccctgatgagaatgagtttccctttgggtgccctcccaccgtctgccaggacccaaaggagcccagggctctctgctgtgcaggctgtctctctgagaacccgaggaatggcgaggatcagatctgccccaaatgcagaggggaagacctccagtctataagcccaggaagccgtcttcgaactcaggagaaggctcaccccgaggtggctgaggctggaattgggtgcccctttgcaggtgtcggctgctccttcaagggaagcccacagtctgtgcaagagcatgaggtcacctcccagacctcccacctaaacctgctgttggggttcatgaaacagtggaaggcccggctgggctgtggcctggagtctgggcccatggccctggagcagaacctgtcagacctgcagctgcaggcagccgtggaagtggcgggggacctggaggtcgattgctaccgggcaccctgctccgagagccaggaggagctggccctgcagcacttcatgaaggagaagcttctggctgagctggaggggaagctgcgtgtgtttgagaacattgttgctgtcctcaacaaggaggtggaggcctcccacctggccctggccacctctatccaccagagccagctggaccgtgagcgcatcctgagcttggagcagagggtggtggagcttcagcagaccctggcccagaaagaccaggccctgggcaagctggagcagagcttgcgcctcatggaggaggcctccttcgatggcactttcctgtggaagatcaccaatgtcaccaggcggtgccatgagtcggcctgtggcaggaccgtcagcctcttctccccagccttctacactgccaagtatggctacaagttgtgcctgcggctgtacctgaatggagatggcactggaaagagaacccatctgtcgctcttcatcgtgatcatgagaggggagtatgatgcgctgctgccgtggcctttccggaacaaggtcaccttcatgctgctggaccagaacaaccgtgagcacgccattgacgccttccggcctgacctaagctcagcgtccttccagaggccccagagtgaaaccaacgtggccagtggatgcccactcttcttccccctcagcaaactgcagtcacccaagcacgcctacgtgaaggacgacacaatgttcctcaagtgcattgtggagaccagcacttagggtgggcggggctcctgagggagctccaactcagaagggagctagccagaggactgtgatgccctgcccttggcacccaagacctcagggcacaaagatgggtgaaggctggcatgatccaagcaagactgaggggtcgacttcgggctggccatctggttaggatggcaggacgtgggctgggcccacaaaggcaaagggtccagaaggagacaggcagagctgctcccctctgcacggaccatgcgacactgggaggccagtgagccactccggccccgaatgttgaggtggactctcaccaaatgagaagaaaatggaaccaggcttggaaccgtaggacccaagcagagaagctctcgggctaggaagatctctgcagggccgccagggagacctggacacaggcctgctctctttttctccagggtcagaaacaggaccgggtggaagggatggggtgccagtttgaatgcagtctgtccaggctcgtcattggaggtgaacaagcaaacccagagggctccactaggacttcaaattgggggttggatttgaagacttttaagtttccttccagcccagaaagtctctcattctaggcctcctggcccaggtgagtcctagagctacaggggttctggaaacattcaggagcttcctgtcctcccagctcctcactcaccttcagtaacccccactggactgacctggtccacagggcacctgccaccctgggcctggcagctcagcttccccaacacgcaggagcacacccagcccccacatcctgtgcctccatcagctaaacaccacgtcacttcatgcaggtgaaacccagtcactgtgagctcccaggtgcagccagaggcacctcaagaagaagaggggcataaactttcctcttcctgcctagaggccccacctttggtgctttccagaatcccgtaacacctgattaactgaggcatccacttctttcagcagactgatcaggacctccaagccactgagcaatgtataaccccaaagaaataatttttagaatctctttcgaagttttcctaaaaaaaaaaaaaaaaa

SEQ ID NO: 1651 - protein, 416 aa, Homo sapien
MASSSGSSPRPAPDENEFPFGCPPTVCQDPKEPRALCCAGCLSENPRNGEDQICPKCRGEDLQSISPGSRLRTQEKAHPEVAEAGIGCPFAGVGCSFKGSPQSVQEHEVTSQTSHLNLLLGFMKQWKARLGCGLESGPMALEQNLSDLQLQAAVEVAGDLEVDCYRAPCSESQEELALQHFMKEKLLAELEGKLRVFENIVAVLNKEVEASHLALATSIHQSQLDRERILSLEQRVVELQQTLAQKDQALGKLEQSLRLMEEASFDGTFLWKITNVTRRCHESACGRTVSLFSPAFYTAKYGYKLCLRLYLNGDGTGKRTHLSLFIVIMRGEYDALLPWPFRNKVTFMLLDQNNREHAIDAFRPDLSSASFQRPQSETNVASGCPLFFPLSKLQSPKHAYVKDDTMFLKCIVETST

SEQ ID NO: 1652 - DNA, 2373 bp, Homo sapien
ggcacgaggagcgtttcgtttggacttctcgacttgagtgcccgcctccttcgccgccgcctctgcagtcctcagcgcagttatgcccagttcttcccgctgtggggacacgaccacggaggaatccttgcttcagggactcgggaccctgctggaccccttcctcgggtttaggggatgtggggaccaggagaaagtcaggatccctaagagtcttccctgcctggatggatgagtggcttcttctccacctagattctttccacaggagccagcatacttcctgaacatggagagtgttgttcgccgctgcccattcttatcccgagtcccccaggcctttctgcagaaagcaggcaaatctctgttgttctatgcccaaaactgccccaagatgatggaagttggggccaagccagcccctcgggcattgtccactgcagcagtacactaccaacagatcaaagaaacccctccggccagtgagaaagacaaaactgctaaggccaaggtccaacagactcctgatggatcccagcagagtccagatggcacacagcttccgtctggacaccccttgcctgccacaagccagggcactgcaagcaaatgccctttcctggcagcacagatgaatcagagaggcagcagtgtcttctgcaaagccagtcttgagcttcaggaggatgtgcaggaaatgaatgccgtgaggaaagaggttgctgaaacctcagcaggccccagtgtggttagtgtgaaaaccgatggaggggatcccagtggactgctgaagaacttccaggacattatgcaaaagcaaagaccagaaagagtgtctcatcttcttcaagataacttgccaaaatctgtttccacttttcagtatgatcgtttctttgagaaaaaaattgatgagaaaaagaatgaccacacctatcgagtttttaaaactgtgaaccggcgagcacacatcttccccatggcagatgactattcagactccctcatcaccaaaaagcaagtgtcagtctggtgcagtaatgactacctaggaatgagtcgccacccacgggtgtgtggggcagttatggacactttgaaacaacatggtgctggggcaggtggtactagaaatatttctggaactagtaaattccatgtggacttagagcgggagctggcagacctccatgggaaagatgccgcactcttgttttcctcgtgctttgtggccaatgactcaaccctcttcaccctggctaagatgatgccaggctgtgagatttactctgattctgggaaccatgcctccatgatccaagggattcgaaacagccgagtgccaaagtacatcttccgccacaatgatgtcagccacctcagagaactgctgcaaagatctgacccctcagtccccaagattgtggcatttgaaactgtccattcaatggatggggcggtgtgcccactggaagagctgtgtgatgtggcccatgagtttggagcaatcaccttcgtggatgaggtccacgcagtggggctttatggggctcgaggcggagggattggggatcgggatggagtcatgccaaaaatggacatcatttctggaacacttggcaaagcctttggttgtgttggagggtacatcgccagcacgagttctctgattgacaccgtacggtcctatgctgctggcttcatcttcaccacctctctgccacccatgctgctggctggagccctggagtctgtgcggatcctgaagagcgctgagggacgggtgcttcgccgccagcaccagcgcaacgtcaaactcatgagacagatgctaatggatgccggcctccctgttgtccactgccccagccacatcatccctgtgcgggttgcagatgctgctaaaaacacagaagtctgtgatgaactaatgagcagacataacatctacgtgcaagcaatcaattaccctacggtgccccggggagaagagctcctacggattgcccccacccctcaccacacaccccagatgatgaactacttccttgagaatctgctagtcacatggaagcaagtggggctggaactgaagcctcattcctcagctgagtgcaacttctgcaggaggccactgcattttgaagtgatgagtgaaagagagaagtcctatttctcaggcttgagcaagttggtatctgctcaggcctgagcatgacctcaattatttcacttaaccccaggccattatcatatccagatggtcttcagagttgtctttatatgtgaattaagttatattaaattttaatctatagtaaaaacatagtcctggaaataaaaaaaaaaaaaaaaaaaaaaaaaaaaaaaaaa

SEQ ID NO: 1653 - protein, 640 aa, Homo sapien
MESVVRRCPFLSRVPQAFLQKAGKSLLFYAQNCPKMMEVGAKPAPRALSTAAVHYQQIKETPPASEKDKTAKAKVQQTPDGSQQSPDGTQLPSGHPLPATSQGTASKCPFLAAQMNQRGSSVFCKASLELQEDVQEMNAVRKEVAETSAGPSVVSVKTDGGDPSGLLKNFQDIMQKQRPERVSHLLQDNLPKSVSTFQYDRFFEKKIDEKKNDHTYRVFKTVNRRAHIFPMADDYSDSLITKKQVSVWCSNDYLGMSRHPRVCGAVMDTLKQHGAGAGGTRNISGTSKFHVDLERELADLHGKDAALLFSSCFVANDSTLFTLAKMMPGCEIYSDSGNHASMIQGIRNSRVPKYIFRHNDVSHLRELLQRSDPSVPKIVAFETVHSMDGAVCPLEELCDVAHEFGAITFVDEVHAVGLYGARGGGIGDRDGVMPKMDIISGTLGKAFGCVGGYIASTSSLIDTVRSYAAGFIFTTSLPPMLLAGALESVRILKSAEGRVLRRQHQRNVKLMRQMLMDAGLPVVHCPSHIIPVRVADAAKNTEVCDELMSRHNIYVQAINYPTVPRGEELLRIAPTPHHTPQMMNYFLENLLVTWKQVGLELKPHSSAECNFCRRPLHFEVMSEREKSYFSGLSKLVSAQA

SEQ ID NO: 1654 - DNA, 606 bp, Homo sapien
agacgcaagacgccgggcctacagcgggagcgtgaggaaagccgtgcgttgcgttccaaggcatctgtgagcccgcggagtatacaccatgagcaaagctcaccctcccgagttgaaaaaatttatggacaagaagttatcattgaaattaaatggtggcagacatgtccaaggaatattgcggggatttgatccctttatgaaccttgtgatagatgaatgtgtggagatggcgactagtggacaacagaacaatattggaatggtggtaatacgaggaaatagtatcatcatgttagaagccttggaacgagtataaataatggctgttcagcagagaaacccatgtcctctctccatagggcctgttttactatgatgtaaaaattaggtcatgtacattttcatattagactttttgttaaataaacttttgtaatagtcaaaaatgctttctcagatgttctgaatatagaatatcagctctcattccagttttttctaacatgaattttcctggttgacattgatttcaaagggttttatgcattaaagtgaaagaatcttattaaatgcgaaaaaaaaaaaaaaaaaaaaaaaaaaaaa

SEQ ID NO: 1655 - protein, 76 aa, Homo sapien
MSKAHPPELKKFMDKKLSLKLNGGRHVQGILRGFDPFMNLVIDECVEMATSGQQNNIGMVVIRGNSIIMLEALERV

SEQ ID NO: 1656 - DNA, 1820 bp, Homo sapien
acagagatggcactgatgcaggaactgtatagcacaccagcctccaggctggactccttcgtggctcagtggctgcagccccaccgggagtggaaggaagaggtgctagacgctgtgcggaccgtggaggagtttctgaggcaggagcatttccaggggaagcgtgggctggaccaggatgtgcgggtgctgaaggtagtcaaggtgggctccttcgggaatggcacggttctcaggagcaccagagaggtggagctggtggcgtttctgagctgtttccacagcttccaggaggcagccaagcatcacaaagatgttctgaggctgatatggaaaaccatgtggcaaagccaggacctgctggacctcgggctcgaggacctgaggatggagcagagagtccccgatgctcttgtcttcaccatccagaccagggggactgcggagcccatcacggtcaccattgtgcctgcctacagagccctggggccttctcttcccaactcccagccaccccctgaggtctatgtgagcctgatcaaggcctgcggtggtcctggaaatttctgcccatccttcagcgagctgcagagaaatttcgtgaaacatcggccaactaagctgaagagcctcctgcgcctggtgaaacactggtaccagcagtatgtgaaagccaggtcccccagagccaatctgccccctctctatgctcttgaacttctaaccatctatgcctgggaaatgggtactgaagaagacgagaatttcatgttggacgaaggcttcaccactgtgatggacctgctcctggagtatgaagtcatctgtatctactggaccaagtactacacactccacaatgcaatcattgaggattgtgtcagaaaacagctcaaaaaagagaggcccatcatcctggatccggccgaccccaccctcaacgtggcagaagggtacagatgggacatcgttgctcagagggcctcccagtgcctgaaacaggactgttgctatgacaacagggagaaccccatctccagctggaacgtgaagagggcacgagacatccacttgacagtggagcagaggggttacccagatttcaacctcatcgtgaacccttatgagcccataaggaaggttaaagagaaaatccggaggaccaggggctactctggcctgcagcgtctgtccttccaggttcctggcagtgagaggcagcttctcagcagcaggtgctccttagccaaatatgggatcttctcccacactcacatctatctgctggagaccatcccctccgagatccaggtcttcgtgaagaatcctgatggtgggagctacgcctatgccatcaaccccaacagcttcatcctgggtctgaagcagcagattgaagaccagcaggggcttcctaaaaagcagcagcagctggaattccaaggccaagtcctgcaggactggttgggtctggggatctatggcatccaagacagtgacactctcatcctctcgaagaagaaaggagaggctctgtttccagccagttagttttctctgggagacttctctgtacatttctgccatgtactccagaactcatcctgtcaatcactctgtcccattgtctactgggaaggtcccaggtcttcaccagttttacaatgagttatcccaggccagacgtggtagctcacacctgtaatcccagaactttgggaggccgaggtgggaggagcgcttgagccgaggagttcaagaccagcctgggtatcatagggagaccccgtctctacaaaataaaaaaataattcactggg

SEQ ID NO: 1657 - protein, 514 aa, Homo sapien
MALMQELYSTPASRLDSFVAQWLQPHREWKEEVLDAVRTVEEFLRQEHFQGKRGLDQDVRVLKVVKVGSFGNGTVLRSTREVELVAFLSCFHSFQEAAKHHKDVLRLIWKTMWQSQDLLDLGLEDLRMEQRVPDALVFTIQTRGTAEPITVTIVPAYRALGPSLPNSQPPPEVYVSLIKACGGPGNFCPSFSELQRNFVKHRPTKLKSLLRLVKHWYQQYVKARSPRANLPPLYALELLTIYAWEMGTEEDENFMLDEGFTTVMDLLLEYEVICIYWTKYYTLHNAIIEDCVRKQLKKERPIILDPADPTLNVAEGYRWDIVAQRASQCLKQDCCYDNRENPISSWNVKRARDIHLTVEQRGYPDFNLIVNPYEPIRKVKEKIRRTRGYSGLQRLSFQVPGSERQLLSSRCSLAKYGIFSHTHIYLLETIPSEIQVFVKNPDGGSYAYAINPNSFILGLKQQIEDQQGLPKKQQQLEFQGQVLQDWLGLGIYGIQDSDTLILSKKKGEALFPAS

SEQ ID NO: 1658 - DNA, 885 bp, Homo sapien
agcctacgcacgaaagtgactagggaggaaggatattataaagtgatgcaaacagaaattccaccagcctccatgtatcatcatgtgtcataactcagtcaagctcagtgagcattctcagcacattgcctcaacagcttcaaggtgagccagctcaagactttgctctccaccaggcagaagatgacagactgtgaatttggatatatttacaggctggctcaggactatctgcagtgcgtcctacagataccacaacctggatcaggtccaagcaaaacgtccagagtgctacaaaatgttgcgttctcagtccaaaaagaagtggaaaagaatctgaagtcatgcttggacaatgttaatgttgtgtccgtagacactgccagaacactattcaaccaagtgatggaaaaggagtttgaagacggcatcattaactggggaagaattgtaaccatatttgcatttgaaggtattctcatcaagaaacttctacgacagcaaattgccccggatgtggatacctataaggagatttcatattttgttgcggagttcataatgaataacacaggagaatggataaggcaaaacggaggctgggaaaatggctttgtaaagaagtttgaacctaaatctggctggatgacttttctagaagttacaggaaagatctgtgaaatgctatctctcctgaagcaatactgttgaccagaaaggacactccatattgtgaaaccggcctaatttttctgactgatatggaaacgattgccaacacatacttctacttttaaataaacaactttgatgatgtaacttgaccttccagagttatggaaattttgtccccatgtaatgaataaattgtatgtatttttctct

SEQ ID NO: 1659 - protein, 175 aa, Homo sapien
MTDCEFGYIYRLAQDYLQCVLQIPQPGSGPSKTSRVLQNVAFSVQKEVEKNLKSCLDNVNVVSVDTARTLFNQVMEKEFEDGIINWGRIVTIFAFEGILIKKLLRQQIAPDVDTYKEISYFVAEFIMNNTGEWIRQNGGWENGFVKKFEPKSGWMTFLEVTGKICEMLSLLKQYC

SEQ ID NO: 1660 - DNA, 2054 bp, Homo sapien
cgggaggcggcagcggctgcagcgttggtagcatcagcatcagcatcagcggcagcggcagcggcctcgggcggggccggccggacggacaggcggacagaaggcgccaggggcgcgcgtcccgcccgggccggccatggagggcgcctccttcggcgcgggccgcgcaggggccgccctggaccccgtgagctttgcgcggcggccccagaccctgctccgggtcgcgtcctgggtgttctccatcgccgtcttcgggcccatcgtcaacgagggctacgtgaacaccgacagcggccccgagctgcgctgcgtgttcaacgggaacgcgggcgcctgccgcttcggcgtcgcgctgggcctcggagccttcctcgcctgcgccgccttcctgctgctcgatgtgcgcttccagcaaatcagcagcgtccgcgaccgccggcgcgcggtgttgctggacctgggcttctcaggactctggtccttcctgtggttcgtgggcttctgcttcctcaccaatcagtggcagcgcacggcgccagggccggccacgacgcaggcgggggacgcggcgcgggccgccatcgccttcagcttcttctccatcctcagctgggtggcgctcaccgtgaaggccctgcagcggttccgcctgggcaccgacatgtcactcttcgccaccgaacagctgagcaccggggcgagccaggcctaccccggctatccggtgggcagcggcgtggagggcaccgagacctaccagagcccgcccttcaccgagaccctggacaccagccccaaagggtaccaggtgcccgcctactagcggctggcaggcacagaccagggctccaaggccaccccaccaacgcaggccccagggtctccgggacctcccttgggtccttccagctcagtgccgcggacagagtaggtggccgctttgcgccatccggggccaagagggggtggacccgcgtgtctgggctgcccctgccaagttcccccagtccctcagcacctggccccaggactgaggtcctgagaaggggatagcactgcccaggacgtgtgtccctagcctggaatggactggcctggggaaggctttcccctcttgggccacacctgctcactctggggttgggggtccagctgccctctacgatcaggtgcaggggctgcccaggacaaagcgggggcaggggaaagacaccaccctcgccccaagactggggatcctggccactgttcccatcccatgtccctgtgggtagtgactgtctcgtttctgtcatggtggtgcgtcccgtccggagccactctccactttctctcacaggctgctagaacagcccagccctgtcagtgttgtgatcatggtccagtcttcgggtttcacctcctagtactccacaagctgctcctctctctgtggccccggcccctgcccaggtgtgggtggttctggccaggaaggcacaaggtagctgtgggccaagacaccagccctgtcctagcccttcagtaagaccttgccaggagaggagaaggatgcctgggtgccaggcaagacaagcccctcagcaggagagaggcccagaggctccagctggccaccgtgccccacaagatggcccctgtgtggttccctttaccttggcttcctggcccagtccctgcctctccacctgcaccctgcttcctggcccagtcccaggttggagtccctctgcatagctgactactcatgcattgctcaaagctggcttttcacattaagtcaacaccaaacgtggttgccacatttcatcagacagacacctccctctggagatgcagttgagtgacaaccttgttacattgtagcctagaccaattctgtgtggatatttaagtgaacatgtttacaatttttgtatatatcactctctccctctcctgaaagaccagagattgtgtattttcagtgtcccatgttccgactgcaccttctttacaataaagactgtaactgagctgactgtgaaaaaaaaaaaaaaaaaaaaaaaaaa

SEQ ID NO: 1661 - protein, 229 aa, Homo sapien
MEGASFGAGRAGAALDPVSFARRPQTLLRVASWVFSIAVFGPIVNEGYVNTDSGPELRCVFNGNAGACRFGVALGLGAFLACAAFLLLDVRFQQISSVRDRRRAVLLDLGFSGLWSFLWFVGFCFLTNQWQRTAPGPATTQAGDAARAAIAFSFFSILSWVALTVKALQRFRLGTDMSLFATEQLSTGASQAYPGYPVGSGVEGTETYQSPPFTETLDTSPKGYQVPAY

SEQ ID NO: 1662 - DNA, 1233 bp, Homo sapien
ctaaagctctcttgctgcctagcctcctgccggcctcatcttcgcccagccaaccccgcctggagccctatggccaactgcgagttcagcccggtgtccggggacaaaccctgctgccggctctctaggagagcccaactctgtcttggcgtcagtatcctggtcctgatcctcgtcgtggtgctcgcggtggtcgtcccgaggtggcgccagacgtggagcggtccgggcaccaccaagcgctttcccgagaccgtcctggcgcgatgcgtcaagtacactgaaattcatcctgagatgagacatgtagactgccaaagtgtatgggatgctttcaagggtgcatttatttcaaaacatccttgcaacattactgaagaagactatcagccactaatgaagttgggaactcagaccgtaccttgcaacaagattcttctttggagcagaataaaagatctggcccatcagttcacacaggtccagcgggacatgttcaccctggaggacacgctgctaggctaccttgctgatgacctcacatggtgtggtgaattcaacacttccaaaataaactatcaatcttgcccagactggagaaaggactgcagcaacaaccctgtttcagtattctggaaaacggtttcccgcaggtttgcagaagctgcctgtgatgtggtccatgtgatgctcaatggatcccgcagtaaaatctttgacaaaaacagcacttttgggagtgtggaagtccataatttgcaaccagagaaggttcagacactagaggcctgggtgatacatggtggaagagaagattccagagacttatgccaggatcccaccataaaagagctggaatcgattataagcaaaaggaatattcaattttcctgcaagaatatctacagacctgacaagtttcttcagtgtgtgaaaaatcctgaggattcatcttgcacatctgagatctgagccagtcgctgtggttgttttagctccttgactccttgtggtttatgtcatcatacatgactcagcatacctgctggtgcagagctgaagattttggagggtcctccacaataaggtcaatgccagagacggaagcctttttccccaaagtcttaaaataacttatatcatcagcatacctttattgtgatctatcaatagtcaagaaaaattattgtataagattagaatgaaaattgtatgttaagttacttcctttag

SEQ ID NO: 1663 - protein, 300 aa, Homo sapien
MANCEFSPVSGDKPCCRLSRRAQLCLGVSILVLILVVVLAVVVPRWRQTWSGPGTTKRFPETVLARCVKYTEIHPEMRHVDCQSVWDAFKGAFISKHPCNITEEDYQPLMKLGTQTVPCNKILLWSRIKDLAHQFTQVQRDMFTLEDTLLGYLADDLTWCGEFNTSKINYQSCPDWRKDCSNNPVSVFWKTVSRRFAEAACDVVHVMLNGSRSKIFDKNSTFGSVEVHNLQPEKVQTLEAWVIHGGREDSRDLCQDPTIKELESIISKRNIQFSCKNIYRPDKFLQCVKNPEDSSCTSEI

SEQ ID NO: 1664 - DNA, 2924 bp, Homo sapien
ggcttctggttcggcccacctctgaaggttccagaatcgatagtgaattcgtggttccaagtttggagcttttagctgccagccctggcccatcatgtagctgcagcacagccttccctaacgttgcaactgggggaaaaatcactttccagtctgttttgcaaggtgtgcatttccatcttgattccctgaaagtccatctgctgcatcggtcaagagaaactccacttgcatgaagattgcacgcctgcagcttgcatctttgttgcaaaactagctacagaagagaagcaaggcaaagtcttttgtgctcccctcccccatcaaaggaaaggggaaaatgtctcagtcgaaaggcaagaagcgaaaccctggccttaaaattccaaaagaagcatttgaacaacctcagaccagttccacaccacctcgagatttagactccaaggcttgcatttctattggaaatcagaactttgaggtgaaggcagatgacctggagcctataatggaactgggacgaggtgcgtacggggtggtggagaagatgcggcacgtgcccagcgggcagatcatggcagtgaagcggatccgagccacagtaaatagccaggaacagaaacggctactgatggatttggatatttccatgaggacggtggactgtccattcactgtcaccttttatggcgcactgtttcgggagggtgatgtgtggatctgcatggagctcatggatacatcactagataaattctacaaacaagttattgataaaggccagacaattccagaggacatcttagggaaaatagcagtttctattgtaaaagcattagaacatttacatagtaagctgtctgtcattcacagagacgtcaagccttctaatgtactcatcaatgctctcggtcaagtgaagatgtgcgattttggaatcagtggctacttggtggactctgttgctaaaacaattgatgcaggttgcaaaccatacatggcccctgaaagaataaacccagagctcaaccagaagggatacagtgtgaagtctgacatttggagtctgggcatcacgatgattgagttggccatccttcgatttccctatgattcatggggaactccatttcagcagctcaaacaggtggtagaggagccatcgccacaactcccagcagacaagttctctgcagagtttgttgactttacctcacagtgcttaaagaagaattccaaagaacggcctacatacccagagctaatgcaacatccatttttcaccctacatgaatccaaaggaacagatgtggcatcttttgtaaaactgattcttggagactaaaaagcagtggacttaatcggttgaccctactgtggattggtgggtttcggggtgaagcaagttcactacagcatcaatagaaagtcatctttgagataatttaaccctgcctctcagagggttttctctcccaattttctttttactccccctcttaagggggccttggaatctatagtatagaatgaactgtctagatggatgaattatgataaaggcttaggacttcaaaaggtgattaaatatttaatgatgtgtcatatgagtcctcaagcttctcagacttctcttattctttacaaaatgaatgcattggccctgacaaaaaggtgctacggtagtgatgaaattataagtagatttgtagtttgtcccatttattattttaatatttatgtttaagtgcttggttgaaaagattccattttatacaagaagggagattcaaaaaaaaaatataaggttgggttagcaatatttatagggcttttattttttaagttcaattgtgtctgtggtccagaagaaattatttaatatgcatctttgagaatattataaaaatatcaaaaaggagctcttcttgtgaaatgtctgttccagctgttgtgactgctgccatttttggaaacatctgcccaatcctgggtgatcaccacatcttttaggggaagtgacaagatgctctggtcatactctttttcccaactttggaaaacataaaaatcactcatataacagctcaaagagtaaaacatttggttcttctgacacttgtggtatagtattagtggaaagtgatttgtaatatgattttatatccacctacctattcatctacctgtgtgtatgtgtgtgtttgtgtgtctatttggcaattcacaagtcctgccaagtggtttctatgagcatctctgtttggtaaggaggacaattgtcagttttgagggggacatgtgttaaatcacagaaaaaaatggtgccttcttctgcgtttgtccctcctgccatgtgtaagttgtaaggattgcctttgtagttaatgtactctttggctttgtttgtttgttttcttcttcagtgaagcagccttactattcatagaagggctagaataggagaaaatgaaaggtagtgagtaattctttgataagatgaggaaataatgggaaaggttgaattaattcctgggcatggactaccagatgaccacaagttgcgttgaggccgcatctttcttcagcagcgtgcaatagctggctcctctataggagatgagcttcattgggagttcctagcaagttgactaaacagcaaaagttctttctcgtgggtaaatatacccacaggttctatgatttgtagctctaggtttcttgatgatcaaggagtgaagtaattgacagggaaaatatagacctatgataaataaccaggaagcattgcttttggacaaggaagaacagagggttttgattttaaaaagaagaaaaaaaaaccttattttttctttcttggcctcaagttcaatatggagaggattgcttccctgaatcctctcttccttccccttttagag

SEQ ID NO: 1665 - protein, 334 aa, Homo sapien
MSQSKGKKRNPGLKIPKEAFEQPQTSSTPPRDLDSKACISIGNQNFEVKADDLEPIMELGRGAYGVVEKMRHVPSGQIMAVKRIRATVNSQEQKRLLMDLDISMRTVDCPFTVTFYGALFREGDVWICMELMDTSLDKFYKQVIDKGQTIPEDILGKIAVSIVKALEHLHSKLSVIHRDVKPSNVLINALGQVKMCDFGISGYLVDSVAKTIDAGCKPYMAPERINPELNQKGYSVKSDIWSLGITMIELAILRFPYDSWGTPFQQLKQVVEEPSPQLPADKFSAEFVDFTSQCLKKNSKERPTYPELMQHPFFTLHESKGTDVASFVKLILGD

SEQ ID NO: 1666 - DNA, 2798 bp, Homo sapien
cgttgctgtcgctctgcacgcacctatgtggaaactaaagcccagagagaaagtctgacttgccccacagccagtgagtgactgcagcagcaccagaatctggtctgtttcctgtttggctcttctaccactacggcttgggatctcgggcatggtggctttgccaatggtccttgttttgctgctggtcctgagcagaggtgagagtgaattggacgccaagatcccatccacaggggatgccacagaatggcggaatcctcacctgtccatgctggggtcctgccagccagccccctcctgccagaagtgcatcctctcacaccccagctgtgcatggtgcaagcaactgaacttcaccgcgtcgggagaggcggaggcgcggcgctgcgcccgacgagaggagctgctggctcgaggctgcccgctggaggagctggaggagccccgcggccagcaggaggtgctgcaggaccagccgctcagccagggcgcccgcggagagggtgccacccagctggcgccgcagcgggtccgggtcacgctgcggcctggggagccccagcagctccaggtccgcttccttcgtgctgagggatacccggtggacctgtactaccttatggacctgagctactccatgaaggacgacctggaacgcgtgcgccagctcgggcacgctctgctggtccggctgcaggaagtcacccattctgtgcgcattggttttggttcctttgtggacaaaacggtgctgccctttgtgagcacagtaccctccaaactgcgccacccctgccccacccggctggagcgctgccagtcaccattcagctttcaccatgtgctgtccctgacgggggacgcacaagccttcgagcgggaggtggggcgccagagtgtgtccggcaatctggactcgcctgaaggtggcttcgatgccattctgcaggctgcactctgccaggagcagattggctggagaaatgtgtcccggctgctggtgttcacttcagacgacacattccatacagctggggacgggaagttgggcggcattttcatgcccagtgatgggcactgccacttggacagcaatggcctctacagtcgcagcacagagtttgactacccttctgtgggtcaggtagcccaggccctctctgcagcaaatatccagcccatctttgctgtcaccagtgccgcactgcctgtctaccaggagctgagtaaactgattcctaagtctgcagttggggagctgagtgaggactccagcaacgtggtacagctcatcatggatgcttataatagcctgtcttccaccgtgacccttgaacactcttcactccctcctggggtccacatttcttacgaatcccagtgtgagggtcctgagaagagggagggtaaggctgaggatcgaggacagtgcaaccacgtccgaatcaaccagacggtgactttctgggtttctctccaagccacccactgcctcccagagccccatctcctgaggctccgggcccttggcttctcagaggagctgattgtggagttgcacacgctgtgtgactgtaattgcagtgacacccagccccaggctccccactgcagtgatggccagggacacctacaatgtggtgtatgcagctgtgcccctggccgcctaggtcggctctgtgagtgctctgtggcagagctgtcctccccagacctggaatctgggtgccgggctcccaatggcacagggcccctgtgcagtggaaagggtcactgtcaatgtggacgctgcagctgcagtggacagagctctgggcatctgtgcgagtgtgacgatgccagctgtgagcgacatgagggcatcctctgcggaggctttggtcgctgccaatgtggagtatgtcactgtcatgccaaccgcacgggcagagcatgcgaatgcagtggggacatggacagttgcatcagtcccgagggagggctctgcagtgggcatggacgctgcaaatgcaaccgctgccagtgcttggacggctactatggtgctctatgcgaccaatgcccaggctgcaagacaccatgcgagagacaccgggactgtgcagagtgtggggccttcaggactggcccactggccaccaactgcagtacagcttgtgcccataccaatgtgaccctggccttggcccctatcttggatgatggctggtgcaaagagcggaccctggacaaccagctgttcttcttcttggtggaggatgacgccagaggcacggtcgtgctcagagtgagaccccaagaaaagggagcagaccacacgcaggccattgtgctgggctgcgtagggggcatcgtggcagtggggctggggctggtcctggcttaccggctctcggtggaaatctatgaccgccgggaatacagtcgctttgagaaggagcagcaacaactcaactggaagcaggacagtaatcctctctacaaaagtgccatcacgaccaccatcaatcctcgctttcaagaggcagacagtcccactctctgaaggagggagggacacttacccaaggctcttctccttggaggacagtgggaactggagggtgagaggaagggtgggtctgtaagaccttggtaggggactaattcactggcgaggtgcggccaccaccctacttcattttcagagtgacacccaagagggctgcttcccatgcctgcaaccttgcatccatctgggctaccccacccaagtatacaataaagtcttacctcagaaaaaaaaaaaaaaaaaa

SEQ ID NO: 1667 - protein, 798 aa, Homo sapien
MVALPMVLVLLLVLSRGESELDAKIPSTGDATEWRNPHLSMLGSCQPAPSCQKCILSHPSCAWCKQLNFTASGEAEARRCARREELLARGCPLEELEEPRGQQEVLQDQPLSQGARGEGATQLAPQRVRVTLRPGEPQQLQVRFLRAEGYPVDLYYLMDLSYSMKDDLERVRQLGHALLVRLQEVTHSVRIGFGSFVDKTVLPFVSTVPSKLRHPCPTRLERCQSPFSFHHVLSLTGDAQAFEREVGRQSVSGNLDSPEGGFDAILQAALCQEQIGWRNVSRLLVFTSDDTFHTAGDGKLGGIFMPSDGHCHLDSNGLYSRSTEFDYPSVGQVAQALSAANIQPIFAVTSAALPVYQELSKLIPKSAVGELSEDSSNVVQLIMDAYNSLSSTVTLEHSSLPPGVHISYESQCEGPEKREGKAEDRGQCNHVRINQTVTFWVSLQATHCLPEPHLLRLRALGFSEELIVELHTLCDCNCSDTQPQAPHCSDGQGHLQCGVCSCAPGRLGRLCECSVAELSSPDLESGCRAPNGTGPLCSGKGHCQCGRCSCSGQSSGHLCECDDASCERHEGILCGGFGRCQCGVCHCHANRTGRACECSGDMDSCISPEGGLCSGHGRCKCNRCQCLDGYYGALCDQCPGCKTPCERHRDCAECGAFRTGPLATNCSTACAHTNVTLALAPILDDGWCKERTLDNQLFFFLVEDDARGTVVLRVRPQEKGADHTQAIVLGCVGGIVAVGLGLVLAYRLSVEIYDRREYSRFEKEQQQLNWKQDSNPLYKSAITTTINPRFQEADSPTL

SEQ ID NO: 1668 - DNA, 4437 bp, Homo sapien
gcgcggcggccgtggttgcggcgcgggaagtttggatcctggttccgtccgctaggagtctgcgtgcgaggattatggctgctgttcctcaaaataatctacaggagcaactagaacgtcactcagccagaacacttaataataaattaagtctttcaaaaccaaaattttcaggtttcacttttaaaaagaaaacatcttcagataacaatgtatctgtaactaatgtgtcagtagcaaaaacacctgtattaagaaataaagatgttaatgttaccgaagacttttccttcagtgaacctctacccaacaccacaaatcagcaaagggtcaaggacttctttaaaaatgctccagcaggacaggaaacacagagaggtggatcaaaatcattattgccagatttcttgcagactccgaaggaagttgtatgcactacccaaaacacaccaactgtaaagaaatcccgggatactgctctcaagaaattagaatttagttcttcaccagattctttaagtaccatcaatgattgggatgatatggatgactttgatacttctgagacttcaaaatcatttgttacaccaccccaaagtcactttgtaagagtaagcactgctcagaaatcaaaaaagggtaagagaaacttttttaaagcacagctttatacaacaaacacagtaaagactgatttgcctccaccctcctctgaaagcgagcaaatagatttgactgaggaacagaaggatgactcagaatggttaagcagcgatgtgatttgcatcgatgatggccccattgctgaagtgcatataaatgaagatgctcaggaaagtgactctctgaaaactcatttggaagatgaaagagataatagcgaaaagaagaagaatttggaagaagctgaattacattcaactgagaaagttccatgtattgaatttgatgatgatgattatgatacggattttgttccaccttctccagaagaaattatttctgcttcttcttcctcttcaaaatgccttagtacgttaaaggaccttgacacatctgacagaaaagaggatgttcttagcacatcaaaagatcttttgtcaaaacctgagaaaatgagtatgcaggagctgaatccagaaaccagcacagactgtgacgctagacagataagtttacagcagcagcttattcatgtgatggagcacatctgtaaattaattgatactattcctgatgataaactgaaacttttggattgtgggaacgaactgcttcagcagcggaacataagaaggaaacttctaacggaagtagattttaataaaagtgatgccagtcttcttggctcattgtggagatacaggcctgattcacttgatggccctatggagggtgattcctgccctacagggaattctatgaaggagttaaatttttcacaccttccctcaaattctgtttctcctggggactgtttactgactaccaccctaggaaagacaggattctctgccaccaggaagaatctttttgaaaggcctttattcaatacccatttacagaagtcctttgtaagtagcaactgggctgaaacaccaagactaggaaaaaaaaatgaaagctcttatttcccaggaaatgttctcacaagcactgctgtgaaagatcagaataaacatactgcttcaataaatgacttagaaagagaaacccaaccttcctatgatattgataattttgacatagatgactttgatgatgatgatgactgggaagacataatgcataatttagcagccagcaaatcttccacagctgcctatcaacccatcaaggaaggtcggccaattaaatcagtatcagaaagactttcctcagccaagacagactgtcttccagtgtcatctactgctcaaaatataaacttctcagagtcaattcagaattatactgacaagtcagcacaaaatttagcatccagaaatctgaaacatgagcgtttccaaagtcttagttttcctcatacaaaggaaatgatgaagatttttcataaaaaatttggcctgcataattttagaactaatcagctagaggcgatcaatgctgcactgcttggtgaagactgttttatcctgatgccgactggaggtggtaagagtttgtgttaccagctccctgcctgtgtttctcctggggtcactgttgtcatttctcccttgagatcacttatcgtagatcaagtccaaaagctgacttccttggatattccagctacatatctgacaggtgataagactgactcagaagctacaaatatttacctccagttatcaaaaaaagacccaatcataaaacttctatatgtcactccagaaaagatctgtgcaagtaacagactcatttctactctggagaatctctatgagaggaagctcttggcacgttttgttattgatgaagcacattgtgtcagtcagtggggacatgattttcgtcaagattacaaaagaatgaatatgcttcgccagaagtttccttctgttccggtgatggctcttacggccacagctaatcccagggtacagaaggacatcctgactcagctgaagattctcagacctcaggtgtttagcatgagctttaacagacataatctgaaatactatgtattaccgaaaaagcctaaaaaggtggcatttgattgcctagaatggatcagaaagcaccacccatatgattcagggataatttactgcctctccaggcgagaatgtgacaccatggctgacacgttacagagagatgggctcgctgctcttgcttaccatgctggcctcagtgattctgccagagatgaagtgcagcagaagtggattaatcaggatggctgtcaggttatctgtgctacaattgcatttggaatggggattgacaaaccggacgtgcgatttgtgattcatgcatctctccctaaatctgtggagggttactaccaagaatctggcagagctggaagagatggggaaatatctcactgcctgcttttctatacctatcatgatgtgaccagactgaaaagacttataatgatggaaaaagatggaaaccatcatacaagagaaactcacttcaataatttgtatagcatggtacattactgtgaaaatataacggaatgcaggagaatacagcttttggcctactttggtgaaaatggatttaatcctgatttttgtaagaaacacccagatgtttcttgtgataattgctgtaaaacaaaggattataaaacaagagatgtgactgacgatgtgaaaagtattgtaagatttgttcaagaacatagttcatcacaaggaatgagaaatataaaacatgtaggtccttctggaagatttactatgaatatgctggtcgacattttcttggggagtaagagtgcaaaaatccagtcaggtatatttggaaaaggatctgcttattcacgacacaatgccgaaagactttttaaaaagctgatacttgacaagattttggatgaagacttatatatcaatgccaatgaccaggcgatcgcttatgtgatgctcggaaataaagcccaaactgtactaaatggcaatttaaaggtagactttatggaaacagaaaattccagcagtgtgaaaaaacaaaaagcgttagtagcaaaagtgtctcagagggaagagatggttaaaaaatgtcttggagaacttacagaagtctgcaaatctctggggaaagtttttggtgtccattacttcaatatttttaataccgtcactctcaagaagcttgcagaatctttatcttctgatcctgaggttttgcttcaaattgatggtgttactgaagacaaactggaaaaatatggtgcggaagtgatttcagtattacagaaatactctgaatggacatcgccagctgaagacagttccccagggataagcctgtccagcagcagaggccccggaagaagtgccgctgaggagcttgacgaggaaatacccgtatcttcccactactttgcaagtaaaaccagaaatgaaaggaagaggaaaaagatgccagcctcccaaaggtctaagaggagaaaaactgcttccagtggttccaaggcaaagggggggtctgccacatgtagaaagatatcttccaaaacgaaatcctccagcatcattggatccagttcagcctcacatacttctcaagcgacatcaggagccaatagcaaattggggattatggctccaccgaagcctataaatagaccgtttcttaagccttcatatgcattctcataacaaccgaatctcaatgtacatagaccctctttcttgtttgtcagcatctgaccatctgtgactataaagctgttattcttgttataccaaaaaaaaaaaaaaaaaaaaa

SEQ ID NO: 1669 - protein, 1417 aa, Homo sapien
MAAVPQNNLQEQLERHSARTLNNKLSLSKPKFSGFTFKKKTSSDNNVSVTNVSVAKTPVLRNKDVNVTEDFSFSEPLPNTTNQQRVKDFFKNAPAGQETQRGGSKSLLPDFLQTPKEVVCTTQNTPTVKKSRDTALKKLEFSSSPDSLSTINDWDDMDDFDTSETSKSFVTPPQSHFVRVSTAQKSKKGKRNFFKAQLYTTNTVKTDLPPPSSESEQIDLTEEQKDDSEWLSSDVICIDDGPIAEVHINEDAQESDSLKTHLEDERDNSEKKKNLEEAELHSTEKVPCIEFDDDDYDTDFVPPSPEEIISASSSSSKCLSTLKDLDTSDRKEDVLSTSKDLLSKPEKMSMQELNPETSTDCDARQISLQQQLIHVMEHICKLIDTIPDDKLKLLDCGNELLQQRNIRRKLLTEVDFNKSDASLLGSLWRYRPDSLDGPMEGDSCPTGNSMKELNFSHLPSNSVSPGDCLLTTTLGKTGFSATRKNLFERPLFNTHLQKSFVSSNWAETPRLGKKNESSYFPGNVLTSTAVKDQNKHTASINDLERETQPSYDIDNFDIDDFDDDDDWEDIMHNLAASKSSTAAYQPIKEGRPIKSVSERLSSAKTDCLPVSSTAQNINFSESIQNYTDKSAQNLASRNLKHERFQSLSFPHTKEMMKIFHKKFGLHNFRTNQLEAINAALLGEDCFILMPTGGGKSLCYQLPACVSPGVTVVISPLRSLIVDQVQKLTSLDIPATYLTGDKTDSEATNIYLQLSKKDPIIKLLYVTPEKICASNRLISTLENLYERKLLARFVIDEAHCVSQWGHDFRQDYKRMNMLRQKFPSVPVMALTATANPRVQKDILTQLKILRPQVFSMSFNRHNLKYYVLPKKPKKVAFDCLEWIRKHHPYDSGIIYCLSRRECDTMADTLQRDGLAALAYHAGLSDSARDEVQQKWINQDGCQVICATIAFGMGIDKPDVRFVIHASLPKSVEGYYQESGRAGRDGEISHCLLFYTYHDVTRLKRLIMMEKDGNHHTRETHFNNLYSMVHYCENITECRRIQLLAYFGENGFNPDFCKKHPDVSCDNCCKTKDYKTRDVTDDVKSIVRFVQEHSSSQGMRNIKHVGPSGRFTMNMLVDIFLGSKSAKIQSGIFGKGSAYSRHNAERLFKKLILDKILDEDLYINANDQAIAYVMLGNKAQTVLNGNLKVDFMETENSSSVKKQKALVAKVSQREEMVKKCLGELTEVCKSLGKVFGVHYFNIFNTVTLKKLAESLSSDPEVLLQIDGVTEDKLEKYGAEVISVLQKYSEWTSPAEDSSPGISLSSSRGPGRSAAEELDEEIPVSSHYFASKTRNERKRKKMPASQRSKRRKTASSGSKAKGGSATCRKISSKTKSSSIIGSSSASHTSQATSGANSKLGIMAPPKPINRPFLKPSYAFS

SEQ ID NO: 1670 - DNA, 2343 bp, Homo sapien
atacgactacacctgctccggagcccgcggcggtacctgcagcggaggagctctgtcttccccttcatctcacgcgagcccggcgtcccgccgcgtgcgccccggcgcagcccgccagtccgcccggagcccgcccagtcgccgcgctgcacgcccggggtgaaccctctgccctcgctgggacagagggccccgcagccgtcatgctttccgccatctacacagtcctggcgggactgctgttcctgccgctcctggtgaacctctgctgcccatacttcttccaggacataggctacttcttgaaggtggccgccgtgggccggagggtgcgcagctacgggcagcggcggccggcgcgcaccatcctgcgggcgttcctggagaaagcgcgccagacgccacacaagccttttctgctcttccgcgacgagactctcacctacgcgcaggtggaccggcgcagcaatcaagtggcccgggcgctgcacgaccacctcggcctgcgccagggagactgcgtggcgctccttatgggtaacgagccggcctacgtgtggctgtggctggggctggtgaagctgggctgtgccatggcgtgcctcaattacaacatccgcgcgaagtccctgctgcactgcttccagtgctgcggggcgaaggtgctgctggtgtcgccagaactacaagcagctgtcgaagagatactgccaagccttaaaaaagatgatgtgtccatctattatgtgagcagaacttctaacacagatgggattgactctttcctggacaaagtggatgaagtatcaactgaacctatcccagagtcatggaggtctgaagtcactttttccactcctgccttatacatttatacttctggaaccacaggtcttccaaaagcagccatgatcactcatcagcgcatatggtatggaactggcctcacttttgtaagcggattgaaggcagatgatgtcatctatatcactctgcccttttaccacagtgctgcactactgattggcattcacggatgtattgtggctggtgctactcttgccttgcggactaaattttcagccagccagttttgggatgactgcagaaaatacaacgtcactgtcattcagtatatcggtgaactgcttcggtatttatgcaactcaccacagaaaccaaatgaccgtgatcataaagtgagactggcactgggaaatggcttacgaggagatgtgtggagacaatttgtcaagagatttggggacatatgcatctatgagttctatgctgccactgaaggcaatattggatttatgaattatgcgagaaaagttggtgctgttggaagagtaaactacctacagaaaaaaatcataacttatgacctgattaaatatgatgtggagaaagatgaacctgtccgtgatgaaaatggatattgcgtcagagttcccaaaggtgaagttggacttctggtttgcaaaatcacacaacttacaccatttaatggctatgctggagcaaaggctcagacagagaagaaaaaactgagagatgtctttaagaaaggagacctctatttcaacagtggagatctcttaatggttgaccatgaaaatttcatctatttccacgacagagttggagatacattccggtggaaaggggaaaatgtggccaccactgaagttgctgatacagttggactggttgattttgtccaagaagtaaatgtttatggagtgcatgtgccagatcatgagggtcgcattggcatggcctccatcaaaatgaaagaaaaccatgaatttgatggaaagaaactctttcagcacattgctgattacctacctagttatgcaaggccccggtttctaagaatacaggacaccattgagatcactggaacttttaaacaccgcaaaatgaccctggtggaggagggctttaaccctgctgtcatcaaagatgccttgtatttcttggatgacacagcaaaaatgtatgtgcctatgactgaggacatctataatgccataagtgctaaaaccctgaaactctgaatattcccaggaggataactcaacatttccagaaagaaactgaatggacagccacttgatataatccaactttaatttgattgaagattgtgaggaaattttgtaggaaatttgcatacccgtaaagggagacttttttaaataacagttgagtctttgcaagtaaaaagatttagagattattatttttcagtgtgcacctactgtttgtatttgcaaactgagcttgttggagggaaggcattattttttaaaatacttagtaaattaaatgaac

SEQ ID NO: 1671 - protein, 620 aa, Homo sapien
MLSAIYTVLAGLLFLPLLVNLCCPYFFQDIGYFLKVAAVGRRVRSYGQRRPARTILRAFLEKARQTPHKPFLLFRDETLTYAQVDRRSNQVARALHDHLGLRQGDCVALLMGNEPAYVWLWLGLVKLGCAMACLNYNIRAKSLLHCFQCCGAKVLLVSPELQAAVEEILPSLKKDDVSIYYVSRTSNTDGIDSFLDKVDEVSTEPIPESWRSEVTFSTPALYIYTSGTTGLPKAAMITHQRIWYGTGLTFVSGLKADDVIYITLPFYHSAALLIGIHGCIVAGATLALRTKFSASQFWDDCRKYNVTVIQYIGELLRYLCNSPQKPNDRDHKVRLALGNGLRGDVWRQFVKRFGDICIYEFYAATEGNIGFMNYARKVGAVGRVNYLQKKIITYDLIKYDVEKDEPVRDENGYCVRVPKGEVGLLVCKITQLTPFNGYAGAKAQTEKKKLRDVFKKGDLYFNSGDLLMVDHENFIYFHDRVGDTFRWKGENVATTEVADTVGLVDFVQEVNVYGVHVPDHEGRIGMASIKMKENHEFDGKKLFQHIADYLPSYARPRFLRIQDTIEITGTFKHRKMTLVEEGFNPAVIKDALYFLDDTAKMYVPMTEDIYNAISAKTLKL

SEQ ID NO: 1672 - DNA, 2343 bp, Homo sapien; identical to SEQ ID NO: 1670

SEQ ID NO: 1673 - protein, 620 aa, Homo sapien; identical to SEQ ID NO: 1671

SEQ ID NO: 1674 - DNA, 2821 bp, Homo sapien
gaaaaaagaaaatgtcagaggaatttgaagccaatactatggattctctggtagacatgccatttgctactgtagatattcaggatgactgtggaatcactgatgaacctcaaataaatttgaagagaagtcaagaaaatgaatgggtcaagagtgatcaagtaaagaagaggaaaaaaaagagaaaagattatcaacccaactatttcctgtccattccaatcaccaacaaagagattataaaaggaattaagatcctgcagaatgcaataatacaacaagatgagcgactggccaaagcaatggtcagtgatggttcctttcatattaccctgctggtgatgcaattattaaatgaagatgaagtaaacattggtattgatgctcttttggaattgaaaccattcatagaagaactcctccagggaaaacatttgactttgccctttcaagggattggtacttttggaaatcaggttggatttgtgaagctggcagaaggagatcatgtaaactcacttttggagatagcagagactgcaaataggacatttcaagaaaaaggcatcctggtaggagagagcagaagttttaaacctcatttgaccttcatgaagttgtcaaaatcaccgtggctccgtaagaatggagtgaaaaaaatagatcctgatttatatgaaaagtttatcagtcacagatttggagaagaaatattatatcgcatagatctttgctccatgctgaagaaaaaacaaagtaatggttattatcactgtgaatcttccattgtgattggtgaaaagaacggaggggagcccgatgacgctgaactagtaaggctcagtaagaggctggtggagaacgcggtgctcaaggctgtccagcagtatctggaggaaacacagaataaaaacaagccgggggaggggagctctgtgaaaaccgaagcagctgatcagaatggcaatgacaatgagaacaacaggaaatgagcccggaacgcaggcccccatgtctctgtgcaaagcctccctgcttccctctgctgagtctagggactgacttgcagcgtgctgtttaagttaagtttctctggtgcaatctgtgaagattgcctaatacttttcatgatcgatgtgttcgcattgctgaaacacaacagaagaaaaatggagtgctgggactggcagaggaaattaattgatgaaagaagaatggcccaagtttcattcgccctcagccacgcacaagggaaagggaactttgggttatgcctcctggacgcaaattaaaggccgagaaagaggccttgccatcaatggaatactgccatttatattgcttagcagggcatttgactactttatctgaggccagaactctcacacacagctatcaagtgctaagtttaaaataatcactgttggaattgtcatctgtacaattagtccataatgtttcatgtttgtcctaagtgtgctgttgctatgcagtgtgatctttatttatagtaaattatgtttcatgtaaatgatatatttttggtgaaatgcaaccttttctataaaatgtgggcaacattttaaagtttttttaaaatcctattttgataagtcagtatgccatatttaatgaaatgttattatataatttttttttcttaggcaagaaacctattggaattcgagacttaattaatgaagctttgcatcgagaaacgatgggtctgaagtccaaagtgaaacagataaaggaacttttattaaagcctgagactcaggccagaattaggagggagctttttgaaggaagacttattaacaacagtaattcagcaaatgacgttgatttcagcacaactttgacataagctctacattgcgattgtgacaacatagcttatgaaatcttttcagcttattaagtagctctttggtaaacaccaaagaagtttctgatagtgtctgcacaacagcaaaccaacatttggtgaggaattagcaatttcttgccaaagaaaattgattctgcccaattattttttgagctacacttgtgttttagaatatctgtttctgtaatattgagagttattttatagaaatgatttcttaattagctgttgtgagatatttctcgggtccttgcagaaaaaaacatacagactgtgaacaaatcattcacaaacagaataaaacagagccaacaacagtattttaagggtcacttgcctcctgttgacacaattgttgctaaatcaaaagaagcgttgtccaggtgtgtctacatctagtgttacttttaatgagaatttgaatgtttattgaacaatagtacttgaatgaacatttataaatgtaattattgcgatcactggttaagaatgttttatatatccttataatatttttcactgatcaaaatgttgttctgctttttcatttcttaaggaatacatgtttgggatttttattttttacgtgtccgaagataagctccaggtcttatcgtatcccttgccatctgaacttgtttgcactgcttctgtttgaaagagcatcttgaaaaacttccccggtatgatgattgttggtaacaactttttctatagtcattgatggagtagatcatgatggaggggaaatcactggagatcaaatatgtaaaatcatttcaaatataaaatccagtttactcatggattttagctattttttcactgggtaaattatactacatttatttacaaatgagtttatgcattttcatggctcttaataaacatattgttttcccttgaaaaaaaaaaaaaaaaaaaaaa

SEQ ID NO: 1675 - protein, 326 aa, Homo sapien
MSEEFEANTMDSLVDMPFATVDIQDDCGITDEPQINLKRSQENEWVKSDQVKKRKKKRKDYQPNYFLSIPITNKEIIKGIKILQNAIIQQDERLAKAMVSDGSFHITLLVMQLLNEDEVNIGIDALLELKPFIEELLQGKHLTLPFQGIGTFGNQVGFVKLAEGDHVNSLLEIAETANRTFQEKGILVGESRSFKPHLTFMKLSKSPWLRKNGVKKIDPDLYEKFISHRFGEEILYRIDLCSMLKKKQSNGYYHCESSIVIGEKNGGEPDDAELVRLSKRLVENAVLKAVQQYLEETQNKNKPGEGSSVKTEAADQNGNDNENNRK

(The sequence listing continues in the following parts.)

What is claimed:

1. Isolated nucleic acid having at least 80% nucleic acid sequence identity to a nucleotide sequence identity to:
(a) the nucleotide sequence shown in any one of the FIGS. 1-7589 (SEQ ID NOS: 1-7589); or
(b) the nucleotide sequence encoding the polypeptide shown in any one of the FIGS. 1-7589 (SEQ ID NOS: 1-7589).

2. A vector comprising the nucleic acid of claim 1.

3. The vector of claim 2 operably linked to control sequences recognized by a host cell transformed with the vector.

4. A host cell comprising the vector of claim 2.

5. The host cell of claim 4, wherein said cell is a CHO cell, an E. coli cell or a yeast cell.

6. A process for producing a PRO polypeptide comprising culturing the host cell of claim 5 under conditions suitable for expression of said PRO polypeptide and recovering said PRO polypeptide from the cell culture.

7. An isolated polypeptide having at least 80% amino acid sequence identity to:
(a) a polypeptide shown in any one of FIGS. 1-7589 (SEQ ID NOS: 1-7589); or
(b) a polypeptide encoded by the full length coding region of the nucleotide sequence shown in any one of FIGS. 1-7589 (SEQ ID NOS: 1-7589).

8. A chimeric molecule comprising a polypeptide according to claim 7 fused to a heterologous amino acid sequence.

9. The chimeric molecule of claim 8, wherein said heterologous amino acid sequence is an epitope tag sequence or an Fc region of an immunoglobulin.

10. An antibody which specifically binds to a polypeptide according to claim 7.

11. The antibody of claim 10, wherein said antibody is a monoclonal antibody, a humanized antibody or a single-chain antibody.

12. A composition of matter comprising (a) a polypeptide of claim 7, (b) an agonist of said polypeptide, (c) an antagonist of said polypeptide, or (d) an antibody that binds to said polypeptide, in combination with a carrier.

13. The composition of matter of claim 12, wherein said carrier is a pharmaceutically acceptable carrier.

14. The composition of matter of claim 13 comprising a therapeutically effective amount of (a), (b), (c) or (d).

15. An article of manufacture, comprising:
a container;
a label on said container; and
a composition of matter comprising (a) a polypeptide of claim 7, (b) an agonist of said polypeptide, (c) an antagonist of said polypeptide, or (d) an antibody that binds to said polypeptide, contained within said container, wherein label on said container indicates that said composition of matter can be used for treating an immune related disease.

16. A method of treating an immune related disorder in a mammal in need thereof comprising administering to said mammal a therapeutically effective amount of (a) a polypeptide of claim 7, (b) an agonist of said polypeptide, (c) an antagonist of said polypeptide, or (d) an antibody that binds to said polypeptide.

17. The method of claim 16, wherein the immune related disorder is systemic lupus erythematosis, rheumatoid arthritis, osteoarthritis, juvenile chronic arthritis, a spondyloarthropathy, systemic sclerosis, an idiopathic inflammatory myopathy, Sjögren's syndrome, systemic vasculitis, sarcoidosis, autoimmune hemolytic anemia, autoimmune thrombocytopenia, thyroiditis, diabetes mellitus, immune-mediated renal disease, a demyelinating disease of the central or peripheral nervous system, idiopathic demyelinating polyneuropathy, Guillain-Barré syndrome, a chronic inflammatory demyelinating polyneuropathy, a hepatobiliary disease, infectious or autoimmune chronic active hepatitis, primary biliary cirrhosis, granulomatous hepatitis, sclerosing cholangitis, inflammatory bowel disease, gluten-sensitive enteropathy, Whipple's disease, an autoimmune or immune-mediated skin disease, a bullous skin disease, erythema multiforme, contact dermatitis, psoriasis, an allergic disease, asthma, allergic rhinitis, atopic dermatitis, food hypersensitivity, urticaria, an immunologic disease of the lung, eosinophilic pneumonias, idiopathic pulmonary fibrosis, hypersensitivity pneumonitis, a transplantation associated disease, graft rejection or graft-versus-host-disease.

18. A method for determining the presence of a PRO polypeptide of the invention as described in FIGS. 1-7589 (SEQ ID NOS: 1-7589), in a sample suspected of containing said polypeptide, said method comprising exposing said sample to an anti-PRO antibody, where the and determining binding of said antibody to a component of said sample.

19. A method of diagnosing an immune related disease in a mammal, said method comprising detecting the level of expression of a gene encoding a PRO polypeptide of the invention as described in FIGS. 1-7589 (SEQ ID NOS: 1-7589), (a) in a test sample of tissue cells obtained from the mammal, and (b) in a control sample of known normal tissue cells of the same cell type, wherein a higher or lower level of expression of said gene in the test sample as compared to the control sample is indicative of the presence of an immune related disease in the mammal from which the test tissue cells were obtained.

20. A method of diagnosing an immune related disease in a mammal, said method comprising (a) contacting a PRO polypeptide of the invention as described in FIGS. 1-7589 (SEQ ID NOS: 1-7589), anti-PRO antibody with a test sample of tissue cells obtained from said mammal and (b) detecting the formation of a complex between the antibody and the polypeptide in the test sample, wherein formation of said complex is indicative of the presence of an immune related disease in the mammal from which the test tissue cells were obtained.

21. A method of identifying a compound that inhibits the activity of a PRO polypeptide of the invention as described in FIGS. 1-7589 (SEQ ID NOS: 1-7589), said method comprising contacting cells which normally respond to said polypeptide with (a) said polypeptide and (b) a candidate compound, and determining the lack responsiveness by said cell to (a).

22. A method of identifying a compound that inhibits the expression of a gene encoding a PRO polypeptide of the invention as described in FIGS. 1-7589 (SEQ ID NOS: 1-7589), said method comprising contacting cells which normally express said polypeptide with a candidate compound, and determining the lack of expression said gene.

23. The method of claim 22, wherein said candidate compound is an antisense nucleic acid.

24. A method of identifying a compound that mimics the activity of a PRO polypeptide of the invention as described in any one of FIGS. 1-7589 (SEQ ID NOS: 1-7589), said method comprising contacting cells which normally respond to said polypeptide with a candidate compound, and determining the responsiveness by said cell to said candidate compound.

25. A method of stimulating the immune response in a mammal, said method comprising administering to said mammal an effective amount of a PRO polypeptide of the invention as described in any one of FIGS. 1-7589 (SEQ ID NOS: 1-7589), antagonist, wherein said immune response is stimulated.

26. A method of diagnosing an inflammatory immune response in a mammal, said method comprising detecting the level of expression of a gene encoding a PRO polypeptide of the invention as described in any one of FIGS. 1-7589 (SEQ ID NOS: 1-7589), (a) in a test sample of tissue cells obtained from the mammal, and (b) in a control sample of known normal tissue cells of the same cell type, wherein a higher or lower level of expression of said gene in the test sample as compared to the control sample is indicative of the presence of an inflammatory immune response in the mammal from which the test tissue cells were obtained.
